United States Patent Application Publication US 2003/0143606 A1 - sequence listing, part 3

SEQ ID NO: 801 - DNA, 6009 bp, Artificial Sequence
  chemically treated genomic DNA (Homo sapiens)
  unsure 507, 3726, 3731, 5312: n is a or g or c or t
attgtttaatttttatttatgagtgagaatatgtagtgtttggttttttgattttgcgatagtttgttgagaatgatggtttttagttttatttatgtttttgcgaaggatatgaatttatttttttttatggttgtatagtattttatggtgtatatgcgttatatttttttaatttagtttattattgatggatatttgggttggttttaagtttttgttattgtgaatagtgtcgtaataaatatacgtgtgtatgtgtttttatcgtagaatgatttataattttttgggtatatgtttagtaatgggattgttgggttaagtggtatttttagttttagatttttgaggaatcgttatattattttttataatggttgaattaatgtatatttttattaatagtgtaaaattatttttatttttttataatttttttagtatttgttgttttttgattttttaatgattgttgttttaattggtatgagatggtattttatntgtggttttgatttgtatttttttaatgattagtgatgatgagtatttttttataagatatatatattttttaattaatgaattatttggttggtggagtagtttattaagtaaatgaaaataaaaaaaagttagggttgtaattttagtttttgataaaatagattttaatttaataaagattaaaagagataaagaagttattatataatggtaaagggattaatttaataagaagagttaattattttaaatatatatgtatttaatataggagtatttagatttataaagtaagttttgagtgatttataaagagatttagatttttatataatattaatgggagattttaatattttattgttaatattagatagattaatgagatagaaagtttataaggatatttaggaattgaatttagttttgtattaagcggatttaatagatatttatagaaatttttattttaaattaatagaatatatattttttttagtattatattatattatatttattttaaaatggattatatagttggaagtaaagttttttttagtaaatgtaaaagaatagaaattaaaataaattgttttttagattatagtgtaattaaattagaatttaggattaagaaatttatttaaaattgtttaattatatggaaattgaataatttgtttttgaatgattattgggtatataacgaaatgaaggtagaaataaagacgttttttgaaatcgacgagaataaagatataatatattagaatttttgggatatatttaaagtagtgtgtagagggaaatttatagtattaaatgtttataagagaaagtaggaaagatttaaaattgatattttaatattataattaaaagaattagaaaagtaagagtaaatatatttataagttagtagaaggtaagaaataattaaaattagagtagaattgaaggaaatagagatataaaatttttttaaaaaattaatgaatttaggagttggttttttgaaaggattaataaaattgatagatagattattagtaagagtaattttttttgaaaggagagaagaattaaatagatataataaaaaatgaggggggggatattattatcgattttatagaaatataaattattattagagaattttataaatatttttatgtaaataaattagaaaatttagaagaaatggataaatttttcgatatatatatttttttaagattaaattaggaagaagttgaatttttgaatagattaataataggttttgaaattgtggtaatagttaaaagaattttaattaaaaagcgtttaggattagatggaatatagatcggattttattagattataaggaggaattagattatcgtgttgaaaaattgaaattaattgaaaaaggggatttttttttatatattttaagagtttgtatcgttttgatatttaaagtttggtgaatattcgtgttttgttttttaaggcgtttgagaatttgtaggcgggaattatagtttttatgcgatttattaaatttagcggggcgaatagagatgatttattataatgagtttaagagcgagatatattaatagtttcgaaggttaaaaattataataaataagtaatttagttgtatattgtatatatatataataatgataggttattttagtataataagaaatatagttttgtatgtttatagaattagttttgaataattttgaatttttaagatataggaaataaattatttttatattataaattaaaatattattttttaattttttaaaaaaattaaaggtatagaatattttattgttagataaattttatatgtttttatagttttttaataaaaattatgaacggatatttatgtaattttaaaaatagaaatattatttattttttttataatttaattgatgattttaatatttacgagggtattggggggttttagtgatatggtttggatatgtttttatttaaatattattttgaattgtagttttaataatttttatgtgttgtgggaagaaattggtggaaggtaattgaattatgggggcgggttttttttatgttatttttatgatagtgaataagttttataatatttgacggttttataaaggggagtttttttgtacgggttttttttttttgtttgtcgttatgtgagaggtgttatttattttttgttatgattgtgaggtttttttagttacgtggaattgtgagtttattaaatttttttttttgtaaattgtttagttttggttatgtttttattagtagtatgataatggattaatatatttagtattagaagaataaatgaaatgagtggtattgttatattaattagagtatagattggaatttttaaaaggaatatttaagagtatgagttatatttagttaaatcgtgataacgagtaaatttttatttttaagatttgtttttagttcggtttttgtttagtggtaaatagaaaatatttataaagtattttttatgcgttgagtattatggatatttagagttgaataaaatatagttttttttatttaaggagttattatgttaatggggataatagataagtaaattatttaatttttttatttattttaaaatatagattatttatatttattattattaaaattgagatgtattttgtaattaatgataatttataattgttattagttagatgatatttatgatgtagttgttattgtttgtattcgttatttatagttgtataataaattattttacgatttggtggttgaagatatttattatatgaaagtttttgtagtttaggagtttaagtatggattagttgggttttttggtttaagaatttttataggttgtaattaaggtgttttttgaggttgtgattattttaaagtttaattggggatggatttgtttttaagtttagttaagtgggttaagtggttgttggttgaatttaattttttatggtttattagagtgaggttttggttgttagagattttttttagttttttgtttagtgatttttttgtagggtagtttatgatatgatagttgggtttattagagtgaagaaattagtagggggagagagggtaaatgagggaggaagagggatgggagagatgattatttaaatatttaantttgnattttaatagtatattttttaattaagttttttttagtatttttttaacgataatttattttttttattatttatttaattttttagtattgtatttattacgtttttatagttttttattttttatatagggttataaagaggatatttgttataaaatatggtaaatatttaattaaaaatgtaaatagttgtattaaaatgtcgatttataaaatttttagattagatgagaaaagatttatttttttggaaaagattattgattattgagagttaagaatatagttggtttttaatttaatttttttttggtaaatagaataggaatggtttggtaaatttataggaaagaatatgtgtgtattgtgtttttggtttttttagatgttagttgttgaaggtttaaggtgtgagtttgtgtatgtgtttttgaggattagtttttgtttaaagaggtagtgggaagattgagtgggataatttatatatggatattttgtgtattagtgtgcgtttaatttaaagatagattttatttgatagtaatattgatatgttattttaatgaattagaaaaaatgagaaaatgggatgtaaatttttatttggatttatggggatagtattaaaaagatttttagtgtttttgtagaatgttagtaatatttattaaatatttattttaggtgttatgtgtttatatgagaagttaaaggtatttgttaagttaggtaggaattgtagtcggttggttgttttttatttggagaaagtaggtaattgggtagtgattgaagtgtttagtagggggttggtattttttgtttataagtaatattggtttttttttagagttttagtttagcggagttgtcgtttgttggtgaagttcgtgacgtgtaaagtattttgtttataggatttgaggattttttagtgtagtttttttttatttattttaaatttttagattttaaatattaggaaagacgttgtgggaaaatagtaggttaaaagtttttagtaaattgtagttagggagatttagattagaatggaggtagaaagaattgatgtagagtgggtttaattttaagtttttttgtggttaagttttgttgttgttaatttattgaatttagagttgtattgtattggttatgtgaaagttagagtagtattagtgttaaaatagtgatagagagttttgaatattatagttagtatatatgtatttagagtatttttattaaagaaggtaaagagttcggtatagattttatttttatttttattcggttgtaaaattaatagttaagaaatagtatttaagggaattttaggtgggaaaaaaaatttagagatggttttaaataacgatgttttttttttttattttaggaattttttttgttttgtgttttgaattggagtttttacgaattggaatatatatttgttttattttagttagtttttttgttttgttgttatatatacgttagtagttaagtagggttaatattaaaattttgaattgtaatttcgaaaattatttaattattaggagtagaatanttgtaaaaacgtttaaaatatgaatttatttagtttttaggattatgaattttttttttgtttttagatagaataagaataggttgtttgtttttgtggtttaataataagatgtagatagattgggaaataagcgagtttatttttatagttagttatagcgagaaggttagagtaatttattaaattaatttattatttttttttaaagttataagttttttttagtgtttatatatattcggggggggaatttatttttgtaattagttatagggagaaggttggagtaatttattagattaatttattatattaatttaaagttataagttttttttagtgtttatatatatttataaaagaatttatttttgtaattagttatagggagaaggttggagtaatttattagattaatttattatattaatttaaagttataagttttttttagtgtttatatatatttagtgtatttataagtcgaaagttaaagtgtttattttatttaattttaattagggtttacggtttagataattattttagagttttgtaaaaattatttaatttaaagtgggttttggtataaggtatgtaagaatgtttttattattttaattaaattttaaggtttgagaaagtttagatatggttttaatggatttgtttgtatattttaggttttgtagta

SEQ ID NO: 802 - DNA, 6009 bp, Artificial Sequence
  chemically treated genomic DNA (Homo sapiens)
  unsure 698, 2279, 2284, 5503: n is a or g or c or t
tattataaagtttagaatgtataaataggtttattaagattatgtttgggtttttttagattttagagtttaattaaaataatggagatatttttgtatattttgtattaggatttattttagattaagtaatttttgtaaggttttgaagtagttgtttagatcgtggattttagttaagattaggtagagtgaatattttggttttcggtttgtaggtgtattgaatgtatataagtattagagaaaatttgtaattttgagttggtatgatgagttggtttgatgagttattttaattttttttttgtaattggttgtagaaataaatttttttatgaatatatataagtattagagaaaatttgtaattttgagttggtatgatgagttggtttgatgagttattttaattttttttttgtaattggttgtagaaataaatttttttttcgaatatatataagtattaggaaaaatttgtaattttgaaaaaaaatgatgagttggtttgatgagttattttgattttttcgttgtaattggttgtagaaataaattcgtttgttttttagtttgtttgtattttgttattggattataagaataagtagtttgtttttgttttgtttgggaataaggggaagatttataattttaaaagttagatgaatttatattttggacgtttttgtagntgttttatttttagtaattgaatagttttcggagttgtagtttaggattttgatattgattttatttagttattaacgtatgtgtaatagtaaaatagaggagttaattaagatgaggtagatatgtattttagttcgtaaagattttaatttaggatatagggtaaagggaatttttagggtgagagggaagaatatcgttatttagagttatttttagatttttttttttatttaaagtttttttagatgttattttttaattattgattttgtaatcgagtgaagatgaagataagatttatgtcgggttttttgttttttttaataaaaatattttgagtatatatatattaattatggtatttaaaattttttgttattattttgatattggtgttgttttggtttttatatgattagtgtaatataattttaaatttaataagttaataataataaaatttagttataaaaaggtttagaattaaatttattttgtattagttttttttatttttattttagtttgagtttttttggttgtagtttattaagaatttttggtttgttatttttttatagcgttttttttgatatttagaatttggaggtttaaagtgggtagaaaaaaattgtattgagaaatttttaaattttataggtaggatgttttgtacgttacgggttttattagtaaacggtagtttcgttgagttgaggttttgaagaggaattagtgttatttatagatagagaatgttagttttttgttggatattttaattattgtttagttgtttgttttttttagatgagaagtaattagtcgattgtagtttttatttagtttaatagatatttttggttttttatgtaagtatatagtatttagggtaggtatttaataaatgttgttagtattttgtaaaggtattgaaaatttttttgatattatttttatgaatttagatggggatttatattttatttttttattttttttaatttattagaatgatatgttaatattgttattaaatgaggtttgtttttgaattaaacgtatattgatgtatagggtgtttatgtgtgagttattttatttagtttttttattgtttttttgaatagggattgatttttagaaatatatgtatagatttatattttaaatttttagtaattgatatttggaaaagttagaagtataatgtatatatgtttttttttgtagatttgttaagttatttttattttgtttattagggagaaattaaattgggaattagttgtatttttaatttttaatgattaatagttttttttagaaaaatgggtttttttttatttgatttaaaaattttatgaatcggtattttgatgtagttatttgtatttttaattgaatgtttgttatgttttatagtaaatattttttttatagttttgtgtggaaaataaagaattataaaagcgtgatagatataatattgaggaattgagtgggtggtaaaagaagtaagttatcgttgaagaagtgttagaaaaagtttaattgaggaatgtgttattagaatntaagnttaggtgtttgggtgattattttttttattttttttttttttttatttattttttttttttttattagtttttttattttaataaatttagttgttatgttataagttattttatagagagattattaggtaaggaattaagggagatttttggtaattaaggttttattttaataggttatgagaaattgaatttagttaataattatttgatttatttgattgagtttggaagtagatttatttttagttgaattttaagataattataattttagaaaatattttgattgtagtttgtgagagtttttgagttagaggatttagttaatttatgtttgaatttttgagttataaaaatttttatgtgataaatgtttttagttattaagtcgtggggtaatttgttatgtagttatagataacgaatgtaggtaatagtaattatattatgaatgttatttggttgatagtagttataaattgttattgattgtaagatgtattttaattttagtgatgataaatgtggataatttgtattttagaataaatggagaagttgagtagtttatttgtttgttgtttttattagtatgataattttttaaatgaaaagaattgtgttttatttagttttgagtgtttatggtgtttaacgtataagaaatgttttatagatgttttttatttattattggataaagatcgagttagaggtaaattttgagaataagaatttgttcgttgttacggtttagttgggtatgatttatatttttaaatgttttttttaaaagttttagtttatgttttaattaatatggtaatgttatttattttatttgtttttttggtattgagtgtattagtttattattatgttgttgataaagatatgattaagattgggtaatttataaaagaaaaggtttaatggatttatagttttacgtggttggggaggttttataattatggtagaaggtgaatggtattttttatatggcgatagataagagaagagaattcgtgtagagaagtttttttttataaaatcgttagatattgtgagatttatttattattatgagaatagtatgggaaagattcgtttttatgatttaattattttttattagtttttttttataatatatgggaattgttagaattataatttaagatgatatttgagtggggatatatttaaattatattattgaggttttttaatattttcgtggatgttgaggttattaattgaattgtggaaaaaatgaataatatttttatttttagaattatatggatattcgtttataatttttattagggggttataagaatatgtagaatttatttagtaatggagtattttatatttttagtttttttggaaggttggagaataatattttaatttataatgtggagataatttattttttatattttggaaatttagagttgtttaagattaattttataggtatataagattgtgttttttgttgtgttgagatagtttattattgttatgtgtgtgtgtaatatgtaattaggttatttatttattatggtttttaattttcggagttgttggtgtatttcgtttttggatttattatagtgagttatttttgttcgtttcgttgagtttaataaatcgtataggagttgtagttttcgtttataaatttttaggcgttttgaaggataggatacgagtgtttattagattttgggtattaggacgatgtaggtttttaaaatgtgtgagggaggatttttttttttaattgattttagttttttagtacgatggtttagtttttttttgtaatttggtagaattcggtttgtgttttatttgattttggacgttttttggttggggtttttttgattattgttataattttagagtttgttattggtttatttagagatttaatttttttttggtttagttttgggagggtgtatgtgtcgaggaatttatttattttttttagattttttagtttatttgtatagaggtgtttataggattttttgatggtagtttgtatttttgtgggatcggtggtgatatttttttttttattttttattgtgtttatttgatttttttttttttttaaaaaaaattatttttgttagtgatttatttattaattttgttggtttttttaaaaaattagtttttggatttattaattttttgaaggggttttgtgtttttattttttttagttttgttttgattttagttattttttgttttttgttagtttgtgaatgtgtttgtttttgtttttttagtttttttaattgtgatgttagggtgttaattttggattttttttgtttttttttgtgggtatttagtgttataaatttttttttatatattgttttgaatgtgttttagagattttggtatgttgtatttttgttttcgtcggttttaaagaacgtttttatttttgtttttatttcgttatgtatttagtagttatttaggagtaggttgtttagtttttatgtagttgagtagttttgagtgagttttttaattttgagttttagtttgattgtattgtggtttgagagatagtttgttttaatttttgtttttttatatttgttgaggagagttttatttttaattatgtggtttattttggaataggtgtggtgtggtgtggtgttgaaaaaaatgtatattttgttgatttggggtggagatttttgtagatgtttattaggttcgtttggtgtagagttgagtttaatttttgggtatttttatgaattttttgttttattgatttgtttaatgttgatagtggggtgttaaagttttttattagtattgtgtgggagtttaagtttttttgtaggttatttaggatttgttttatgaatttgggtgtttttgtattgggtgtatatatatttaggataattagttttttttgttgaattgatttttttattattatgtaatggtttttttgttttttttgatttttgttgggttaaagtttgttttattagagattaggattgtaattttggtttttttttgtttttatttgtttggtagattgttttattagttaagtagtttattaattaaagaatatgtatgttttatgaaaaaatgtttattattattggttattagagaaatgtaaattaaaattatanatgagatattattttatgttagttagaatagtaattattaaaaagttaggaaataatagatgttggagaggttgtgggaaaataggaatggttttatattgttggtgggagtgtatattagtttaattattgtggaagatagtgtggcgattttttaaggatttagaattagaaatattatttgatttagtaattttattattgggtatatatttaaaggattataaattattttacgataaagatatatgtatacgtatgtttattgcggtattatttataatagtaaagatttggaattaatttagatgtttattaatggtagattggattaagaaaatgtggcgtatatatattatggaatattatgtagttataaaaaaggatgagtttatgtttttcgtagggatatggatgaagttggaaattattatttttagtaaattatcgtaagattaggaaattaaatattgtatgtttttatttataagtgggagttgaataat

SEQ ID NO: 803 - DNA, 7118 bp, Artificial Sequence
  chemically treated genomic DNA (Homo sapiens)
aagagaagatagattaatgaatattgttgttaataagttttgttttgaataatatattttaatagttttatttttgtttttttaaaagttttgtaattgggtattattgtttttgtttatagatgagtgatttgaggtttagagagggaaggtaatttgttttgttttatatagtttagatttgaattttagcgttttatcgtgaaatttgtaacgtttttttcgtattattatatatcgaaggtaggcgtttgtgtagaaaataggttgtttagaaagaagagtgtttatttttggcgagtttttgtgcgttatattttgggtttttttattgttttatgttttaggtattatttttttttttttagagatgaggaaattgaggtttggattgtagaagttgagtttagattcgtaaatttgtttatagggtttgtcggaatttttttaggttttgtttagttttattgggttttataattggtttttttgtttattgattattgttttaattagtaaaatttttggttagaagggcgggtgtttttaggaggatttagagaatagtagtgagttaaaaagtaaatagattttaagagagggttttttatgagtggttggttgtttggaaaattaagaataatagtgtttggagtgaagagaaaagaatagggtggtgttttttaggtttagttaaggtttttttgtatattgtggttggggatggaaggggcgggggaggttattttttttggtttttggtagggggtttcgtagatatatagagattaaggttatagaggaaaggagggtttagagttggttgtgttgtggaggttttgggttaattataggggagggaggggttttttagggggatatgggttgtatagtttttattttgtggtagatatagagaatttgtttattgtgtgtttggagttgggtaggatttaggaatagtcgagattagaggttaaggagattttcgaggtgtatagaagtagagattaggatatgtttatgtattgagttggtagtagaagggttgtttttaaattaaagaaattatgttagatttgagtgttatgtggtttagagggtaggtgttatagttagttttgtattaaatggttatagtttggggattttttaggtttttggtttgggtagttatattaggtgtgtgaaaggttagagggttttttcggtgttattttttgttttggtttgggaagtgtcgtggggatagttgtttcggagatttttggttgttaggtttgatttgggtttgattgatttagtttgttatttggaaagggtattgttgttttttgtttaggttaggtggtgttaggagtttttgtttggttttcgtagatagagtttgggttttgaagttagttagatttgtgtttgaattttggtaatatttttttttagttgagtgatttgaatttttttgagttttagttttttaggttgggtttagaggtgaggtggtatgttgttattagtgattgtagtgtttttttttttaagttaggggttgtggattgtttgatttagaacggtttgtagaggtgatttggtcgaatgtatttattttatagatggaattttgaagtttagagatttgtaggttttggatttggttgtataattagtatttggtattgtttgggttaggaaagaggttttaagttagagtattaggttttattttgtattttgtatatgaagatattgaaatttagaaaggtatagtgatttgtttaaggttattaggaagttagtgttagagttagttttagtattcgggtttttttttttttatttaggggtttttttttttgtatttgaatttttttatttttttgaatttatatatttttttttaggttggaagtagagtaagataatgttgttcgtattatggtttttatttattagtgttttgtagtaagggttttagggtttgtagtgagggtttttagagggtaagggtggggtttgtttattagtttttttgtgttaagggtttgggttttagagttatatggtaggtaaagttgtaggttttttgtgattattaacgtggtttttgggttgatggttagtggtttttggggttaaggttaagttatagtagtttttttattaattattaattatgtaggttagagttatattgttttggaaggggttttttagttgggtagttgttggtttaggtttagtttgggggttgggtagttaagaaaatttttttttatttgtttgaattttttaaattgtttaatgagtaggtattattataagtatattttaaaagggattgtttttggatttgtgttttataaaagaataaaattatattggatatatatttgtaaagttttaaatgttacggtaatgtttttataattttttcggttagtatattaaggtataatttatatattatagtgatttatatattaagtatatttatagttttatgaattttagtagatttaattggttatataatttttattataatttagtattagaatatttttattatttcgaaaagtttttttatgttaattgtagtgatttaggtattttttttagttttaggtagttacggtaatgtttgaggatgaaattttttttttttttttttttttagtaaacggttttaatagtttggtgtttattttttgattttttaagggtatatgtaaaaataggtattattgtaaaaaggagaagaggagatatattatagttattgttgtgtaattgttttttgtatttggagatttttttgtgtttattgagtgtttattatatgttaggtataattagacgtagtttattttttttttatagttgtatagtgtttattgtaatggtggttttattatttatttaattaggatttttgggttttttttagttttttttaaataatgttttagtgaatatttttgtatatatatttttgtgtttgttggtaagtaattttgtagaaagtggaattgttgttgcgttgtgtgttttgagtttggataaattttttatttagagaggtgaaattggtttatgtttttattaagagtttatgggagttgtggggttttttataatattattttttaaatggttagggggaagggagagttttttgaatttaggttagagttggtttattgtaggttgggtaggtttaggtttggatttggagttcggagaatttaggtatttttttggggttttttatagatatcgagataaagtttagattttttagtgtggtatataggtttcggtgatttttgttgttttttgtagttttttttgtttttgttttttgtgttttatattggatttttggtaatttattggatatggttatgtttgtttgttttttgtttatgcgttttttttttttggaatgttttttttttttaattttcgttttttttgttttttaaggtttgggttataagtttttttttttacgaagtttttttataatttttttagtttgaattgttttttttgtgtttttttagttttttatttgaattatatttttttttaggtgggagtaagttgtgggtgggagagggtaaattttagttttattagatagaggttggattttcggaagagttgggaagggggattatagtttttggggaggggtggagaatttatatttatttagttgttggttaggttatttttatatttatagatcgatttaatttttaattattgtatttatttagtagatgagaagaatgagatattgaaaatatgtatagtggaggtgggaatgaaagttagttttttaattttttagtttttttttttgttattgtattaggttgtagggtgaaggggaggtttgggatataaagagaatttagaggtggagtagttggattttgtgtagtgttaggagggaggagaggggttggagtaggtgggaagtaggttttttttagtttggatagtattttttttaatttaatgattttagtgggagggtggagggatggggatgggaagggagtttgggagtgaggaggaaaggtaaattttgtttttttttaggggagttaatgaatagtatttaaaatggaaattaaataaaataattttaggaagtaataagggtttgtttagagatatgacggtaaattttgaattattagttaaaagaggtagatagtagtggttgtttttggggagaggtaaatgtgatggagagggaataattgtgtataaatatgtgattttacgttttgattaaaataagatttttaaaaaataaatattttttaaaaagaaggaaagaaaagtaggaggggttattttaggagttgagcgttttgtttcgtttttatgagttttgtcggtttcgcgtgtttacgggagtcgggttttttgttttgttgcggcgtatgatgtttggtgggggttttgtttaggttttttcggttagatataattcgtagtattattataagttgtgtgtaagttgtttattattttgcgttgtttttttttttgtaaaatgggttggtcgttgtattttttttgaaaaggatgtgttgatgtttcggtgaaaagtttttaaaaatgttagtttatgttatttttttgttggaggtgttaggtgcggagaggcgagggggttcgcgtgcgtcgtaggaggtttagttgggttcgtcgtcgttcgtgtttgcgtttatttagtgtgtatatagttagcgttcgtcgtatgttaggtttggtgttgggttttcgtttcggagttggggtgtaggggttgtcgcgttttgtcgggtcgattcgggtgggaatttagatgtttttaagattcgagatagattttcgtttcgcgttttttttggggggcggttttcggtttgggcgggatgggcgggcggttatttaaggtcggcgattcgaggtcgcggttgtcgattgggttttttgtcgttgtcgttattatggtttcgtatcgtttcgcgttcgcgttgttttgcgcgttgtttttggcgttgtgcgcgttgtcgttgttcgttcgcgcggttattgcgtcgcggggggcgttttaggcgggggcgttttaggggcgggtgttcgaggcgcgggtgagtgttcggggggtttcggggttttcggagtaattttttattgtaagtttttgtagatatagcgttaggaaaaggggagtaatttaggtttagaatggaaaaattgttttgttgttttgtaagtattttttgttgttttcggggttttggttcgtagacgagggtgggagtttcggggttttggttgtttttttttaggaagttaattttattttggtcggatttttttttttttgtttttttttaatattttattttttgttttttgaattttttttttttttttttgatttttttttttttttgttttattttttttttttttttttttgatgtttttttttatttacgattttttgtttttatttgatttttttttttttttaatattttttttttttttgtatgatttcgtttgtttgtttatggttattattattatttttttttttttttttgttgttttttttgttttgtttggtttcgtgtttttttatttttttgtttgagttttttttattttgtttttttgattttttttttttgatttttatttttattagatttttttttcggttagaggtgatttgtatttgttgatttttgttttcgattttagtttaatttttttgtatttttttcggttttagttttagtgtatgtgtaatagtttttttatttttaattattttatttttaatagttttttgtagattttggtgtatttttttttttttttttaagaaatgaaatttgggggtggtgtgttgtggggtacgagggaggaggtagatagcgtaggaggttatttggatttagttatttggattttttttgggggtatgatggggatgggtatagagaggagagggggtttttgtggattataggaggtttaggtgggtttatttcgatttgcgagtgtatttatttagcgtgtatagagttagcgtttgttgtttgttaggtttcgtgttggaaatttttttattttttaaagagtaaaagtaaataggttgtgtgattttcggttagtttttttttttttttgagttttagtttttttgtttgtagattggggttggataatgagtttttagagggttttttggttttaagagttattgaagatgttggaaggaagtaagttgaggttttggggatttttagatttattattgttatttgaggggtttatttattattttagagtttgtgattttggagtttggggtaatttttgttatattgttttttagttggaggtttttggtagagtttttttatttttttgtgtttcggttattatatttaattggtaataagaaaagaagggaggttgggcgcggtggtttacgtttgtaattttaatattttgggaggttaaggtaggtggattatttgaggttaggagttttagattagtttgattaatatggcgaaattttgtttgtattaaaaatataaaattagttaggtatagtatcgtatgtttgtaattttagttatttaggaggttgaggtaggagaatcgtttgaatttaggaggtagaggttatagtgagtcgagattgtattattgtattttagattggataatagtgcgagattttgttttaaaaaaaaaaaaaaaaaaagaaaaaaagaaagaaagaaaagaaaggagtagggaggtagagttttttgtattttttattattagaaaaagttgaagaggggttgagtaggagggatagatgttggttagggtataggttttgaagtataaaatttttgttttgtttgttgattcgttgagatagggtgtttagaaggggatagatttttttggggcgtggggagagtaggaggtttaagtgagatgtttttggtgttagaaatcgtttttttttatgtttggggtttttttttgttaggattttgtttcgtttaggttttgttttgttttattttagt

SEQ ID NO: 804 - DNA, 7118 bp, Artificial Sequence
  chemically treated genomic DNA (Homo sapiens)
gttgggatgagatagggtagagtttaagcggggtagggttttggtagggagagattttaggtatgagggagggcggtttttagtattaagagtattttatttgagttttttgttttttttacgttttagggaagtttatttttttttgggtattttgttttaacgagttagtaaatagggtaagagttttatgttttaaaatttgtgttttggttagtatttgttttttttatttagtttttttttagttttttttggtgatggagggtatagagggttttatttttttgttttttttttttttttttttttttttttttttttttttttttttttttgagatagagtttcgtattgttgtttagtttggagtgtaatggtgtaatttcgatttattgtaatttttgttttttgggtttaagcgatttttttgttttagttttttgagtagttgggattataggtatgcgatattatgtttggttaattttgtatttttagtatagatagggtttcgttatgttggttaggttggtttggaatttttgattttaggtgatttatttgttttggttttttaaagtgttgggattataggcgtgagttatcgcgtttagttttttttttttttttattgttaattggatgtgataatcgaggtatagagagatgaagggattttgttagggatttttagttaggaaatagtgtagtaggggttgttttaggttttaagattataagttttgggatgatgggtagattttttagatggtaatagtaaatttaagggtttttagggttttagtttgtttttttttagtatttttaatggtttttgaaattaaagggttttttgagagtttattatttaattttaatttgtagatagagaaattgaggtttaaagaggggaggggattgatcgaaggttatatagtttgtttgtttttgttttttgggaagtggaaagatttttagtacggggtttggtagatagtaggcgttagttttgtgtacgttaagtgggtgtattcgtaaatcgaggtgagtttatttgagttttttgtgatttataggagtttttttttttttttgtatttatttttattatatttttaagaagggtttaaatggttgagtttaagtggttttttgcgttgtttgttttttttttcgtgttttataatatattatttttaaattttattttttggaagaggagaagaggatgtattagggtttgtaggaggttgttggagatgaagtggttaaaaatggggaggttattatatatgtattggggttggggtcggggagggtgtaggagggttaggttggagtcgaggataaaaattagtaggtgtaggttatttttggtcggagaagagatttggtgggagtaaaaattagaggagagaagttagagaaataaggtggggagaatttaggtagaagggtggaaaaatacgaaattagatagggtagggaagatagtagaaaggagagaagaaatgataataatgattataagtagataggcgaggttatataagaaagaaggaaatattggagaaggagagagattaaatgagaataaggaatcgtaaatggaagaagatattagaagagagaaggagagaagtgaggtagaggggagaaaaaattagagaaggaaaaggagaatttaggagataggaggtaagatgttagaggaggataggggaaaagaaattcggttaaggtgaggttagttttttgggaaggaatagttagggtttcgaggtttttattttcgtttgcgagttagagtttcggaagtagtaagagatatttataaagtaataaaatagtttttttattttagatttgaattatttttttttttttagcgttgtatttgtaagaatttataatagagagttatttcgggagtttcggggtttttcgggtatttattcgcgtttcgggtattcgtttttggggcgttttcgtttgggacgtttttcgcgacgtagtggtcgcgcggacgggtagcgatagcgcgtatagcgttagggatagcgcgtaaagtagcgcgggcgcggggcggtgcggagttatggtggcgatagcggtaggggatttagtcggtagtcgcggtttcgggtcgtcgattttaagtagtcgttcgtttatttcgtttaagtcggggatcgttttttagggagggcgcggggcggggatttgtttcggattttggagatatttgggtttttattcggatcgattcgatagggcgcggtagtttttgtattttagtttcggggcggagatttagtattaggtttgatatacggcgggcgttagttgtgtgtatattaaatgggcgtaggtacgagcggcggcgagtttagttgagttttttgcgacgtacgcgagttttttcgttttttcgtatttaatatttttagtaaaaaaataatatgaattaatatttttgaaagttttttatcgaggtattagtatattttttttagagagggtataacggttaatttattttatagaggggggaatagcgtagagtggtgaataatttgtatatagtttgtaatggtgttgcggattgtatttagtcggaggggtttgggtagaatttttattaggtattatgcgtcgtagtagggtaggggattcggttttcgtgggtacgcgaagtcggtaggatttataggggcggggtagaacgtttagtttttgggatagttttttttatttttttttttttttttttaaaaagtgtttgttttttaaaagttttattttgattaaaacgtaaagttatatgtttgtatatagttgttttttttttattatatttatttttttttaggggtaattattgttatttattttttttagttgatggtttagggtttatcgttatgtttttaagtaagtttttgttattttttgaagttgttttgtttggtttttattttaggtattatttattgatttttttgggggaagatagagtttgttttttttttttatttttaggttttttttttatttttatttttttatttttttattagagttattgggttaagggaagtgttatttaaattgaaggaggtttattttttatttattttaatttttttttttttttttagtattgtatagaatttaattgttttatttttaagttttttttgtattttagattttttttttattttgtagtttgatgtagtgataggaaagaggattggagagttggagagttggtttttatttttatttttattgtgtatgtttttaatgttttattttttttatttattaaatgagtatagtagttgagaattaaatcggtttgtgggtatgaaaatagtttggttagtagttaggtaaatgtgagttttttatttttttttagaaattatggtttttttttttagttttttcggaagtttagtttttatttaatgaggttgaagtttgtttttttttatttataatttgtttttatttaaggggggatatggtttagataaaagattaaaggaatatagagaagataatttaggttggagagattataagaaggtttcgtggagaaagggatttgtgatttaggttttgaaggatagggaggacggagattaagaagaaaagatattttagggggaggggacgtataggtaaagggtaggtaaatataattatatttagtgaattattaggggtttagtatgaaatatagggagtaagagtagaggaggttgtagagggtagtaggggttatcgaggtttgtgtgttatattgaagagtttgaattttgtttcggtgtttgtggggggttttagagggatatttgagtttttcgggttttaagtttaggtttgggtttgtttagtttgtagtgggttagttttggtttaaatttagagagtttttttttttttttagttatttggaggatgatattataaaaaattttatagtttttataggtttttaatggaagtataaattagttttatttttttagataaaaaatttatttaaatttaaaatatataacgtaataatagttttattttttatagaattatttattaataaatataaaaatatatgtgtaaggatgtttattgaagtattgtttgaagaaaattggaaaggatttaaaagttttggttaaataaatgatggagttattattataatagatattatgtagttgtgaaaaaagaatgagttacgtttgattgtgtttggtatatagtaggtatttaataaatatagggagatttttaagtgtagaaagtaattgtataataatggttatagtatattttttttttttttttttataatggtgtttgtttttgtatatatttttaaaaaattagagggtaagtattaaattgttaaggtcgtttgttggaaagggaagaaggaggagaattttatttttaaatattgtcgtggttgtttgaggttggaggaagtgtttagattattgtagttggtatgagggaatttttcggggtgataaaaatattttaatattagattatggtgaagattatataattaattaaatttattaaaatttatagaattataggtatatttagtgtgtgaattattatgatatgtaaattatattttaatatattagtcgaaaaaattgtaaaagtattgtcgtagtatttgaaattttataagtgtatatttaatatagttttgtttttttataaaatataaatttagaaataattttttttaaaatatgtttatagtgatgtttgtttattagataatttggaaaatttaaataagtaggaagaaatttttttagttgtttagtttttagattgaatttgggttagtaattgtttagttgaggggttttttttagagtagtgtgattttgatttgtatagttggtgattaatagaggggttgttgtggtttgattttggttttagaggttattggttattaatttagggattacgttaatgattataaagggtttgtagttttgtttgttatatagttttggagtttaggtttttggtataggagagttggtgaatagattttatttttgttttttgggagtttttattatagattttggagtttttgttatagggtattgatgagtggagattatgatgcgggtaatattgttttattttgtttttagtttggaagaagatgtatgagtttaagggaatgggggaatttaggtataagagaagggatttttaggtggaaaggaagaggttcgagtgttagggttggttttgatattgattttttggtgattttgggtaagttattgtatttttttgggttttagtgtttttatatgtaaaatatagggtagggtttgatgttttgatttgaagttttttttttagtttaagtagtattagatattggttgtataattaaatttaggatttataagtttttgagttttagggttttatttgtaaaatgggtatattcggttaggttatttttgtaggtcgttttggattagatagtttatagtttttgatttgaggaaggaggtattgtagttattgatagtagtatgttattttatttttgggtttagtttgggaaattgagatttagggaggtttaagttatttaattggaaagaggtgttgttaagatttaaatataagtttgattggttttagagtttaggttttgtttgcggagattaagtaggagtttttagtattatttgatttgggtagggagtagtagtgttttttttaggtaataggttaaattaattaagtttaagttaagtttggtagttaggagttttcggagtagttgtttttacgatattttttaggttagggtaggaggtgatatcgggaaagttttttagttttttatatatttgatgtgattgtttaggttaaaggtttggaagatttttaggttgtggttatttagtgtaggattggttgtggtatttgttttttgagttatatggtatttaggtttggtatggtttttttgatttggaggtagtttttttgttattaatttagtatatgagtatgttttggtttttgtttttgtgtatttcggagatttttttgatttttgatttcggttatttttggattttgtttagttttaggtatatagtaggtagattttttgtgtttgttataggatgggggttgtatagtttatgtttttttgggggattttttttttttttgtagttgatttaggatttttataatataattagttttgggttttttttttttttgtaattttggtttttgtatgtttgcgggattttttattagagattagaggaggtggtttttttcgttttttttatttttagttatagtgtataaaaaggttttggttgggtttggaagatattattttgtttttttttttttattttaaatattgttgtttttgattttttaggtagttagttatttatggaaagtttttttttggagtttatttattttttggtttattgttgttttttgggtttttttaggagtattcgtttttttgattagggattttgttaattgggataatggttagtaaatagagaagttagttatgaaatttagtggaattgaatagggtttggaaaagtttcggtaagttttgtggataggtttgcgaatttggatttagtttttgtaatttagattttagtttttttatttttaaaagggggagaatggtatttagagtatggagtagtgaggaagtttaggatgtgacgtataggagttcgttaaaagtaagtatttttttttttgagtagtttgttttttgtatagacgtttgttttcggtatgtgatggtgcgggagaaacgttatagattttacggtgagacgttagagtttaggtttgggttgtgtaaggtagagtaagttattttttttttttgagttttaggttatttatttgtaaatagggatagtgatgtttagttgtaggatttttgggggaatagaagtgagattgttggagtatgttgtttagagtaggatttattagtagtagtgtttattagtttgttttttttt

SEQ ID NO: 805 - DNA, 6585 bp, Artificial Sequence
  chemically treated genomic DNA (Homo sapiens)
ttagaaggatagggtttagagagtttttgggttgttgaatacgtggaggatttttgaggatggtatatttggagatagaataggaattgtatgtttttttttagttttgtgtattttttttacgtggttgtttttttgtattttttgtaatgttttttatgggtaattgtaagtaaagtgtttttttgagtttttttttttgagacggagttttgttttgttgtttaggttagagtgtggtggagtatttggtttattataatttttgttttttatgttcgagcgatttttttgtttttagttttttgagtagttgggaatataggtatttattattataatcggttaatttttgtatttttttggtagagatagggttttattatgttggttaggttggttttaaatttttgattttaggtgattcgtttgtttcggttttttaaagtgttgggattataggtatgagttatcgtgtttgttttgtttttttgagttttgtgagttattttggtaaattttttgaatttatggagggggttatgggaatttttaatttatagttagttggttagaagtataggttataatgtggaatttgttattggtattggaagtgggggtagttttgtgggattgattttttaatttgtgggatttgttttaattttggttaatgttagaattgagtgaaatgattgtttattttgttggtgtttgttgaagaattggttggtggtgggtagaaatttttttatttattggtggagtataattggtttttaaataatgtgagtttgaattgcgagggttttatttatatatggatttttttttttaattaaatgaggattaaaaagacgggatttttaggatgtaggaatttaagtgtagggagggttgattttttatatatatagtatagattgtgggattttagtatggttggatttttgtatttgaagggtttttggaattaattttttttttttatttagagaggattgtattttgtgttgagcggtgatttgtgtgtgagagtaggaaaaattttgattttttttaagttttttaaattattagttttggggtggggtgtggtggtttatgtttgtaattttagtacgttgggaggttgaggtaggaggattatttgaggttagtagttttagattagtttgggtaatatggtgaaattttgtttttattaaaaatagaaaaattattagggggttggggagggggggtggcgggtatttataattttagttatttaggaggttgaggtaggagaattgtttgaatttgggaggtagaggttgtagtgcgtgaagattgttttattgtattttagtttgggtaatagagtaagattttattttaaaaaataaaattaaattaaattaaaatagttaagtgcggtggtttatatttgtaattttagtattttaggagtttaaggtaggtagattatttgagattaggagtttgaaattagtttggttaataaggtgaaattttgtttttattaaaaaaaaatataggttaggcgtggtggtttacgtttgtaattttaatagtttgggaggttaaggagggtagattataaggttaagaaattgagattattttggttaatatggtgaaatttcgtttttgttaaaaatataaaaattagttgggcgtggtggtgtatatttgtaattttagttatttaggaggttgaggtgggagaatcgtttgaatttgggaggtggaagttgtagtgagttgagattatattattgtattttagtttgggcgatagagcgagattttgttttaagagttttaagttatttaaaaaataaataaataaataaaattattagttttatgtgttagtagttttaaatgagtattaaaggatagtattattttagttaaattgattaagtattttttatatatcgggtattatattaggtagtggaaatgtaaagaagattaaggtaagattttgtttttaagtcgtataatttatatataatttagtataattaataagaaagatttttttttttttcgttggagttttgtttggtaggttaaagttttggaaaattaatggagtggatttttttttgaatatttataattattttatttagagataaggaaattaatgatattaattgtttttttaagtagtagtttgagtagtttttgtttttgtttttagaaaaagtattaggtagaaggaaattttgttaatttaattagatgtgaagaattaatttatgagaaagtgattatttagtgttgtaggagtgttatatggaggagagtagtatttaaagataaaatgtttagagaaggatgtgtagtttattatttgagttagttgattgtgttgatatttttttaggggtgggtgggtggggagtgaaaatttggaaagagaaggtattttatttagaatatattgtatttttttttgtgaatataagatgaaaattttttatttaatagtaatataggtttcgtataaatgaagttttaatttttataatagttgttaagttttttgtaaatttgatagttatttaatattaattttaaaatggatattgttaagtatgatttagtgaggtttttaggtataataataggttataattaaaattttttattaagtagaggtaaattttgtcgggtgtggtggtttatatcgataagtttagtattttgggaagttgaggtaggtggatcgttttttttgtttgttttttgagatagagtttcgttttgtcgtttaagttggagtgtagtggcgcgatttcggtttattgtaggtttcgttttttggttttacgttatttttttgttttagttttttgagtagttggtaatatagacgttcgtatattacgttcggttaattttttgtatttttagtagagatagggttttatcgtgttagttaggatggttttaattttttgatttcgtgattcgtttattttggttttttaaagtgttgggattataggcgtgagttatcgcgttcggtttaatttgtatttttagtagagacgggggttttattacgttggttaggttggtttcgaatttttgattttacgtgatttatttgtttcggttttttaaattgttgagattataggtgtgagttattgcgtttggtcggtatgtgtttttttaatttttaaagtttggtagtttaatattaaatttaaattattgtagtttaggatttttttgaaaaatatttgatagtttcgtttttgatttattttattaggttgagtttttttttatttttataatatagatgtttaaaattaaaatatagatcggtcgggcgcggtggtttacgtttgtaattttagtattttgggaggtcgagacgagcggattacgaggttaggagatttagattattttgtttaatacggtgtaaatttcgtttttaataataatataaaaaaaattagtcgggcgtgatggcgggcgtttttagttttagttatttcggagattgaggtaggagaatgttgtgaattcgggaggcgggtttgtagcgagtcgatatcgcgttattgtattttagtttgggttatagagtaagatttcgttttaaaaaaaagaaaaaagaaaattaaaatatagatttagatttggattttgttaggttttttttttttttaataatttaaggttgtttagaaatatttattttatgtatgtgtttttttagtttgtaatttttaggtagattagttgtattttgtttagattttttttagaaaaatattaataatatgtttttttttgttttgggttttatatgggtgaattataggaaagtttaataggtatttagagtaatatttttttttattttatgaagggtttaaatgcgaatttttaagtatttttcgtttgtttttgttttttttttaggtttatttaatttgtaagtgtaagatgtagtcgatgaaaagtattatgggaatttttgagtaaattagattatttaaaaggaaattattttacgtaatggtgtataaggaagttagatttattaaaataattttgttaggtaagtcggatatattatggaatacggtaattttttgtttaatttgtaaattttttggcggggaggaggaaaggatggaaaaatttgggtgaaggttttatatgattagttaaataaacggtgagttattgaaattttttagttaataattttttttgtttgggtagagtttgggttttagcgttttatgagttatattgtagttttaagtcggaatattttacggttttattgttttttttacgaaatgattatataaaatgaaattagttttgtaatttgtatcggttttgaaatgaagggtaaaatttggttgggggtgaggagaaagaaggtggagagagaataaggtacggagattgtgaggtagagaacgtaggaaaggtggtgaaaagagagtataagaattttcgggagttgagtgtattttttttttttatgttatagatgttgttcgtttttttttagtttgtgtttagtaggttagagtggattttttttatgggttaaaatattttcggttttcggtttagtatagagttgtattaattagggtttgtcgttgtttttttattaggtgataggtggggtcgtcgagcggttattagattttcgttttttcgcgttgtttgtcgggagtcggagtcgttttcggttgcgttttgtttttgaatttcgattttcgtcggttttcgggaaaatcgtagcggggtagcgcgggcgttgtcggaatttgtagttttatttttcgtcgcgttaaatagtcggaaacgggggcggttagaatagagaattatcgaggcgaaggtacgggtggcggcgaggggttaattcgcgtcgggggtggggttggttgtgaggtcgtcggaggtggttgggtgggaggagattcgtttatatatacgaggaggagggttgagttgtcgtcgtcgtcgtttttgtcgtcgtcgcgagtgtggagtcgggattggagttgttgtcgcggcgacgtcggggatttttgtcgttagttttcggtttttttgtttcgtcgtttttttttagttagcgttgtttattttttttcggtcgggcgtttttgtttttatttttcgttttttgtttattatatatacggttttttcgattatggattcgggtagtggcggcggcggcggcggcggcggcggcggcgggagtagtagcggtagtagtagtagcgattcggcgtttgattgttgggattaggcggatatggaagttttcgggtcgggtttttgcggcggcggcggttttttggcggcggcggtcgaggtttagcgggagaattttagcgcggtttttagtcggtaatttaacgttaacgttaagtttttcgtgtttaacgtttacgtcgtcgagttcgtgtcgttttttttgcggggttcggtagcgtcgttatttttagttggcggcgtcgttaataattacggagtcggtagcggcgcgggaggtcgtgcgggtaaaggttcgggacgcgggaggaagttcggtcgggcgtcggagtttatatggcgtaggggtgcggttcgggggcgcgcggttttggggttcggtcggtacgtggggcgttgatagtggcgtcgtttgtttgggtggggcgtttcgagttcgggagtcggttttcgcggggcggttcgcggcggtggtcgggcggggagcggatagcgggtagcgcgtttaaagattcggattcgagtgtcgttttttcgcgtttttgttttgttttggagttcgtagttatttatttgagatgggaatcgtatggaacggagtgggggtcgcggcggatttttgttacgaggcgtagaatgaggatagatggagttaggagttatttgggtgggcgtttagagattttaggagttggggaggacgaatggtcgagttttttttttattttaggtttagtcgagagagcgttttttgttgcgttttttattattgaaattgtaattacggtttaaattgttcgtggtttttaatcgttttgaaggaattttaagatgtattgtagttttgtgatcgggtagaaatttggttattaatattaagatttgttttatttttagtattgtgtacgtttttaaagtttataaagtgttataaagttaggattttttatttaatgtgtgataggagattatattgatttgtgtttttttaaagtgaagtttatatttttattttttgttagcgatacgtttagagaatttttattgttgtaaaatcgttgattttatttagattgtttggaataatttattgtgttcgtgtattagtagtttagtttatttttttagatatttgagtatttgttataatttaatagtttttacgtgtttttttgatcgtagttagtagatatatattttttaatttataaaatttcgagttaattttggtttttaaatattttttcgtatttaggggttgtttaagtcgtaggtagtatgtttgta

SEQ ID NO: 806 - DNA, 6585 bp, Artificial Sequence
  chemically treated genomic DNA (Homo sapiens)
tgtaagtatgttatttacgatttaagtaatttttaagtacgggaagatgtttaaaaattaaagttaattcgaaattttatggattagaaaatgtatgtttattagttacggttagaaagatacgtgagaattattaaattataataaatgtttaagtgtttgaagaaatagattgaattattgatgtacgaatatagtgagttattttaagtaatttgaataaggttaacgattttatagtaatgaaaattttttaaacgtgtcgttgataaaggataaaagtgtaagttttattttaaaaagatataaattaatatagttttttattatatattaagtgaggaattttaattttgtggtattttgtaaattttagaagcgtatataatgttaagggtaaaatagattttggtattgatagttaagtttttgttcgattataaggttgtaatgtattttgggatttttttaggacggttgggggttacggatagtttaaatcgtaattatagttttaatagtagaaaacgtagtagaagacgttttttcggttgggtttaaggtgaaaggaaaattcggttattcgttttttttaatttttgggatttttaaacgtttatttaaatgatttttggttttatttgtttttattttgcgtttcgtggtagggattcgtcgcggtttttatttcgttttatacggtttttattttaagtgggtaattgcggattttagagtagggtaggggcgcggaggggcggtattcgggttcgggtttttgggcgcgttgttcgttgttcgtttttcgttcggttatcgtcgcgggtcgtttcgcgaaggtcggttttcgggttcggggcgttttatttaggtagacggcgttattgttagcgttttacgtgtcgatcgggttttagggtcgcgcgttttcggatcgtatttttacgttatgtgggtttcggcgttcggtcggattttttttcgcgtttcgggtttttattcgtacggtttttcgcgtcgttgtcggtttcgtggttattggcggcgtcgttaattgggggtggcggcgttgtcgggtttcgtaggaaggacggtacgaattcggcggcgtggacgttgggtacgaagggtttggcgttgacgttgagttgtcggttgaaggtcgcgttgaggttttttcgttgggtttcggtcgtcgtcgttagggagtcgtcgtcgtcgtaagggttcggttcgggggtttttatgttcgtttggttttagtagttaggcgtcgagtcgttgttgttgttgtcgttgttgttttcgtcgtcgtcgtcgtcgtcgtcgtcgtcgttattgttcggatttatgatcgggggggtcgtgtgtgtggtggatagagagcgggaaatggaggtaggggcgttcggtcggagaggagtgggtaacgttgattgagggaaggcggcggggtagaagggtcgggagttagcgataaagattttcggcgtcgtcgcggtagtagttttagtttcgattttatattcgcgacgacgatagaggcggcggcggcggtagtttaattttttttttcgtgtgtgtgagcggatttttttttatttaattattttcgacggttttatagttaattttattttcggcgcggattgatttttcgtcgttattcgtattttcgtttcggtagttttttgttttggtcgttttcgttttcggttatttagcgcggcgggaggtggaattataagtttcggtagcgttcgcgttatttcgttgcggttttttcgggggtcgacgggagtcgaagtttagggatagggcgtaatcggaagcggtttcggttttcggtaggtaacgcgaggaggcggaggtttggtggtcgttcggcggttttatttgttatttggtgggggggtagcggtaggttttggttggtgtagttttgtgttgggtcgaagatcgagagtattttagtttataggaggggtttattttggtttgttggatataggttgggggaaaacggatagtatttataatatggggaagaaaaatatatttagttttcgaaaatttttgtattttttttttattattttttttgcgttttttgttttatagttttcgtattttattttttttttattttttttttttttatttttagttagattttgttttttattttaaagtcggtgtagattgtaaagttgattttattttatgtaattatttcgtggaagaaataataaaatcgtgagatatttcggtttaaaattgtagtgtggtttataaagcgttggggtttaggttttgtttaggtagaagggattgttaattggaaaattttaatgatttatcgtttgtttgattagttatataaagtttttatttaaatttttttatttttttttttttttcgttaaagggtttgtaaattaaatagaggattgtcgtattttatggtgtattcggtttatttaatagggttattttggtgagtttagtttttttatgtattattacgtgaagtggtttttttttgaatggtttgatttgtttaagaatttttatagtattttttatcgattgtattttatatttatagattaggtaaatttgggaaaagaataaaagtaaacgagaaatatttaagagttcgtatttaggttttttatgaagtaggaaaaaatgttgttttgagtatttgttaagtttttttgtaatttatttatgtggagtttaagatagagaaaaatatattgttagtatttttttgaaaggagtttagatagggtgtaattaatttgtttagaaattatagattaaagaagtatatatatagaatagatgtttttgaataattttaggttgttaaaaaaaaaaaaaatttaataaaatttagatttagatttgtattttaattttttttttttttttttttgagacggagttttgttttgtagtttaggttggagtgtagtggcgcgatgtcggttcgttgtaagttcgtttttcgggtttataatatttttttgttttagttttcggagtagttgggattagaggcgttcgttattacgttcggttaattttttttgtattgttattagagacgaggtttatatcgtgttagataggatggtttggattttttgatttcgtgattcgttcgtttcggttttttaaagtgttgggattataggcgtgagttatcgcgttcggtcgatttgtattttaattttaaatatttgtattgtaaagataaaagagaatttagtttaatgagataggttaaaaacgaagttgttaagtattttttaaaagagttttaggttatagtaatttgaatttaatattaaattattaagttttagggattaaaaaaatatatatcggttaggcgtagtggtttatatttgtaattttagtaatttgggaggtcgaggtagatggattacgtgaggttaggagttcgagattagtttggttaacgtggtggaattttcgtttttattaaaaatataagttaggtcgggcgcggtggtttacgtttgtaattttagtattttgggaggttaaggtgggcggattacgagattaggagattgagattattttggttaatacggtgaaattttgtttttattgaaaatataaaaaattagtcgggcgtggtgtgcgggcgtttgtattgttagttatttaggaggttgaggtaggagaatggcgtgaaattaggaggcggagtttgtagtgagtcgagatcgcgttattgtattttagtttgagcgataaagcgagattttgttttaaaaaataaataaaaaaagcgatttatttgttttagttttttaaagtgttgggtttatcggtgtgagttattatattcggtagagtttgtttttgtttaataggaagttttggttatagtttattattatatttgaagattttattgaattatatttaataatgtttattttaaagttggtattaagtgattgttagatttatagagaatttaataattgttatgaaaattagaattttatttatgcgagatttgtattgttattgaataaaagatttttattttatatttataagaaaaaatataatgtgttttaaatgaaatgttttttttttttagatttttattttttatttatttatttttaagaaaatgttaatataattagttgatttaaataatgaattatatatttttttttaagtattttgtttttgaatattatttttttttatgtagtatttttatagtattgaatgattatttttttataggttagttttttatatttaattgaattagtagagtttttttttgtttggtattttttttagggataaaggtagaaattgtttagattgttgtttagaaaagtagttgatgttattaatttttttgtttttgaataggataattatggatatttaggaaaaaatttattttattggttttttaaagttttgatttgttaaatagagttttagcggaaaagggaaaagttttttttgttagttgtgttaagttgtgtgtaagttgtgcgatttgagggtagggttttattttaattttttttatatttttattgtttagtgtaatgttcggtgtataaaaggtgtttaattaatttagttgggatgatattgttttttgatatttatttaagattgttgatatatagggttaataattttatttatttatttattttttaaataatttgagatttttgagatagagtttcgttttgtcgtttaggttagagtgtagtggtatgattttagtttattgtaatttttattttttaggtttaagcgatttttttattttagttttttgagtagttgggattataggtgtgtattattacgtttagttaatttttgtatttttaatagagacggggttttattatgttggttaggatggttttaattttttgattttgtgatttgttttttttggttttttaaattgttgggattataggcgtgagttattacgtttggtttgtatttttttttagtagagatagggttttattttgttggttaggttggttttaaatttttgattttaagtgatttgtttgttttgggtttttaaagtgttaggattatagatgtgagttatcgtatttagttattttaatttaatttaattttattttttgagatggagttttgttttgttgtttaggttggagtgtagtggagtaatttttacgtattgtaatttttattttttaagtttaagtaatttttttgttttagttttttgagtagttgggattataggtgttcgttattttttttttttaattttttggtaatttttttatttttagtagagatagggttttattatattgtttaggttgatttggaattattgattttaagtgatttttttgttttagttttttaacgtgttaggattataggtatgagttattatattttattttaggattaataatttagaaaatttaggaaaaattagagttttttttatttttatatataagttatcgtttaatatagagtatagttttttttgggtagaggaaggggattagttttaggagttttttagatataaaaatttaattatattaaaattttataatttatattgtgtgtatgaaaggttagttttttttatatttgagtttttgtattttgagaatttcgtttttttgatttttatttgattgaaaaaaaaaatttatgtgtaagtgggattttcgtagtttaggtttatattgtttaagggttagttgtattttattagtaagtgagggagtttttatttattattaattaattttttaatagatattaataggataagtaattattttatttaattttgatattaattagagttaggatagattttataagttaagggattagttttataagattgtttttatttttaatgttaataataggttttatattgtgatttgtgtttttgattaattggttatgaattgggggtttttatgattttttttatgggtttagggaatttgttagagtggtttatagaatttaaggaaatagggtaaatacggtggtttatgtttgtaattttagtattttgggaggtcgaggtaggcgaattatttgaggttaggagtttgagattagtttggttaatatggtgaaattttgtttttattaaaaaaatataaaaattagtcggttgtggtggtgggtgtttgtatttttagttatttaggaagttgaaggtaggagaatcgttcgaatatgggaggtagaggttgtagtgagttaagtgttttattatattttagtttgggtaatagagtaagatttcgttttaaaaaaaagaatttaaggaaatattttatttatagttatttataaaggatattataaaggatatagaggaatagttacgtggaagagatgtatagggttgggaaggggtatatagtttttattttgtttttaggtgtgttatttttaagggttttttacgtgtttagtaatttagaagttttttgaattttgtttttttgg

SEQ ID NO: 807 - DNA, 6283 bp, Artificial Sequence
  chemically treated genomic DNA (Homo sapiens)
taaatatgggggttattttttaaaaatttcgtttagttgtttagagaggtaggttatcggtttcggttagggttttatagtttgggttaaaatttttaattgttattttttttttttttgatatatataatgtaaaaggttttgttagatcgggtagttttagggttggggttgatataagttttttttttaatttatgaaaggtttgttgttgttgggatttttatttaaaaggttttcggttttttttttttttgtgattttatataaaggtttagttaatattgtaaagtttgggatttatagtttgtaaaattttatagtttttaagaatttttttatttgttttttggttttaggtttcggtagattataaatgatttgttttttttttgattttaggttgtatttttcgtcggatagtaaattttaagtaacgtatttgttgttggtagatttgagtttttttttttggatattttatatttatagttttttaggtgtcggagtagagtatttgtttttttggcgtattcgattgtcgtggggtgttttagtaaaaggttattaacgtattggagtaatacgtagtttaggtttttggtgggaaatttttggaggtttcgagttaatgttttttcgaagatggtgggggagtttttgaatttttggggaagttaggtttaagtgtattgagtagtgatatttgatttcggatttttttattgaaaggtaaatagtttttgttttttaggggttaatttgatgttaaagaaagcgttttttaggtttaagtaggtgaattagttgtttttagttggtagtaattttagtaatatgtacgggttaggtattgttggatgtaaagttattgtagtttgattaattaagcgtaaattttgtattagtttgtagtttttggttttaggtttgggaataggtaggaggggagtgttttatggagattgataaggaattataattttaaaggtttttaggtgtttgagatggatttggatatttttaagagtttttttggggattaggtattgtttttgtttaatcggttgggtttcgggtttaatttttataagtacgggggtttcgttgattgttaattttggaggttgtttttcgtttatatttttggttatcgtttagttagagttggttttattttttggttcggtttagttaataaaagtttttattttttttttcgggggatcgtaagggttataatgattttcgtttcgggtaattttagtagtaaagagtcgtgttttgtaaaagagatagtggtttttagtttgttaagtaagtttttttttaataagggtaagggataattaggtatgtataaaaattgatgaattattttatgtttttttatagtataagttcggggtaagtagaaagtttgttttgttgaaatttttatggtttcgatgatgttaatagtttttttggataagggggcgattgggtcggttattatcgaatgtttagtatcggtatttataagaaaattaatgtttttatttttaattgttattttgattataggttttttgggagtttttgagttcggttttttttagtttaataatttttttgttaggttgagtagggtttttttttttttgtttggagttttttgtttcgagttattttgttttttttttagttgagggtatttgtttttttaatgttttatttttttataataagtatattgattacgttgtaagttttgatagttaggttgagtttttttttcggggtttttttttttttgtttttttgtgggagatttttttaattgttgtagttaatagttcggtatttcgtcgggtttgacgtttattttttttgcggttttttttacggtttattgtatttttgtttataaatatttggttagttatttttaataattgtgatgtgtttatttttgtaaatttagtttgtttttgtagtttttttttaatgttttttgcgttttgattaattaaagttatgttaattatgcgttgatttttagggttatcgggattaaagggagtatatatgtgataggttttatatagtttttcgtagaattgtgttggattttttttttttttttgaatgattttagagaatttattaacgtttgtggttttttgggtttttttttaatttttttaagagagtttttttgtatcggtttagtttttgtatatttttttttttatttgggttttattgggggtcggttttcggtaattgggtttttatatatttttgggggttttggtaattagtcggtgtatgtttttttagttatttagttgttgtttggagtatttttcgttttttatttgtgttaaagaggaatatgagtaattggtggtaattagtttaagtggggttatgggtttggataatagtttggagtaaattaattagagtttgtggttttttagtataggacggggtattgtttttttagttgagaaggtcggtagaggtgaagggttggtatataaaaatacgttttttcgttatgtgtttatttttatttattttagtatatcgttgtttttttaagggtatttgtattttcgttttgggttttaaacgagttgttaagggaggggttttttttgaggttttatttttttttttgtttattttgggtggtttagggatatgtttgttttgcggaggtataagtattgtggatttaaaagtggggagtttttttttttggtaaggggagggtattattgggatgatttttgttattttttgtaatggatcgtttgatgttgggtcgaatagaattttaggagttgatttttttcggtgggtggagcgggatttttttttgattatttgtttttttgttattagtattgttgttgtttgtttttttatttattgtggtaattaagtgtttatgtatggaaattggtttgagtgttttgatttattagttattttgtgttatattttagaaataagggatttgtttaggtttttttttgatggttaatttatttttaatgttggttaatttattttatataaagttttaagtttttttggtgttatagtaattttatagtcgttattaaatttttttttaaaattttttaatatagtttttagaggagtaggtttattttgtgtttgattcgtgtttttttaagataaaatattaagtttatattaaacgtatattataaaataaagaatgggtaaaaagggtatatacgtatttttttagtttttattaaattagaattaaaattaaaattagagtatttagtaatttaagttaggttaaattaaaattaaagtgttaagtaatttaagttaagttaaaaataaaaattaaagtgttagtataggtacgtcgtgggtgattaggttatgtttttatttaaatggagtgggtaagtttcgaagattagttttattaagttttaaatgttcggattttaagtgtttgttttttttcggtgtttagttattgcgttgatattttacgggggtttgttacgtattgttttgattaggcgttttatcggggtaattgtttatttaggagcgttcgtaggattcgcgtcgtttaagttggcgggagtttttcgtagggatgttttatagggtaggtttaagttttttaaggggttgtttcgattgttcgttaattatttcgttttttagttagggaattaagaaatatagtaggatgagttatagataaaattttttagatattagattaaagtaggaagaggttttttattcggttaggagcgttggtagattcgcgttttgagagtcgagtttttcgaaaaagaaatttttagtttttttaagggtttataattttaaggggtttacgtgaaaaaattataatagattaagtaagcgtgggaaacgtgattgggggttatatatattagttaatagaataaaaagttttatagtgtttttttatataatgtttggaatttatagataatattaatagttttggttaggggttaataatattattattattttagttattagggttaggtggtggtgttaaggtcgtttagttatttattttatttttgtttttttttaattttttgttttttttttttttttttgttttataaattagggaaaaggggaggttggggagaaattgagaaggataataggagaagtggtgattttatattataattttagtattttgggaggtcgaggtgagagaatcgtttgaggttaagagttttttattagttttggtaatatagtgagattttatttttaaaaaaaaaataaaaataataaaaaaaataaaaaaaaaaattaaataaataaataaataaattagttgggcgttgtggcgggtatttgtagtttttagttatcgggaaggttgaggagggaggatcgttgtttgagtatagtaggtggaggttgtagtgagtagagatcgtattattgtatttttgtttgggggagagtgagatttagttttaaagaaaaagtaagaataaataaaagtggtttttggaataaatttggataaataatttttcgaatagaggtaaatttttttttttggagaagtcgtgttattggtaattttttagggggttagttcgggaaaagttagttgaaacgagaggacgtttatcgtttttcgtttcgatttatcggattttagaaggttatacgcggtaggcgtcgttcgggatttaggggtcggggtgagaacggaggcggagaaattttttaggtttcgttatcggggcggggaattgggaggcggtttcgtttttgggtatttttttgggttttgtttagcggcgggcgtatgtttagttatcgtgaggttgcgtttgttcggggttcgcgtttttttatttcggggatcgttttcgggtcgttcgttttatttggcgcgttattttcgcgtgtatggttttgttgtttcgagttttgagcgtcggcgcgggatcgagttggcggcgggcggcgcgcgtttttcgaggttttttgttgtttttgttcgagttcgcggtttttacgcgcgttttttttcgtgttatggtttgtaggtaggagtcgtagtcgtagggttcgtcgttcgttgttggcgtcgtggttttttatgattatttggtgatcgggggcggttcgggcgggttggttagcgcgcgtagggcggtcgagttgggtgttagggtcgtcgtggtggagagttataagttgggtggtatttgcgtgagtatcgtcggtttgttcgggcggggggcgtttttttgtttcggtttttcgggggatagtttgtgttcgtttttatggcgattttgtttttcggcgttgggttttttttttttttattttcgtaattttttatttcgaagttaggaatttagtaggtggaggagagagaggcgttcgggggtttttttgcggttcgtaaagtcgagttagcgtttgttttcgtacggatgcgatattgattagggtcggggcgggttagattaatttttttttatttttatttgtttaagtgggagaggattggattttgtttttgatcgcgtgaaatataaaattgtatttgggaatattgttggtggtttgtgtgtagggacgagggtgacggtgttatagattttggtttttgaaaaatgtagattttggttttttcgttttaagggtagaatgatttatagcggttgttgttaattttggttatatattcgaattatttgagggtgtttggattttcgatttaattggtttgaggtgtatttgggttttgggatgtttttcgatttaattggtttgaagtgtagtttgggttttgggattttcgggtgatttgaattgtagttaaggcgattttgagtaggtgagtttttagagtttttgttttgttttggttttatgtggattgtaaaattaaaaatagagggatgtaaattttgagatttataaaatttataatttttgaaaataagggtttttgtttgtgtttgttttttgagatagggttttgttttgttatttaggttagagtgtagtggttattatagtttattgtagtttcgaattttcgggtttaagggatttttttattttggttttttgagtagttggaattatagggggttaattattacgtttagttaattattattattttttgtagagatgggggtttcgttatgttgtttttgttgattttaattttttggatttaatcgattttttt

SEQ ID NO: 808 - DNA, 6283 bp, Artificial Sequence
  chemically treated genomic DNA (Homo sapiens)
gggaagatcggttgagtttaagaggttgaaattagtaagggtaatatagcgagatttttatttttataaaaaataataataattaattaggcgtggtgattagttttttgtagttttagttatttaggaggttaaggtgagaggattttttgagttcgggagttcgaggttgtagtgagttatgatggttattgtattttagtttaggtgatagggtaagattttgttttaaaaaataaatataaataaaaatttttatttttaaaaattatgaattttgtaaattttaggatttatatttttttgtttttagttttgtaatttatataaaattaagataaaataaaagttttgagaatttatttatttaaggtcgttttggttgtaatttagattattcgaaaattttaaagtttaggttgtattttagattaattaagtcgggaaatattttaaagtttaagtgtattttagattaattaagtcgggaatttaggtatttttaggtgattcgaatgtgtagttaaggttgataataatcgttataaattattttgtttttgaaacgggagaattaggatttatattttttaagaattaggatttatggtatcgttattttcgtttttatatataggttattagtaatgtttttagatgtagttttgtgttttacgcggttaagaatagaatttaatttttttttatttggataagtgaggatggaggaaggttaatttaattcgtttcggttttggttaatatcgtattcgtgcggaagtagacgttggttcggttttgcgggtcgtagagaagttttcggacgttttttttttttttatttgttgggtttttggtttcggaatggggagttgcgggggtggaaaagaggaaagtttagcgtcgggggataggatcgttataggaacgagtataggttgtttttcgaaagatcgagataaagaggcgtttttcgttcgaataaatcggcggtatttacgtaagtgttatttagtttgtggttttttattacggcggttttggtatttagttcggtcgttttgcgcgcgttggttagttcgttcgagtcgttttcgattattaggtagttataggaggttacggcgttagtagcgggcggcgggttttgcggttgcggtttttgtttgtaggttatggtacgggagagggcgcgcgtgagggtcgcgggttcgggtagaagtagtaggaagtttcggaaggcgcgcgtcgttcgtcgttagttcggtttcgcgtcggcgtttagggttcggggtagtagggttatgtacgcggaagtggcgcgttaagtggggcgggcggttcgggggcggttttcggggtaggggggcgcgggtttcgggtaagcgtagttttacggtgattaagtatgcgttcgtcgttaggtaagatttaggaggatgtttagaggcggggtcgttttttagtttttcgtttcggtggcggagtttgaggggttttttcgttttcgtttttatttcggtttttggatttcgagcggcgtttgtcgcgtgtagttttttgaagttcggtggatcgaggcgaggaacggtgaacgttttttcgttttagttggtttttttcgagttggttttttggggagttgttagtggtacggtttttttaggaagagaaatttgtttttattcgaagggttgtttgtttaggtttgttttagagattatttttgtttgtttttgttttttttttgagattgggttttatttttttttaggtaggggtgtagtgatgcgatttttgtttattgtagtttttatttattgtgtttaagtagcgattttttttttttagttttttcggtagttgggaattataggtgttcgttatagcgtttagttaatttatttatttatttatttaatttttttttttattttttttattatttttattttttttttagaaatagggttttattatgttattaggattggtagggaatttttggttttaagcgatttttttatttcggttttttaaaatgttaggattatggtatgaggttattattttttttgttgttttttttagtttttttttaatttttttttttttttagtttataagataggagaaaagggagaaagtaaaaagttggaaagaaatagaagtaagataaatagttagacgattttggtattattatttggttttggtggttaagataataataatattattaatttttgattaaaattattggtgttatttgtaaattttagatattgtatgagaaagtattgtaaaattttttgttttgttagttgatgtatatagtttttagttacgttttttacgtttatttgatttattatgatttttttacgtagattttttagagttgtaagtttttaaaagggttaggaatttttttttcggagagttcggtttttaagacgcgagtttgttaacgtttttggtcgaataaaaaatttttttttgttttaatttggtgtttgaggagttttgtttgtgatttattttgttatattttttggttttttgattgggaagcgaggtaattgacggatagtcgaggtagttttttagggggtttaggtttgttttgtggagtatttttgcggggaattttcgttagtttgagcgacgcggattttgcgagcgtttttgggtaggtaattgtttcggtggaacgtttagttagagtagtgcgtggtaggttttcgtggagtattaacgtagtggttgaatatcgggaaggaataggtatttggagttcggatatttgaaatttggtaagattggttttcggaatttgtttattttatttgagtggaagtatggtttgattatttacggcgtgtttgtattggtattttggtttttgtttttgatttgatttgaattgtttgatattttggttttggtttgatttggtttggattattggatattttgattttggttttgattttggtttggtgaaaattgaaaaagtgcgtgtgtgttttttttatttattttttgttttgtggtgtgcgtttggtgtgagtttggtgttttgttttgaggaaatacgggttagatataaaataagtttatttttttaggaattatgttgaaaaattttaagaagggatttaatggcgattatggggttattatgatattagggaaatttagaattttgtgtgaaatagattggttaatattagaagtgggttggttattagaaggaagtttggataggttttttgtttttaaggtatggtataaggtaattggtaagttaggatatttagattagtttttatatatagatatttggttattatagtgggtaagagggtaggtagtagtagtgttagtagtaaagggatagatagttaaggaaggatttcgttttatttatcgagggaaattaatttttgaagttttgttcgatttaatattagacgatttattgtaggagatggtaaaagttattttagtggtgttttttttttattagggagagaggttttttatttttgagtttatagtgtttgtgttttcgtaagataaatatatttttaggttatttagagtagataagagaggaggtgaagttttaggagaaattttttttttggtagttcgtttaagatttaaaacggggatataaatgtttttgagagagtagcggtatattggaatagatgaggatgggtatatggcggagaggcgtgtttttgtgtgttagttttttatttttgtcgatttttttaattggaaaaataatatttcgttttgtattgaaaagttataagttttaattgatttgttttaaattattatttagatttataattttatttgggttgattgttattagttgtttatgtttttttttaatatagatgaaaggcggagagtgttttaagtagtaattaagtggttaggggaatatgtatcggttgattattaaaatttttaagagtatgtaaggatttagttatcgggaatcgatttttagtgggatttaaatgaaagagaggatatgtaaaggttaaatcgatatagggaagtttttttagaaggattagaggggagtttagaaggttataaacgttaataagttttttgaggttatttagggaaaagaagaaagtttagtataattttacgagagattgtgtgaggtttattatatgtatattttttttgatttcgatagttttgaaaattaacgtatgattaatatggttttagttagttaaagcgtagaagatattagaagaaaattgtagaaataggttgggtttgtagggatgaatatattataattattagaaatagttaattaggtgtttgtaaatagggatgtagtaagtcgtaaggaaaatcgtagagagaatgaacgttaggttcggcgaaatgtcgagttgttagttgtagtaattagagggattttttataaaaaggtaagggaaggggggtttcgggaaagaaatttagtttggttgttagagtttgtagcgtaattagtgtgtttattgtaaagaaataggatattggaagaataaatgtttttagttaaaaggaaaataaggtgattcggagtaggaggttttagataaggaggaaggggttttgtttaatttggtagaagggttattggattgagggggatcgggtttaaggatttttaaagagtttatggttaggatgatagttgggggtaaagatattgatttttttatagatatcggtgttgaatattcggtagtaatcggtttagtcgtttttttatttaaaaagattattgatattatcggagttatgggagttttagtaaaataagttttttgtttgtttcggatttgtattgtaggaagatataaagtgatttattagtttttgtatatgtttgattattttttgtttttgttgagaagggatttgtttagtaaattgagagttattattttttttatagagtacggttttttgttgttaaagttattcggaacgggagttattatgatttttacggtttttcgagaggaggaatggagatttttgttaattgagtcgggttaagagataagattagttttggttaagcggtggttaagagtgtgggcggaagataatttttagggttggtagttaacgaagttttcgtatttatagaagttaagttcggggtttagtcggttaggtaaaaatagtatttggtttttagagaagtttttgaaggtatttaggtttattttaagtatttaagaatttttggaattatagttttttgttagtttttatggaatattttttttttgtttgtttttaagtttgggattaaggattataggttggtataggatttgcgtttggttaattaggttatagtgattttatatttaatagtatttaattcgtatatattgttggggttgttgttagttgaggatagttggtttatttgtttggatttgaaagacgttttttttagtattagattagtttttgagaggtagaagttgtttgttttttagtgggaagattcggagttaggtgttattatttagtatatttggatttggtttttttaagggtttaagaatttttttattattttcggggaggtattggttcgagatttttagaagttttttattagagatttaggttgcgtgttgttttagtacgttgatgattttttgttgggatattttacggtagtcgggtgcgttaagagaatagatgttttatttcggtatttggaggattgtgggtataaggtgtttaagaaaaaaagtttagatttgttaatagtaggtacgttatttgggatttattattcgacggggagtgtagtttgggattagaaagaaagtaggttatttgtaatttatcggagtttaagattagaaggtaggtgagagaatttttaggggttgtggggttttgtagattgtggattttaaattttgtagtattagttaagtttttgtatgaggttataaagggggaggggatcgggaattttttgaatggggattttagtaatagtaagttttttatgagttaaaggaaagatttatgttagttttagttttggggttattcgatttgataaagttttttatattgtatgtgttagagagagaaaagatggtagttgggagttttaatttaaattgtggggttttggtcgaggtcggtggtttatttttttaaataattagacggggtttttaaaggatggtttttatgtttg

SEQ ID NO: 809 - DNA, 8899 bp, Artificial Sequence
  chemically treated genomic DNA (Homo sapiens)
ttggtttaggtttgtgttaggggttggaagatagaggaattttattttgaatggttaaagtagtggtttttagttaggtggggagatggttttataaataatagtatgaggtagggtgatattattgttaaaaagagatagtagttatgtgtatagatgtagattatgtgtgatgtagattttggggttgatagagatgttttaattaaaaggtatagtttagtggttgggtgcggtggttttcgtttgtaattttagtattttgggaggttgaggcgggtggattataaggttaggagatcgagattattttggttaatacggtgaaattttatttttattaaaaatagaaaaaattaggcgggcgtggtggtaggcgtttgtagttttagttattcgggaggttgaggtaggagaatggtatgaatacgggaggcggagtttgtagtgagttaagatggcgttattgtattttagtttgggttataaagtaagattttattttaaaaaaataaaaataaaaaaaatttatagtttagatttggagagaggttttcgtagggagaaaggtaagatataaaattaagggattggtttttatttatagtgaagtatatttttgtatatttttttttatttaatttagatttaaatgtttttataaattttaagaatagaggatgaaattgatttaatagttagttttgggaagtttgagtttatggtatgttttaaggtatatatgtgggaatattatggttgatattgttgttgtgatttttggtaagttaggatatttttttaagttttttttttttcggttgtaaaatggaggttataaagatattgatgtgatagggaggtaagggaaagtgagataacgattgtaaagttattagttaagtatttgatatttagcgattagattaataaagggtagttattgttaggaaaaaatagattttattttgaaagtgaggaaagttaggcgcggtggtttatatttgtaattttagtattttgggaggttgaggtaggtagattacgaggttaggagttcgagattagtttggatagtaaggtgaaattttgtttttattaaaaatataaaaaattagttgggtatggtggtatgtgtttgtaattttagttattcgggagattgaggtaggagaattgtttgaattcgggaggtagaggttgtagtgagttaagatcgtgttattgtattttagtttgggtgatagagagagattttattttaaaaaaaaaaaaaagaaagaaagaaaaaaaataaaatgaggaaagtgggattcggagaggtgagatgatttttgtatagttaggatttaaatttaggtttgagatattagaggtttagggtaaattatttttttttgtttcggaatttttagtaggttttttatagtttattatatggattttatttttgttagggagtgaggatttagtaaaggtttggggttaaaaagattttgggtaagttttttaattttatgtgttttgatttgagatttttaagtgagtttgagaaggtttgtgaatttttttacgtagttgatgtaaaattttatattaatggattttagacgagtttatagttttaaaagtaataaattatagatttgatttgatttagtatggttttttatttatttaatggagatacgatttttattttgaaaggttgtgaagggattaaatgaggtaatttgtgagaagtatttgaaatatttttagtttttattaaatgttggtttttttttttttttttttttttaaattatttttattagttagtaaatattattgagtatttgttacgtggtaggtattagttaggttttgggggtaaagtggtgaataagatagatatggtttatttttatggggtttatattttagtagagggaaatagtaaataaataaaagtaataattttagatatgaataattgttatgaagaaaatataaggtcgggtacggtggtttacgtttgtaattttagtattttgagaggtagaggcggacggattataaggttaggagtttgagattagtttgattaatatggtgaaattttgttttttttaaaaatataaaaattagtcgggtatggtggtacgtgtttgtaattttagttatttaggagattgaggtaggagaattgtttgaatttaggagatagaggttgtagtgagttaagatcgtattattgtattttagtttgggtaatagagtgagattttattttaaaaaaaagaaaaggataacgtgatagatttatagggtggggtagtttttagggatgaaatatttgaatgattaaaggagttagttatgttaggattttggaggaaagtatttaggtagagagtgtagaaagggtaaacgttttttggaaagatttttagttaagagttttttatttttagttttattataaattgggttattttgaataagttacgtaatttttgaggtttagttgttatatttataaaatgggaataaagatattttatttgttatattgtgagaggttttaattaaagggttgttaaggtttgggattttttttaaattttattatagatatttgatatttattatttggtattcgttttggaagaggggaatttgtatagagaattttgggttatgtttttgatttttaattttatgttgtattagaaatagttttttttgtttttggttgatttaggagtttttttttgttatttggggtttattttagttaatagttgtttatttttttaggtataaaagttaacgaggaaaggatattaggaaatattgttttgggaataattagatatttatttgttattatttttttttatttcgtgattatatacgggagattggaggatttagtttgttttgtagttagataatgtatatggtttatttaaagagttaaaaggggtcgggcgtagtggttaacgtttgtaattttagtattttgggaggttggggcgggtggattatttgagtttaagagttttagattaatttggttaatatggtgaaattttgtttttattaaaaatataaaaattagtcgggtgtggtggtggacgtttgtaattttagttatttgggaggttgaggtaggagaattgtttgaatttgggaagtggaggttgtagtgagttgagatcgtgttattgtattttagtttgggtaataataacgaaaatttcgttttaaaaaaaaaaaaaaaaaaaaagagttaaaaggattttggtttttgggttgggttattgatttacgattattaggagtttttatttttaaatttttttgatttgttcgtttcgttttatttttatagttgttgtattggttatagttttatgattttatattttaattttttttgttttttttggtttatttttttatttttaaattatttgttacgttgtaattagtgtttaatatataaaattaattatgttttttttttgtttaaagtttttagtttttgttgtttagtggaattggcgtttgaggttatttttttaagtttaagcgtttaagttttgttgtaatttttaggtttttttttattatttatattaaattttttagtgtttgtaaaataagtcgagtaatttttagaattatatgttttcgttgttcgtttgttttgtttttaggatagggttttacgttgttatttaggtaggagtgttgtagcgtgattttagtttatagtagttttcgttttcggggtttaagaatttttacgtcgtagtttttcgagtagttgggattataggtacgggttaatatattcggttaatttttgtatttttagtagagacggggtttcgttatgttgtttagtttggtttttaatttttgagtttaagtaatttatttgtttcggttttttaaagtgttgggattataggtttgagttattgtatttagttagtttttgttgtttttgtttttgtaatttggaatattgtttttattttagttttttatttttatttttattttttttattatttatatttttttatttattttttaagattttaaaaattatttttgatttttttagaaaggtagtttattgtttattttattagattgaaagtagtggttgtgttttatttatggttaattttttagaagttggattgatatattttatttaattaaaattcgtattaggtgtttcggattgtagataagtttattataatttagaaggaagaaatagggaaggtatttgggggttgttaagtaatgaggtggggggtaggaattatgaattcgtatatttttaaaaattgttttagattttgatgtaaacggtataagagagtttgagaaatatagggttttttttaaatagttttgattttagtatttttggaaaaatgaaaattttttttttttgtttttaatgttttttttgttggtattttaggttaaaaaaaaatagataaaattagggggatttttttgggatttggttgggttgggaaataagtttgggttttaatataggtttagtttttgacgtattatgggtttttgtttttttttggggtttttattattacggttatttttatttttattaattgtgtgtttttgaggtagtgattgtttcgttttgagtattagtttttttattttttattagtcgtcgttagttttgacgttttatgagttatgtatattcgtagtttttcgtcgatttcgatggttttttttttttttttttaaggtttattcgttagggtgtagtcgacgtatttttaatgttaaggtcgtttttttatcgatcgtttttttttggtttcgatttagcgttaaaggtatgggtttttgtttcgtttgttttttaagtttagtcggggcggttagcgtaagcgtattgggtcgtatcgaggtttcgttttttgagtttgggtagcggcgcgagggtcgggagaatcgttcgcggaggaaaggcgaattagtaggttggggcggttacggcggtcggtatgggttacgttttttcgggaggaacgatgtgagggaggggtttggtaagagattggaatttcggaggtcgggagattttgtggttgaaatttttcgtaggagcggggtaattagtgtttagtgagggggttgggttggcgcgtattgattttagatttttcggattttttgtttttagatcgggtcggtgtcggggtatgtaggttagtgagattggagttagttagagttataacggggagcgattagggttaaattttgtttagggtggaagcgagcgggttcgtgaagtggggttagtttgggtagtcgatcgtgtcgttgtttcggggtttttttaggtattggtttaagttttggcgataaagtgcgatcgatttttttgtgggcgttttgaggttttcggtgatttgattcgtttgttatttattttttatttatttatgtgatgaatgaatatagtattaagcgcggttaattattaggtagagaagtgattaagataaatattgtttttacggtatagggaaaagtgatgggttgtagaatgtagaagttcggggcggagaatagggatagttttcggaacgaaatcgcgagtttagattaggagtggtggcgagagttttaaagagaagatagtacgtgttaagttttggaagggggatagaggttaatatattttggttattgaagatatttgattttgaatttgttttacgtttagggaagagatgatagtggtcggggttaggttataaattttggaaatggagataaataaaggaatttaaagtattatatatttaggtagtaaaatttataggatttggggagagtgagatgtaggaaataagtatttaaggtttgggtatttgggtggggtttattagagaagaagtagatttgtgggagataataataaattttattttggttgtatggagattcgtaggaaaaaattggatattttagtttgaaggtaggaaagtattgttgtgaagatgtagatttgaatgttattagtaaaatataaataaagttaagggagggttgaggttgtagaatgagaaaaataaagggtttatttagtatttttatttgattttttttttttttttttttttttttttttttttttttttgatagagttttgtttttgttgtttaggttggagtgtaatggtacgatttcggtttattataatttttattttttgggtttaagttatttttttgttttagttttttaagtagttcggattataggtatgcgttattaggttcggttaattttgtatttttagtagagatggggtttttttatgttggtgaggttggtttcgaattttcgatttcgggtgattcgtttgtttcggttttataaagtgttgggattatacgagtgagttattatatttggtttatggtgattatttttatgttttatttttttttatatttttagtatttagttaagggagtggtattaaatgtaaattagtgtttgttaattaaataaaagtttaatagtaaatagatgttggaattttagagttgtggaacgatgggggtttatggagggttttattattttaatgttaaggtaatgggtttttgttttggttttgttattaggtttttgtgtgatttttgataagtttttttttatttataaagagagtatagttaaaaaatggttttatgtatagagttttaaatattgttgataaattttatattgattttttttttttaatttatatagtaattttatttgaaagggaagtcggttgggcggggtggtttacgtttgtaattttagtattttgggaggtcgagagtgggggattacgagatcgagattattttggttaatacggtgaaatttcgtttttattaaaaatataaaaaattagtcgggtatggtggtaggtgtttgtagttttagttattcgggaggttgaggtaggagaatggtatgaatttaggaggcggagtttgtagtgagtcgagatcgtgcggttgtattttagtttgggcgatagagttagatttcgttaaaaaaaaaaaaaaagaaagaaagagggagggagagagagagaaagaaagaaaaagaaggaaggaaggaaggaaagaaggagggaagggaaagggaaagggaaaaggaaggaaggaaagaagggaaagggagaagtcgtattattatggatttaaatttaggtttgtttgtttgtttgatttgaattttgttttttattatgattgtttttatgtatgttttatttaatagggatattattaggatttttttgagattatatgcgtatttttttaaagtattgtgttgaggttggtagatttttataattggtttggtattggttttgttatggggatagggggatagagttgaatgtgatggaggttttttattattttttaattttttttttggggattattgagttgggtaattatgttttgttaaatggtaatagggtagaataaaattagtgattgtgtttttagatttttatttagattttaaatttttgaggtttgttgaaaaatgaatgagtattagggtgtgagtttgtatatttttgtatgtttttgggtaattaattagataattttttttattatattggatatttgggttttagtaatttttattttgttaatgtgattttttaaaaatattttttgttttttggtgttttgatgataaatgtttatatatggaatgtagttattttttgttattaagattttttttggtttgtataagggaggagtttattttattcgtattttatggtattttataaagagttttttttttttttttatgtaatttatttgagatttgttgatatgagttgttggagtttgaagggaattaataatgtattgtagtgatttttattttaggaaaatttgttaaaaatataaagtttcggttgggtgtgatggtttacgtttgtaattttagtattttgggaggtcgaggcgtgtggattataaggttagaagattaagattattttggttaatacggtgaaatttcgtttttattaaaatataaaaaattagttaggcgtggtggtgtgtgtttgtaattttagttatttagggaggttgaggcgggagaattatttgaatttaggaggcggaggttgtagtgagttaagatcgagttattgaattttagtttaggcgattgagtgagattttatattaaaaaaaaaaaaatataaagttttaattttttttttttattaggttttttgtattagagtttttgggatggggtttaggaatttgtatttttttttagttttttagaatgtttagttaggtttggaaattgatttattcgattttttttgttttatagttagggaatttgtagttttgggaagggaaggaatttgttttagttatatttgatattagtgtttttttttttaatgaagagtttttaggttgggagtttagagatatgggtttaagtttaggttatattagttattatttcgggtaagttattttatttttttaagtttttgtttttttattgtgagaataatgttattgtgttgggaattaaaagagagagtggtaatggaaatgttttgttaagttttttattttgtgtatatggaagttgttaagagttagaattagttagtgtttatttttgtatattacgttgtttttttttaatagaggttagggttttgttgtgttgggggtggtcgttagttagtttcggtggttgttgggttttaggttatttgttattaatttttttttttttattttttgtagg

SEQ ID NO: 810 - DNA, 8899 bp, Artificial Sequence
  chemically treated genomic DNA (Homo sapiens)
tttgtaaaagatggagagaagagagttggtaatagatggtttgaagtttagtaattatcgaaattggttggcggttatttttaatatagtaggattttgatttttgttggaagggaatagcgtggtatataggagtgaatattggttggttttagtttttaataatttttatgtgtataaaatagaaagtttgataaagtatttttattgttatttttttttttgatttttaatataatggtattatttttatagtaaggaagtagaggtttggagaggtgaaatgatttgttcgaggtgatgattggtatagtttggatttgaatttatgtttttggatttttagtttaaaggttttttattggagaaagaagtattaatattagatgtgattggggtaagttttttttttttttagagttatagattttttaattgtgaaataagaagaatcggatagattagtttttaaatttggttgaatattttggggagttgggaaagaatatagatttttgggttttattttagagattttgatgtaagaggtttgatgggaaggaggggttgaggttttgtatttttttttttttgatatggagttttatttagtcgtttaggttggagtttagtggttcgattttggtttattgtaattttcgttttttgggtttaagtaattttttcgttttagtttttttgagtagttgggattataggtatatattattacgtttggttaattttttgtattttagtagagacggggttttatcgtgttagttaggatgattttgattttttgattttgtgatttatacgtttcgattttttaaagtattgggattataggcgtgagttattatatttagtcgaggttttgtatttttaataagtttttttgggataggagttattgtagtatattattaattttttttaagttttaataatttatgttagtagattttaaataaattatatgggaagggggagggagttttttgtggaatattatgaaatgcgaataaggtgaattttttttttatataaattagaaggaattttagtagtaggaaatgattatattttatatatggatatttattattaaagtattaaaagatagaaaatatttttgagaaattatattagtaagatggaaattgttgaaatttaagtgtttaatgtaataggagaagttgtttgattggttgtttagagatatatagaggtgtataaatttatattttgatatttatttattttttagtaggttttaggagtttaagatttgggtaaaaatttggaaatatagttattaattttgttttgttttgttgttatttaatagaatatggttgtttaatttagtggtttttaggaagggagttagagaataataggaaatttttattatatttagttttgtttttttgtttttatgatagagttagtgttaggttaattatgaaagtttgttagttttagtataatgttttgaaagaatgcgtatgtgattttaagagggttttgataatatttttgttgagtgagatatatatgagggtaattatagtaaagaataaggtttaagttagatagatagatagatttgggtttgagtttataataatacgatttttttttttttttttttttttttttttttttttttttttttttttttttttttttttttttttttttttttttttttttttttttttttttttttttttttttttttttttttttttttttttttttttttttgacggagtttggttttgtcgtttaggttggagtgtagtcgtacgatttcggtttattgtaagtttcgttttttgggtttatgttatttttttgttttagtttttcgagtagttgggattataggtatttgttattatgttcggttaattttttgtatttttagtagagacggggttttatcgtgttagttaggatggtttcgatttcgtgattttttattttcggttttttaaagtgttgggattataggcgtgagttatttcgtttagtcgattttttttttaagtaagattgttgtgtggattaaaagagaaaaattagtgtgaaatttattagtagtgtttgaagttttatatatgagattattttttggttgtattttttttataggtaggaggagatttgttagaggttatatagaagtttagtggtagagttaggataagaatttattattttgatattagagtaatgaaattttttatgagtttttatcgttttataattttgaaattttaatatttgtttgttgttgggtttttatttagttggtaaatattgatttgtatttaatgttatttttttgattaggtattggggatatggaggaggataagatataaagataattattatgggttaggtgtggtggtttattcgtgtaattttagtattttgtgaggtcgaggtaggcggattattcgaggtcgggagttcgagattagttttattaatatggagaaattttatttttattaaaaatataaaattagtcgggtttggtggcgtatgtttgtaattcgagttatttgggaggttgaggtaggagaatagtttgaatttaggaggtggaggttgtagtgagtcgagatcgtgttattgtattttagtttgggtaataagagtaaagttttgttaaaaaaaaaaaaaaagaaaaaaagaaagaaagaaaagaaattagatgaaggtgttaagtgggttttttgttttttttattttatagttttaatttttttttggttttatttatgttttgttgatgatatttaaatttatatttttatagtaatatttttttatttttaaattagaatatttaatttttttttgcgagtttttatataattagaatagaatttgttgttgttttttataaatttgttttttttttgatgaattttatttaggtatttaagttttgagtatttgttttttatattttattttttttaaattttatggattttgttgtttaagtatatagtattttgaatttttttatttatttttatttttagagtttgtagtttagtttcggttattgttattttttttttgggcgtgaaatagatttagagttaggtgtttttagtgattaggatatgttggtttttgttttttttttaggatttggtacgtgttgttttttttttggaattttcgttattatttttgatttgggttcgcgatttcgtttcggaagttgtttttgtttttcgtttcgggtttttatattttatagtttattatttttttttgtatcgtaggaatagtgtttgttttgattatttttttatttagtaattagtcgcgtttagtattgtatttatttattatatgaatgaatgaagaatgaatgatagacgggttagattatcgaaagttttaaaacgtttataaggaaatcggtcgtattttatcgttaggatttaggttagtgtttggaaaggtttcgaggtaacgatacggtcggttgtttaggttggttttattttacgggttcgttcgtttttattttggataaagtttggttttaatcgtttttcgttgtagttttaattggttttagttttattggtttatatgtttcgatatcggttcgatttaaaggtagaagattcggaaagtttgggattagtgcgcgttagtttaatttttttattagatattagttgtttcgtttttacgaagggttttagttataaggtttttcggttttcggaattttaattttttgttagattttttttttatatcgtttttttcgaggaaacgtgatttatgtcggtcgtcgtggtcgttttaatttattagttcgtttttttttcgcgaacggttttttcggttttcgcgtcgttatttaggtttagggggcggggtttcgatgcgatttagtgcgtttgcgttgatcgtttcggttaggtttaaagagtaggcggggtagagatttatatttttggcgttgagtcgaggttaggaaggggcggtcgatgagagggcggttttagtattaggagtgcgtcggttgtattttggcggatggattttgggaaggaggggaggggattatcggggtcggcggggagttacgggtatgtatagtttatagagcgttagagttgacgacgattagtggaagatggggaaattaatgtttagagcgggatagttattattttaggggtatataattgataagggtgggggtggtcgtggtaatggaggttttaaggaggggtaggggtttatagtacgttaggggttgagtttgtattagaatttaggtttgttttttagtttagttaagttttagaaaaatttttttgattttatttatttttttttaatttgggatattagtagggaaagtattagaggtaaaaggaaaggatttttatttttttaggaatgttgaagttaggattgtttgaggggagttttgtgttttttagatttttttgtatcgtttatattaggatttggggtagtttttaaaaatatgcggatttatgatttttattttttattttattgtttggtagtttttaggtgttttttttgttttttttttttgggttgtgataggtttgtttgtagttcgaagtatttgatacgaattttagttaaatggaatgtattagtttagtttttagggaattaattataaataagatatagttattgtttttagtttgataagataggtaataaattgtttttttgaaggaattagggatggtttttggggttttgaaggatggataggaaggtataggtagtgaaggaggtaggggtagaggtgagaggttgggatggggatagtgttttaaattgtaggaataaaagtagtaaaggttggttgggtgtagtggtttagatttgtaattttagtattttgagaggtcgaggtaggtggattatttgagtttaggagttggagattaggttgggtaatatggcgaaatttcgtttttattagaaatataagaattagtcgggtgtgttggttcgtgtttgtaattttagttattcgggaggttgcggcgtgagaatttttgagtttcggagacggaggttgttgtgagttgagattacgttgtagtatttttgtttgggtgatagcgtgagattttgttttaaaaataaaataaacgagtagcgaaggtatataattttgagggttgttcggtttgttttatagatattgaggagtttggtgtggataatgaggaagggtttgagggttgtaataggatttaggcgtttaggtttggagaggtagttttagacgttagttttattgagtaataggagttaagggttttaagtaggggaaggatatggttagttttgtgtgttaggtattggttatagcgtgataaatggtttggaagtggggagatgggttagagaaagtagagagagttaagatgtgagattatgaggttgtagttagtgtagtagttgtggagatggagcgaagcgaatagattaaagaaatttaggagtgagaatttttagtgatcgtaaattagtggtttaatttagggattaagatttttttgattttttttttttttttttttttttgagacggagttttcgttgttgttgtttaggttggagtgtagtggtacgattttagtttattgtaatttttattttttaggtttaagtaatttttttgttttagttttttaagtagttgggattataggcgtttattattatattcggttaatttttgtatttttggtagagatagggttttattatgttggttagattggtttgaaatttttgagtttaggtgatttattcgttttagttttttagagtgttaggattataggcgttagttattgcgttcggttttttttgattttttaaataaattatgtatattatttgattataggataggttgagttttttagtttttcgtgtgtggttacgggatggggggagatggtggtagataggtgtttggttatttttagaataatgttttttgatgtttttttttcgttggtttttgtatttgaggggataagtagttgttaattagaataggttttaggtggtaggaagaggtttttgggttaattaggaataaaagaagttatttttagtgtagtatgaaattaaaaattaaaagtatgatttagggttttttgtgtaggttttttttttttaagacgggtgttaagtgatgagtattaggtgtttatggtgagatttggggaggattttagattttaatagttttttggttgaaattttttataatgtggtaggtaagatgtttttatttttattttgtagatgtggtagttgagttttagaagttacgtgatttgtttaaggtgatttagtttgtggtaggattgggagtgaaggatttttgattaagaatttttttagggagcgtttgttttttttgtattttttgtttgggtgtttttttttaaaattttggtatgattggtttttttggttatttagatgttttatttttggaggttgttttattttataagtttattacgttattttttttttttttttgagatggagttttattttgttgtttaggttggagtgtagtggtgcgattttggtttattgtaatttttgttttttgggtttaaataatttttttgttttagttttttgagtagttgggattataggtacgtgttattatgttcggttaatttttgtatttttaggagagatagggttttattatgttgattaggttggttttaaatttttgattttgtgattcgttcgtttttgttttttaaagtgttgggattataggcgtgagttatcgtgttcggttttgtattttttttatagtagttatttatatttgaaattgttgtttttatttgtttgttgtttttttttgttagaatgtgagttttatgaaaatgggttatgtttgttttgtttattattttatttttaggatttgattggtgtttgttacgtggtagatgtttaataatatttgttaattgatggaaatagtttggggagagagaaagagaaggaaattaatatttaatgaaagttgaggatgttttaagtattttttataaattattttatttaatttttttatagttttttaaggtagaaatcgtatttttattgggtgaataagaaattatgttaagttaggttaagtttgtggtttgttatttttgaggttatagattcgtttgagatttattagtataaaattttgtattagttacgtggaggaatttatagatttttttaggtttatttggggattttagattaagatatataggattggggaatttgtttagggtttttttggttttaggtttttgttggatttttattttttggtaaggatggagtttatgtagtggattgtagggaatttgttgaagatttcggagtagagggagatgatttgttttgagtttttggtgttttagatttgagtttgaattttgattgtgtagaagttattttattttttcgaattttattttttttattttatttttttttttttttttttttttttttttttgagatggagtttttttttgttatttaggttggagtgtagtggtacgattttggtttattgtaatttttgtttttcgggtttaggtaatttttttgttttagtttttcgagtagttgggattataggtatatgttattatgtttagttaattttttgtatttttagtggagatagggttttattttgttgtttaggttggtttcgaatttttgatttcgtgatttgtttgttttagttttttaaagtgttgggattataggtgtgagttatcgcgtttggttttttttatttttaaagtgaaatttgtttttttttaataataattattttttattgatttggtcgttaagtgttaggtatttggttaatgattttatagtcgttattttatttttttttatttttttattatattagtatttttatagtttttattttatagtcggggaaaggaaggtttgaagaggtattttgatttgttaaagattatagtagtagtgttagttatggtgtttttatatatgtattttgggatatgttatgggtttagattttttaaagttaattgttgaattaattttattttttgtttttggggtttgtgggaatatttgggtttgaattaggtgaaaaaaggtatgtagggatgtattttattgtgaatggaggttaattttttaattttgtgttttgtttttttttttgcgagggtttttttttaagtttggattgtgggttttttttgtttttgtttttttgagatggagttttgttttgtagtttaggttagagtgtagtggcgttattttggtttattgtaagtttcgtttttcgtgtttatgttatttttttattttagtttttcgagtagttgggattataggcgtttgttattacgttcgtttaattttttttatttttagtagagatggggttttatcgtgttagttaggatggtttcgattttttgattttgtgatttattcgttttagttttttaaagtgttgggattataggcgggagttatcgtatttagttattggattgtgttttttgattggaatatttttgttagttttagggtttgtattatatatggtttgtatttgtgtatatggttattgtttttttttagtagtgatattattttgttttatattgttgtttatgaggttatttttttatttggttgggggttattgttttggttatttagagtggaatttttttgttttttagtttttagtataggtttgggttag

SEQ ID NO: 811 - DNA, 9524 bp, Artificial Sequence
  chemically treated genomic DNA (Homo sapiens)
ggtataaggagtttttgtggatatagtatttggttgacggatggggtttatggtaacgggtaatatagattatgttttgttgtaatttttagaaaaattgtggaagtgaagatagtttaaatgagaataagtaaaaggtgtttatatagagtttgttatagaaaggaagttagtcgttattttttgtatttattagagatttagaggtaggtaggaaagtttgagagatttatggtagaaaaagttatgttttgattgttggtttagggatgttgtaagttggttaattagaagtgtggatttttatgggattagttagagatttatattttgttttttgtggttggttataaattgaaaatagaggtaaaaattagggaagttggtagttattggttaatgttggtgtatttgattgttgtaagggttatgatagaagttgtttagtttataagggtattaagagtttagagggttttttagtagtttggttgtaataataaaatattatagattgggtagtttaaagaatagatgtttttattttatagttttgtaggttgggaagtataagattaatgtgttagtagattttatatttagggagtatttgttttttggattatagatagttaatttttggttatgtttttatatggtaaatatgttaagggagttttttgagaatttttttataaggggattaatgttatttatgaaagttttatttttatgatttgattattttttgaaatttttatttattaatggtttgaaagaatatattttttagggattttttttaaagatttgggggttaggattttaatatatgaatttttgggaaatataaatatttagtttataatataaggtaatagaaaaataaaatagtatttgtgtatttttggggtattgatttttatttttaagaagttttttttgatgttaatggagtatttgatttttaaggtatggtataaaaatagattgtgaataagaattttacgagttttattaaatagtttgtgatatgtgtatttgaataatgtatattataatatagtattgaagttgttttgtttgtgtattaagttattatttatacgtttgtatgtatatatagtttgaaaatgtattgttaaattattattttaaattagtgttgttatatgttttttttttttattatttatgatgttaatgtgttgagatattttaataaatattatatattatttaaaaattttattattaaaaatgtatagatttggtgtagtttaaagaaatgttttatgaatatatatatattaaggatttaaagagtaaagttaattttttatttttgatttattacgtgttagttattttatttttgtttgttttatttaaatatattattattattattattattattattattattattattattgtgtattttaaagtaagttgtagatatttttgtagtttattttgggatatagtggtatgtagattataatatagttaaagtagtaagaattattattgtaagaaagaggatgaattaaagtttatttaggtttattttagattttagagtaggaaatgaggagggtagatgaggagaaatgaggattttgaaatagtttattcgtgggagaagagtgttgttatgaaggtggagtcgttgtttaagagagattggagagagagtgtgtagagttattgaatattagggttgtatattgtagggtttggggtagataggatatgttgtagtaggggaaaagtttttggtttatgtggaagatgtaagttgggtgggtgttgtggatgttatagtgatgtggaatgagaggagaaaatgggagtttgggttttaaataaggagtaagtagagttatattttttatttttttattgaattaggtaatatggagaaagatttggatttttgtatttgtttagtaaggaagtagaggtgggagagggagagttagtttggataaatttagggagaagtagaggttttagttttattgtatatgtgtttttgatttgttttttttgattttttaggtgttgaagagttatggataagattatttcgttggttataagttgagtcgggttgatatttatttggttaaatttttttattacgtggaagagtttgatattagttttatttttaatttttttttgttgaaggtgatttattttttagtttttaagaggtagttttttattttttattttgggatttagtatttgggtttttgaattggttatattttgattttagttttttttaggtttttagggttttttaggtttttaaaatgagtttttaggttttgattttgaggtatggaaatgtttttttgttatgttaaggaaattatatgtgtatgttattttaagaatatttcgttttttataatgttaaggatttaggatttagtatttttttttatttttttattttattgtggtttttgtttttgagttttttgtgatgttttttattttaatatgtttttatttttttatattaagtgtgtttgagtagggttttttttatttggttttttttttatgttttggtttttgttgttagataattgagttttttgtgtatagtttttttaatacgttgtttttgaaagttatatttttttatgggaaaaagtggttttatggtttgattttaatattttttatttttatttttagtttaatttttttatatttttattttttttgtttagagattgatttgtgttattttataggtatattgtttttttttattttttataagagttatgaatttataagatttatgtgtaaggaagagggtaggaagattgaattgaataaagttttaaagatattttttgggaaaatgttagtgagttgtatgtttttttttttatttttattttttacgtagtgtttttttttgtttttttattggtgttgatagagggaatttagttggtttttgtgtaggaggggcgtagattttttgggttgtgttaatggtggtgttagtttttggttttattttgaggttgtgttttgtgtattgcgggttttgaaaattagaattagtaaattttttatagtgaagaagtttttgtagtttggtagtttgagggagttttttataaatgcgaaaggtttagaagaagtaataaagatttttaaggtttgataaaataggtatggatgttaagaatatgtaatattaatattttaaagttttgtaataataaattgttttatttaaatgttggttgtggttattgtgaagttaataaattttttaaaaattatgtgttaattatatagtaaaatgtttatgattagatttagttaaaattgatttttttttattagtatttgatatgaaattagatttttaaattttttataaatttttttggaattaaaaatttagtaaaaaagtaaaatgtagattatgtggtttgtttgatttttttaagaattgttttgtaatatttgttaaatggtttattagaaagttatgtatagaaatttatttttgatattttgtataagaaaatagttattattttggggaatggtaaaatgaaatttttttttttttttgatatttattttattttttatgaaaatatttttttttatgtatttttaaataatttttttgtttgttatggattttttagttttgtaaggggtgaggaaatattgaagagtaaatagatttattttttgtttttaggttaatttgttattttttatagtgtatgtgtttttggtttatttttattttttttaaggttttgtggggattcgggtataagtttttttttagtttttttagtgttatttaggtttggttgcgaagatatagatggtatatgcgaattatatataagtaattatatgtaaaattatttttttttggtgtgttattgtgttagcgtgtttggattagaagtgatttttaggaatttttttttgcgttttttagtttttgggggtttttggtttttttggatttttatggattatgattatattattttaatttttgtttttgtgttttagtattttattttttgtgtgttgtgtttttttttttttttgttgtgaggataattgttattggatttggggtttatttagatatattaagatgattttattttaaatttttttattttattatatttgtaaagagtttttttttaaataagattaagtttataggatttagggatttttatatggatttattttttttgggggttaatataattttttatatggtataggtgaaataagattatttgtaattgatgaatttaggtgatgaatatttttagatttgttatattatgggtaatttgagtgacgtaaagaggatagtatatgtaaatagggtttttggatttgttagataaaatataggatatttatttaaatgtgaattttagataaataataaataatattttagtataatttggttttatatcgtgtttggaatatagttataattaaaaaattgttgattgtttgtttgaaatttatatttatatggatgttttatattttatttggtaatttagtaagaaaacggtggtattagtttgttttttatagatatttttttttagttatgtttataatagagattttttagttgttttagtttttgtatttaatttatgaaaaaaagtatttttaaaaagttagtttttgttgatttgtaaaaagagtaaaatttcggtgaaatgtattgtgtaaattttgattgttaattttgaaaaggaatatattaattagtgttttttgataagtagattatttgttttatgttttagaatttagtaggtggttttttggttatgaaatgtgtgggagtggtttttttttaatttgattttttttttagtgggagagaattattgagaggaataaagagtttataaatatattaggatttggaatttagttgtcgagttaggacggtgatagcgtttaataaagtaagtattgattttataaatttttttatattgttttatatttttttttttagttttttagaaaaatatgttaatatgtgtttttagtataaggaaaagtttgtttttatttatattgtgtcgttttggtgtgtttgggtgatagtttaagaattgtttattttttttttgttggatatatttttatagaattgtaaaaatgaagaatttagaaaattagggttttagtatttaatggtatgggaaataatgatatgaagagaaaaaagaaatggtagtattttaaataatttgagaataattagtgttggaagaagtggtaatgtatgtaaaaatttatttttttgtgtaagtagttaatatataattgtaaattgtgatattgtaattttatattggttgtgaaaatataaaatttaggtttagtataattagaataaattagtttgaatgttaggagaattagattttagttgagtttttgttattaattagtttaaagataagttatattttgtttttggagttttattaatttatggttaatatagaggatagttaagaaagaggtttcgattgttgttgttttttaaattgtgtaattttttgaatggagatttgttttgtttattttaggatgtttttaggtatttttggtttttatttatttgatttgtaatttttttttttttttcgtagatatgataatttaaaatgtttttagattttgtttaatgttttttggagtagaggagtaaaatttttttggttgagaattatgggattatatgattttatggggttaagtaaggttgtgttattgatgtgttttattgtttggatatttattgaaaattttttgttaatttaggtggattgattagtgaatattaatattttttgtataggagttaaaaaggaaagagagagagaaatagagagttattatatgatagatttgatataagtttggatttatataaaattttatttttattcgagttttatgaataaaatatagagaattagagaaatggatataagatagataatagatgatgaagagatagattataaagagatagatatatagaacgattgatagataaaataatatatatatggatgggtagatagagattataaatagatatatatatatagattgttggttagtaaaataattgatggatagatagattaaagaaagaggatttatgggttatttaatatgtttagagatttatttattttttaagtattgggataagagtaaatatttattgttgtgtttttattatgaattttttgtatattattttatttaatttttttaataatttttaaaagtagaaataattatttttattttaagaagagaaaattgaggtttagagattaaataatttattgtatttatgaattttataatggaaggagttatagtttattttatttttttttttttttgataagaaatagtgttattgggattattttagagatgtaaatgtaatttttttaatttatttttggaattatgagagtttatattttttttaaaataagtttattttttaattgatgtaagttaattattgatgtaaagtaattatattagtttttaatttattttgatttttaggttgttaaattagagaaagttatagttttattaatttttttttttaagtaagtttttgaaaagttgttaataggaggaatttaggaattagatgtttttttttcgttttttttttttaatatttatttggttaatatatatttaataggaaaatataaaataattttttagataggagttgagagttaggttatgaggtggagtggaaaagttttggatttgtaattagaagttaaggttgatttaatatttattaagtgtgtagtatgagataggtgttttagttttttgaaatttagtgtgtttatttttaatttggataataggagttattttttagggttgttgcggaaggtaaatatattttttagatattgattatgaatgaggagtatgtgtgtgtgatttatggtaaatttttgagttttttggtttttattttttgttgatttaataaagtttaatggtaatttatgttttagttttagtttgatttttggaaattttatattgagaaagtgatatgttagttattagtaggagtgttgtgataaaatattatgtaagataaaattttatttttttttgaaatatgatttttaattaatggttaagagagtttagtttggggattggaattataatattgtgaattttagtcgataataattaaataagtatattttatgtttttatttgaattttatttttttttttattttgttaaattatgttatttttattttttaagttattttaaattgtttttggagttattatagaaagtataatgttaaaatattttatgataaaataggtgagttgatttagtatgattttaaagaattttttattttttaaaggttaattattgatttttatattttaaaatgagatatttaaaagattttgatgtttaattttagttatatatatttttttagaaatatattagttgaggtcgggtgtagtggtttatttttgtaattttagtatttcgggaggttgaggcgagtggattatttgaggttaggcgttttagattagattgtttaatatgttgaaattttgtttttattaaaaatataaaattattcgggtgtggtggtatatgtttgtaattttagttatttaggaggttgagggaggagaattattagaatttgggaagttgagtttgtagtgagttaagattacgttattgttttttagtttgggtaaaaatagtgaaattttattttaaaattaataataaataaataaatatattagttgttaaaggtaagtatatttttgttttatatttaataattataaaattttgtaagaagaattttaatgttaaatattagagttgggggtttggagagaaaacgtaattgtttttaagttttggtattggaatttttgtttttaatgagttttgtgtttttttatttatatttatgatataattagttgtatttgtttttgtagttattggtttttattttttgatattttgttatgttttattttttaaatagtttgggatagagtaagggttattaaattttattgatgagtttagttaatttttttttaattatttataatgagtaagtgagtatgtatacgtgtaaatattcgtatatataatatataaataattgaaattaataatttattaaatattatttattttttaatatgttatgtttattgatattttttatttttttttattttatttttaaaagtaatgggtttttataatttattgaaagattattatgtatattttagaaatattaatatagaaaataagatttagtttttggtttttaatagtagtgagtttgtatttcgatttattatttattttgagaaagttattttaaaaattttagtatttttaaatgtaaaatgagaataataattgtatttattttaggtgatttttgtaggataaaacgaagagaagtttagaagaatgattagtgtgtaattgatgttgaataaatgttagttttttttatattgtaaaattaatgtagtaatatttttttttttagtttataaaataaaatgtattttatagagttagaatatagaattataaaagttgtagggattaataatttttgtttgttgatagattttggattttttagttatagttaaataagtttgaggtttaatttttggttttgattaaatgtagttttatagttaaagaggtgaagagtgatttagttttttgtcggttttttttgttagtgatattttttggttttatggttagtttatgggtttttagggtttttatttagttggtttttaggagtgattttattttagtttttggtgtagatatttatgtttattattaatcggagtgtgattgtgaatattgtatttttttgatgttttattttattaattaaaaaattgagataataattattttacgggattataaggagggttaaagatataaaatattgaaagggattagtattgaggaaggattattaggaagtttttaataaatattagtttttgaatttttttttttttaataatttttatatatgtatttttattatatatttttattttttatgttgttaagaaaagttatagttagttaatgaagatttgagattggtttgttggaatttgagggtggttattgttgggtaataatttgagttaagaaaatattttaggaatttttttaatatagttatgaagaaggaaggtttttttttagtattgttggtggtttttaattatatattttaaagtatatttttgattttatcgttttaattatttatttatttatttatttatttagg

SEQ ID NO: 812 - DNA, 9524 bp, Artificial Sequence
  chemically treated genomic DNA (Homo sapiens)
tttgaatgaatgaatgaatgaatgaataattgaaacgatagaattaaaaatgtattttaggatatgtagttgaaaattattaataatattgaagaagaattttttttttttatgattgtgttggaggagtttttggaatgtttttttggtttaaattgttatttagtagtggttatttttagattttagtaaattagttttaagtttttattggttaattgtgattttttttggtagtataagaggtgagagtatgtggtaaaaatatatgtataggagttattggaagaggaagaatttaagaattaatatttattgaaaattttttagtgatttttttttaatgttagttttttttaatattttatatttttaattttttttatagtttcgtgaaatgattgttattttaattttttagttaatgaaatggaatattagagaaatataatgtttatagttatatttcggttggtgatggatatgaatatttatattaaggattaaaatgaagttatttttggaagttagttgggtgaaggttttgggaatttatgaattggttatgaaattagaggatgttattgatagggaggatcggtagggagttaagttattttttatttttttgattgtgagattatatttgattaaaattagaaattaggttttagatttgtttaattgtagttagaagatttaaaatttattaatagatagagattgttaatttttgtagtttttgtaattttgtattttaattttatggggtgtattttgttttataagttggaagaagagatgttgttgtattaattttgtaatatggaaggagttagtatttgtttaatattagttatatattggttatttttttaaattttttttcgttttattttataaaaattatttaagatgaatgtagttgttatttttattttatatttgaggatattgaggtttttaaagtaatttttttagagtaaatgatggatcgggatgtagatttattgttgttaaaaattaaggattgagttttattttttatgttagtgtttttgaaatatgtatggtaattttttagtagattgtgaaagtttattatttttaaaaataaaatagaaaagaatagaaaatgttagtgagtatgatatgttgaaaggtaagtaatgtttgatgagttgttagttttagttatttgtatattgtgtgtacggatgtttgtacgtgtgtatgtttatttgtttattgtaaatggttagagagaaattgattgggtttattagtgaagtttgatagtttttgttttattttaggttgtttgggaggtggaatatagtagagtattagagaatgaaaattagtggttgtagggatagatgtaattaattgtattatgaatgtgaatggaagggtataggatttattgaaagtaggagttttagtgttaagatttaggaatagttgcgttttttttttaaatttttagttttgatatttaatattaagattttttttgtaaagttttgtggttgttgagtgtggaataaaaatatatttgtttttaataattaatgtatttatttatttattattaattttgagatggagttttattgtttttgtttaggttggagagtaatggcgtgattttggtttattgtaaatttagttttttaggttttagtgattttttttttttagttttttgagtagttgggattataggtatgtgttattatattcggataattttgtatttttagtggagatagggttttagtatgttggatagtttggtttggaacgtttgattttaggtgatttattcgttttagtttttcgaagtgttgggattataggagtgagttattgtattcggttttaattaatgtatttttaaaaaggtatgtatgattaaaattaggtattaaaattttttaaatgttttattttaaaatatgggagttaataattaatttttggaaagtaaagaattttttgaaattatattgaattaatttatttgttttgttatgagatattttgatattgtattttttatgataattttaggagtaatttaaagtaatttgggaaatggaaatagtataatttgatagagtgaaagggagagtgaagtttagatgaaagtatggggtatgtttgtttaattgttatcgattagagtttatagtgttgtaattttaatttttaaattaaatttttttagttattgattgaggattatgttttaaaaggaagtgaaattttattttatataatattttattataatatttttgttgataattagtatattatttttttaatgtgaggtttttaagggttaggttaagattgagatataggttattattgagttttgttgggttaatagaaaatgagaattagagagtttaaggatttgttatgggttatatatatatgttttttatttatagttaatatttagggagtgtgtttatttttcgtaataattttgggaaatggtttttattatttaaattaaagatgggtatattgagttttagagagttaaagtatttgttttatgttgtatatttggtgagtgttgggttagttttaatttttgattgtaggtttagagtttttttattttattttataatttggtttttagtttttgtttgagaagttgttttgtatttttttattaaatatatattagttaaataaatgttggaaggagaggacgagaggggaatatttaatttttgagttttttttgttagtaattttttaggggtttgtttggaagaaaaaattgataaaattgtgattttttttgatttgataatttaaaaattagagtgagttgaggattagtataattattttatattaataattaatttatattaattaaaaaatgggtttgttttgaaaggaatataagtttttataattttaggagtaaattaaaggagttatatttatatttttgaggtggttttaatgatattgttttttattagagagaagggagaatgagataaattatgattttttttattatgagatttataaatgtagtaggttgtttaatttttgagttttaattttttttttttagaatagagatagttatttttatttttgagggttgttgagaaagttaaatgagataatgtataaaaaatttatagtaggaatatagtaatgggtgtttgtttttgttttagtgtttggaagatgggtgagtttttggatatattgagtagtttatggattttttttttttgatttatttatttattaattattttattgattaataatttatgtatatgtatttatttataatttttgtttatttatttatgtatgtattattttatttattaatcgttttatgtatttatttttttgtaatttgtttttttattatttattatttgttttgtatttatttttttggttttttatattttgtttatagaattcgagtaggaataagattttatatgaatttagatttatattaaatttgttatatgatggttttttgttttttttttttttttttttttagtttttgtatagaagatattgatatttattaattagtttatttggattaataggaaatttttagtgaatgtttaagtagtggggtatattagtaatatagttttgtttagttttatgaggttatgtagttttatggtttttaattagggggattttgtttttttgttttagaggatattgagtaaggtttagagatattttgggttgttatatttgcggggagggaaagggggttataaattagataggtagaggttagggatgtttagaaatattttagagtgagtaggatagatttttatttaaagaattatatagtttaaagggtagtaatagtcggagttttttttttagttattttttatattggttatgagttggtagaattttagagatagaatatgatttgtttttgagttaattagtggtaaaggtttaattagaatttagtttttttgatatttaaattaatttattttaattatattaaatttgagttttgtatttttatagttaatatagaattatagtgttataatttataattgtgtgttgattatttatatagagaaataaatttttgtatatattgttattttttttagtattgattatttttagattgtttaaaatgttattattttttttttttttttatgttattgttttttatattattaaatgttgaagttttggttttttaaattttttatttttataattttgtaaagatgtatttaatagaaaagaaataaataatttttgaattgttatttaagtatattaagacggtataatatgagtaaaaatagatttttttttgtgttaaggatatatattagtatatttttttaggaggttagagaggagggtgtgaggtaatgtagagaaatttataagattagtatttattttgttaaacgttgttatcgttttggttcgataattgaattttaggttttaatgtatttataagttttttgttttttttaatagtttttttttattgaaagaagagttaagttagggaaaagttatttttatatattttatggttaaggggttatttattggattttaagatatgaggtaagtgatttgtttattagaagatattggttaatgtgtttttttttaaggttggtaattaaagtttatataatatattttatcgagattttgttttttttgtaagttagtagaaattggttttttaaagatgtttttttttatgagttgggtgtaaagattagggtaattgaaaaatttttattgtgagtatagttgggagaggatgtttgtgaagggtaagttgatgttatcgtttttttattgggttgttaaataaaatataggatatttatgtaaatgtgaattttaggtaaataattaataattttttagttatagttatgttttaaatacggtatgaaattagattatattgaaatattatttattgtttatttgaaatttatatttaggtgggtattttgtattttatttgataaatttagagattttatttgtatatgttattttttttgcgttatttaaattgtttataatataataaatttgaaagtatttattatttggatttattaattgtaaataattttattttatttatattatgtagggggttatgttggtttttaagaaagataggtttatatagaaatttttagattttgtgaatttgattttatttggaaaaaggttttttgtagatgtaatgaagtaaaagaatttgagatgagattattttggtatatttggataggttttaaatttaatgataattgtttttatagtagagagaagagaagatataatatatagggggtgaggtgttggaatatagaggtagaaattagagtgatgtggttatgatttatgaaagtttagaaaggttaagagtttttagaagttagaagacgtagggaaggatttttggaaattatttttaatttaaatacgttggtataatgatatattagggaaaaataattttgtatatagttatttatatgtaattcgtatatattatttgtattttcgtagttaggtttgagtggtattgaaggaattgagggaaggtttatgttcgggtttttatagagttttgaggagagtgaggatgagttaggagtatatgtattgtaagggatgataagttggtttgagagtagagggtgggtttgtttgttttttaatatttttttattttttataaaattgagggatttatagtagatagaaaggttgtttgaaaatgtataagaaaaagtgtttttatgagaaataaaatggatgttaaggaaaaaagaaaattttattttgttattttttagaatgataattgtttttttgtgtagaatgttagaagtaaatttttatatatgattttttgataggttatttgataaatgttgtaggataatttttgaaaaagttaaataaattatatagtttatattttatttttttattaaatttttaattttaagaaaatttatggggagtttggaaatttgattttatattagatattaatgaaaagaaattaattttaattaaatttggttataggtattttattatgtaattagtatataatttttaaaaagtttattaattttataatagttataattaatatttagataaagtaatttattgttgtaaaattttagaatattggtattgtatgtttttggtatttatgtttgttttattaaattttgaaaatttttgttgttttttttaaatttttcgtatttatgggaagtttttttaggttgttaggttgtaaaaatttttttattgtggggagtttgttgattttgatttttagggttcgtaatgtataaagtatagttttagagtgaagttaagggttaatattattattaatataatttagggaatttgcgttttttttatataaagattaattaagttttttttattagtattagtagggaggtagaaagagatattacgtgagaaatgaagataagaggaagaatatgtagtttattagtatttttttaaaaaatgtttttaagattttatttagtttagtttttttatttttttttttatatatgaattttgtagatttatggtttttgtagaagatgagaaagaataatgtgtttgtgagatagtatagattagtttttaagtagaagaagtgaagatatgggaaaattgagttagaaatgaaaatagaaaatgttaaagttaaattatgggattatttttttttatagagagatatagtttttaggggtagcgtgttgggagagttgtgtataaggaatttagttatttgatagtaagagttagagtataaggaaggaattagatggaaagggttttgtttagatatatttggtgtgggaagataagggtatattgggataaagggtattatagagaatttaggaatagaaattatagtgaaataaagggatgaggagagatgttgagttttgggtttttggtattataaaaagcgaaatatttttggggtagtatgtatatgtaatttttttggtataataagaaggtatttttatgttttagaattaggatttggaagtttattttggagatttggggggttttgaagatttggagaaggttgaggttagaatgtggttagtttaaggatttagatattagattttaagatgggagatgaggagttgttttttgaggattgggaaatgggttatttttagtagagggaagttggagatgaggttggtgttaagtttttttacgtggtagagaagtttgattaggtgaatgttagttcggtttagtttgtggttaacgaggtagttttgtttatggttttttaatatttggagaattagaggaaatagattaggaatatatgtgtagtgaggttggggtttttgtttttttttgagtttgtttaggttgatttttttttttttatttttgtttttttattgggtaggtgtaaagatttagatttttttttatgttatttgatttagtgagagagtaagaagtgtggttttgtttattttttgtttggagtttaggtttttattttttttttttattttatattattatggtatttatagtatttatttagtttgtattttttatatgggttaggggttttttttttgttgtagtatgttttgtttgttttaggttttatagtgtgtagttttgatgtttagtggttttatatattttttttttagttttttttgggtagcgattttatttttatgatagtattttttttttacgagtagattattttagaatttttatttttttttatttgttttttttattttttgttttgggatttgaaataagtttgggtgaattttaatttatttttttttttgtaatggtggtttttattgttttgattatgttataatttgtatgttattgtgttttagggtgaattgtaaagatgtttgtaatttattttgaaatgtataataataataataataataataataataataataataataatgtgtttgagtgaggtaaataggggtggagtgattgatacgtgataaattaaagataaaaggttaattttgttttttagatttttggtgtatatatgtttataaaatatttttttggattatattagatttatatatttttaataataaagtttttgagtgatatatgatatttattaaaatattttagtatattgatattataaataataaaaagagaaaatatatggtaatattgatttaagataatagtttgataatatatttttagattatgtatatatataaacgtatggataatgatttggtatataaataaaataattttaatgttatattgtaatatatattgtttaaatgtatatattataggttatttggtagaattcgtagaatttttatttatagtttatttttatattatgttttgggagttaggtgttttattaatattaaggaaagttttttggaagtgaaggttaatgttttaaaaatatataggtattattttatttttttgttgttttgtgttatggattgaatgtttatgttttttaaaaatttatatgttgagattttgatttttaaatttttagaagagatttttaaaaaatatatttttttaagttattagtaggtgggggttttaggagatgattaagttatgggggtggagtttttatgaatgatattagtttttttataaaagggtttttagagaatttttttggtatgtttgttatgtgaggatatagttagagattggttgtttatgatttaaggaataggtgttttttagatgtgaaatttgttggtatattgattttgtattttttagtttgtagagttgtgagatagaaatatttgttttttaagttatttagtttatggtattttgttattgtagttaaattgttaagaaattttttaaatttttagtgtttttatagattaaatagtttttattatgatttttataatagttaaatatattagtattggttaataattgttagtttttttaatttttgtttttatttttaatttatgattaattatagaaagtaaaatatggatttttgattaattttatagaaatttatatttttagttagttagtttatagtatttttaggttagtaattaggatataattttttttattatgaattttttagatttttttgtttatttttgaatttttgataaatgtaaaagatggcggttgattttttttttatagtaagttttgtataaatattttttgtttatttttatttggattgtttttatttttatagtttttttggaagttgtaataagatatggtttatgttgttcgttgttatggattttattcgttaattaggtgttgtatttataaaggttttttgtgtt

SEQ ID NO: 813 - DNA, 6044 bp, Artificial Sequence
  chemically treated genomic DNA (Homo sapiens)
gagtatataaagtttttaaattgagatttgaagtttttgatttttgtgtaagtaattttatttattattgagtagatgagtgaagggttgaggttaagaagattttttagggtttttgaaaatgtattaggtaggtaggtgggtaggtaggtaggtagaatagatagataaaatgagtaagattgttttaggatgagggtaattttaagggtttttaagaataagtaggttgatgatgttaggggttttaaaggaataaaatgtttttggggtatttgttatagagtgttagaattattataataggagtttttatttttttttaagtttgtgtaatagtagttatgttgttattttagttatatttttaggtgaataaggttgagtgttatttaaaaaaggtgttttgatttagattttaaaagagggtttttggatttcgtataggaaggaatgtaaggcgagttatttagtgttatgagaagtaatattttattgaaagttatttagttatagagtagagtatttttagaaagtaagaggaggaatgttttttttttgtttttattcgataggggttttatttttgtaaaaggtaagttaagtaatgtttacgtgcgagtgggttaatagaatgaaaaaaattagtattttgttaatttaaagaaaggtatttttggtatttttatgcgtaaatacgtgaaagtatgattataattattttaaaggtgtttagtattatgtaatattggaatatttggatattttattgttataggaatttgtttttttaggtattattaagttatttttttagttgtagatattttaagatggagttgatttttttgttttttaatttagtttaagttttagaatataagcgtataacgtgtagttgtgttatggtgtagtgtgttatggtggtttgttgtatttattaatttattatttaggttttaagttcggtatgtattagatatttgttttaatgttttttttttttttatttttttatttttcgattggttttggtgtgtgttgtttttttttttgtgtttatgtgtttttattgtaagatggagttgattttaaaatgttgttattttggtttttttatatttttgtttttttaattttaggatgatgttgtttttattttataagattggatatttgaaattgttatttttgaaggttaaaaatagtaagatattagtaatttggtataatttaattagttggaattaagtaaatggagataagtgtttggtttaaatgtttaataaaagtaattataaaagttaggtgtagaggtatatgtttgtaattatagtattttaagaggtagaggtgggaggattatttgagtttaggagtttgagattagtttgggtagtatagttagattttttttttataaaaattaaaaattagttagtagtgttatgcgtttgtagttttagttatttaggaggttgaggtgggaggattatttgagtttcgaagttgtagtgagttttgatcgtattattgtattttagtttgggtaatatagtaagattttgtttttaaaagataaataaataataataataataataataataataatatacgattataaaagattataagaattataattttttataatggttattgtagttttatataaaaaaatattgggattattgtttttgttatttatttttgtagtaaaggatatttattttaaaataattatgttatcgttatttttgttttttaaaaatttttgttttattttatttttttgaatatatatataatttattatggtatgtatatttttattgtaaaatttaatttttaaataaatatttttaaagagtttttttttgtttgttatttaggttaatataaaaaatttagagatgatttaaagtaaattaaaggatgtgtgttaagttatatgtaaatattatatcgttttatataagggattggagtatggtttgattttggtagttgagggggttttgaaattaattttttatagatattgagggatgattgtattttaaaatattatgttgtatatagtaaaaatatataattttatttgttaattaaaaaataagttttttgagggtaagaattggattttataatttattttttatgttttagtaaatttagtagattttagtatagatgtttaataaattttttttaattataaattaaaagtaagaaaaaaagaatgattatttttagtaaggttggaaaatatggttttttatttatgttaaattgagtaattgttgttaaattagaattagaaatatgattggatatatattgttaagttttttttgaaaacgatttttttgatttttggggtgtttagtggtttttgatttatttttttttttattttgtatattttttttggatgagtttatttttttgttattaatttaatcgattttagttttttttattgagtttttattgggttggtttttgttttttcggttttttttttatagggagttttattttttcgtttagtttgtattgtaggggcgtgattacggtttattgtaattttcgttttttaggtttaagcgattttttcgttttagttttttgaatagttgggattataggaataggttattacgttcgattaattttgtatttttagtggaaatagggttttattatgttggttacgttggttttgaatttttgattttaggtgattcgttcgttttagttttttaaagtgttgggattataggcgtgagttattgcgtttagtttttaatggtttttttaattgtttagtgggtatttttagttggatggtttatagtaataaaagataagttaatttattttttttaaattttgtttttttttttcgttttttatggaattagaaattaaagtattgtttatttatttatttaataagtgttttttgaatatttattttatattaattaggatgtataaaaggaaaattaaaagcgtaaaaattttcgatttcgtggaatttatattttaggaatttatagataaataaataaaaaagttttgttagatgataatatatgttattaaaaaaaagataagaagtgtgtgtgtgtgtgtgtgtgtgtgtgtgtgtgtgtgtgtgtgtgtgtgtgtgtgttggatagggtattattttagatttttttttttttttttttttttttgatttgattagtaattgttttattatttatttttttagtattttatttttttttatttatattttttaaatttatggtgttattttaatttatatagatataagaggtttttttttttatttttattattttaatttattcgttttattttggttagagaaatttattgaaaataaaatttgattatgttagcggttgtaattgtttagtatttaggtttgttaagtaaggtattttcgagcgttttcgtgggtgaagaaaataataatatttatagtttgagaaatagtagaagttgtttttaaaaataaaatttattttcgaaggtatatattttaaattttgaaatttatgtgaattttgtaattgttttataatatagttttgatagttttaatatatttttaatgttttaattaatttgttagttaaattatttttttagtattatttttaattttaaagatttttttttaaataggtgttgatttgagatcgtgattatagagtatttgtttttaaaatgtataaaatgaagagaaattttaagatgttttattgagatgaagaaagaaagaagaaaatatgtatgtttgtatatatgtatatatgtatatatatgtatatataaaattagaaaagttagggtttattgtataaattaaataagcgttgatagtgtttttgattttaatttgtatgtggtattttgtttgtttaatatttttatgtggattttttgacggatttgatatttttgttaggaaagtattgcgtatttgttgattaaaaagtatttaagggtcgggagcggtggtttacgtttgtaattttagtacgaggtaggaggattatttgacgttaggagtttaagattattttggttaatatggcgaaatttcgtttttattaaaaatagaaaaattagtcgggtatggtggcgcgcgtttgtaattttagttattcgggaggttgagttaggagaatcgtttgaattcgggaggtggaggttatagtgagtcgagattcgttttaaaaataaaaaataaataatgaaaaaaattaaaaatttaaaaattaaaaaatatttaaaaaagtatttaatttagatgggtaatgggttaaaagaaaggtagattgttatatgtagcgttttatttggatgtgtttggagttttggaagtttgattattttacgtttttttataaatggattttgagagtttgtttggaggttttagtaggggagcgtagttattcgtatatttttgatcgaagatcggtttttttttatcggggatggtcgtttttttcgatcgagcgcgtagtttcgggagggacgtatatggagcggtgagggaggaaggggatattcgtttagttagttagattagtcgaattaattttggcgattaatggggtgatagatgtcgtagttagatcgtttttatattcgaggtatttaagcggcgtataagttatataaatttgaaggaagttttaattttatatttaggttaagttgtttatcgtattagagttttagtaggaaatttaattaaaatttaatttaattagtatagtaaatattatttatttttaaaatgttaaagtttgagataaacggatttgattttcggttgttttgatattatttagaatgttttgtagatgggtggggtatgttaaatattgtagtttttattggtgaggtcgtttcggagtttcgtttagttttcgcgcgttagagtcgtttgttggttttatttagtcgggatcgttgatttggcgttttgtgcggttttaggttttcgagtggattttaggtttgttttttttttgcggtcgttttttttttcgtttttttttttttttttttttttttttttttttattttttgagttttattttcgtattttttttttatttttttagtttagttttttttttgtttttttttttttttgttttttgtttttttgttttatttagtttgggtagaggtgggttttttggttggagttggggttttttttggtttagtgtgcgtatttttttttaaattttttttgcggagtttgaatgtattggtggaaggtgggttcggatcgttttcgggtttggttgggttgtcgttacgtttttgtatgggttgagcggggaagacgagtatgggagagtgcgattttagatggttaagttttggttttcggttcgttttataaggtcgggggtttatttttttgtaggggtggtggatacgcgggattcggggggcgtagttatcgtatgcgtgacggtggacgtatattttgtagatagtagtagtattcggtttgtttattttttagttgtcgtgataataaaatatgatgatgtatgtaaaagtatgaatatttgaagagtttttagtggttgtgcgattttttttcgttattttttttaacgtttgttattttttattttttagttgaatttggaaaatttgagattttcgaggttaaaatatataatattttgaatttgtgaaatttcgtattgttagtatatatgtttttataataaatggttttagttttttaagatttaggataagaagttataaatagaaattatataaaagttaaggtttttttttttatgttttaaaatggtggttttttttttttgagtgagggaaaatgtagtaataaaaataaagaatagtttttcgtgttaaaattttgaatatttatttcgtttttgagtattgggttgaagacgcgaaattgggattgttggtttgcgacgagttgttgtatttgtattttaga

SEQ ID NO: 814 - DNA, 6044 bp, Artificial Sequence
  chemically treated genomic DNA (Homo sapiens)
tttgaaatataaatgtagtagttcgtcgtagattaatagttttaatttcgcgtttttaatttagtgtttaggggcgaaatgaatatttaggattttggtacgggaaattgttttttatttttgttgttgtatttttttttatttaagaaaaaaaaattattattttaaaatatggagaaaaaaattttggtttttatatgatttttatttatgattttttattttggattttgggaagttggggttatttgttgtaaaaatatatgtgttagtagtacgggattttataaatttagaatattatatattttgatttcgagaattttagattttttaaatttagttgggggatagggggtggtaggcgttgaagagggtagcgaaggaaaatcgtatagttattggaagttttttaagtatttatgtttttatatatattattatattttattattacggtaattggaaggtgaataggtcgagtattattattgtttgtaaaatgtgcgtttatcgttacgtatgcggtggttgcgtttttcgggtttcgcgtgtttattatttttatagggagatgagttttcggttttgtaaaacgagtcgggggttagggtttggttatttgagatcgtatttttttatgttcgtttttttcgtttagtttatgtaggggcgtagcggtagtttagttaggttcggggacgattcgagtttattttttattaatgtatttagatttcgtagaaggggtttaaaaaaaaatacgtatattgagttaagaaggattttagttttagttaaggggtttatttttgtttagattggatggagtaggaggataaaggataagaggaagaaaagataagagaaggattgaattgggggagtgagggaagaatgcgagagtgagatttagagagtaaaggggagggaaaaaaaagaagagagaaagggcgaggaagggggcgatcgtaggagggagatagatttggagtttattcggaggtttggagtcgtataaagcgttaggttagcggtttcggttgggtgagattagtaggcggttttagcgcgcgggagttgggcgaggtttcgggacgattttattaatggagattgtagtatttagtatgttttatttatttgtaaggtattttggatagtgttaaaatagtcggaaattaagttcgtttattttaaattttagtattttgggaataaatgatatttgttatgttggttaaattagattttagttaaattttttgttgaagttttagtacgataagtaatttgatttaagtgtaaagttgagattttttttaggtttatatagtttgtgcgtcgtttgggtatttcggatgtgagggcgatttggttgcgatatttgttattttattgatcgttagggttgattcggttgatttggttggttaggcgggtgtttttttttttttttatcgttttatgtgcgtttttttcgaagttgcgcgttcggtcgaagaggacgattattttcgatagaggaggatcggttttcggttaagggtatacgagtagttgcgtttttttgttagaatttttaaataagtttttaaggtttatttgtaggagaacgtagggtagttaagtttttaagattttagatatatttaaatgaggcgttgtatgtggtagtttgttttttttttgatttattatttatttaagttagatgtttttttaaatgttttttaatttttaaatttttaattttttttattatttattttttatttttgagacggatttcggtttattgtaatttttatttttcgggtttaagcgatttttttgatttagtttttcgagtagttgggattataggcgcgcgttattatgttcggttaatttttttatttttagtaaagacggggtttcgttatgttgattagggtggttttgaatttttgacgttaggtgatttttttgtttcgtgttgggattgtaggcgtgagttatcgttttcggtttttagatgttttttaattagtaagtacgtaatgtttttttgataggaatgttaagttcgttaggaaatttatataagggtgttaagtaggtaaagtattatatatagattaaaattaaaagtattgttaacgtttatttaatttatatagtagattttaatttttttaattttgtgtatatatatatatatatgtatatatgtatataaatatatatatttttttttttttttttttattttagtgggatattttgagatttttttttattttgtatattttagagataagtgttttatagttacggttttaagttagtatttgtttggaagggggtttttggagttgggggtggtgttaaaagaataatttggttggtaagttagttaaaatattaaaaatatattaaaattattagggttatattatggaataattgtaaaatttatatggattttaaagtttgaaatatatgttttcgaaaataaattttgtttttagaggtagtttttgttattttttaggttatagatgttgttattttttttatttacgggggcgttcgagagtattttgtttgataagtttgggtgttgaataattgtagtcgttaatatgattagattttatttttaataggtttttttggttaaagtgaggcgaatgaattggggtagtaggggtagagaaagaaattttttgtgtttgtgtaaattaaagtagtattatgagtttgaagaatatgagtaagaaaaggtgaaatattaaggaggtaggtggtaaagtaattgttaattagattaaagggaagggaggaggaagaaaagtttagaatgatgttttgtttaatatatatatatatatatatatatatatatatatatatatatatatatatatatattttttgttttttttttaataatatgtattgttatttaataggatttttttatttatttgtttgtagatttttagaatgtaaattttacgagatcgaggatttttgcgtttttggttttttttttgtatattttggttagtatagagtaggtatttagagaatatttgttgaatgaatgaatgagtaatgttttggtttttagttttataaagagcggagaaggaagataaagtttggggaaaatgggttgatttgttttttgttgttatgaattatttagttggaaatatttattagatagttgaaaaagttattgagggttgggcgtagtggtttacgtttgtaattttagtattttgagaggttgaggcgggcggattatttgaggttaggagtttaagattagcgtggttaatatggtgaaattttgtttttattaaaaatataaaattagtcgggcgtggtggtttgtttttgtagttttagttatttaggaggttgaggcgggagaatcgtttgaatttggaaggcggaggttgtagtgagtcgtgattacgtttttgtagtataagttgggcgagaaagtaagattttttataaaaaaaaaatcgaaaagataaaaattaatttagtgaggatttagtagagagaattgaaatcggttgaattggtggtaaaagaatgagtttatttagagaaggtatgtagggtaagaagagaggtaagttaaggattattgggtattttaaaagttagaaaagtcgtttttaaaaaagatttaatagtgtatatttaattatatttttagttttgatttaatagtaattatttagtttaatatgagtaggaagttatattttttagttttgttgaaagtggttatttttttttttttgtttttagtttataattaaggaaggtttattgaatatttgtgttgaggtttattggatttattgagatataaaaaataaattataaaatttagtttttgtttttaaggagtttattttttaattgataaataaaattgtatatttttattgtgtataatatgatattttaaagtatagttattttttagtatttgtgggggattggttttagaatttttttagttattaaaattagattatgttttagttttttatataaaacggtgtagtatttgtatgtaatttaatatatattttttggtttattttaaattatttttagattttttatgttaatttaaataataaatagaaagaggttttttaaaaatatttatttggaaattgaattttgtaataggaatatgtatgttatagtaaattatgtgtgtatttagggaggtaaaataaaataaagatttttaaaggataaaaatgacgatggtataattgttttaaaataagtattttttgttgtaaagatgaataataagggtaataattttagtatttttttgtgtaagattgtaatggttattgtggaaggttgtggtttttatagttttttgtgatcgtgtgttgttgttgttgttgttgttgttgttgtttgtttgttttttggagatagggttttgttgtattgtttaggttggaatgtaatggtgcgattagggtttattatagtttcgaggtttaagtgatttttttattttagttttttgagtagttgagattataggcgtatgatattattggttaatttttagtttttgtagagaaggggtttaattatgttgtttaggttggttttaaatttttaggtttaagtgatttttttatttttgttttttaaagtgttgtgattataggtatgtatttttgtatttggtttttgtgattgtttttattagatatttaagttaagtatttgtttttatttgtttagttttaattggttgaattatattaaattgttaatattttattgtttttaatttttaaaaatggtagttttagatgtttaattttataaaatagaggtaatattattttagagttagggaaataggagtgtaggagagttagggtgatagtattttaaaattaattttattttataatgagaatatatagatatagggaggggaataatatatattagggttagtcggggggtgggggagtgaggggagggggagtattaggataaatatttaatatatatcgggtttaaaatttagatgatgggttaataggtgtagtaaattattatggtatattatattatggtataattatacgttgtgcgtttgtattttggaatttaaattagattaaaaaataaaaaaattagttttattttaagatgtttatagttgaggaaatagtttaataatatttggaaggataaatttttatgatagtagaatgtttagatgttttaatattgtataatgttaaatatttttaaggtaattatagttatgtttttacgtatttacgtatgaaaatgttaaggatatttttttttaaattaataaagtattaattttttttattttgttagtttattcgtacgtagatattgtttagtttattttttatagagataagatttttatcgaataaaaataaagaagaggtatttttttttttgttttttgagaatgttttattttgtaattgagtagtttttaataaaatgttattttttatggtattgggtgattcgttttatatttttttttgtgcgagatttaagaatttttttttaggatttggattaggatattttttttgggtaatatttagttttgtttatttgaaagtgtaattaaggtagtagtatgattgttattatataggtttggggagaaatgaaaatttttgttataatagttttggtattttatgataggtattttaaaggtattttatttttttgaagtttttgatattattaatttatttgtttttgaagatttttagagttgtttttattttgagatagttttatttattttatttatttattttatttatttatttatttatttatttatttgatatatttttagaggttttgagaagtttttttagttttaattttttatttatttgtttagtagtaggtaaaattgtttgtatagaagttaagagttttaaattttagtttaagagttttgtatattt

SEQ ID NO: 815 - DNA, 5312 bp, Artificial Sequence
  chemically treated genomic DNA (Homo sapiens)
gatatattttattttgtttgttagtatttgtttttaatagattagtttttaaaattttgataatatgttaggtagattttttgttaatttgttttgagaatgtaagaatgttgttagaagagatagaaggaattatgaattttagtttagaggttttattataggtttttggtaaagtgggatttagtgtattttgattgtttggtatagtattgttttaaaaattagaatttttttatattttgtagtttagatagtatatataaatgtagaagtttaggttttgtcgggattgagtttttgtgtggtgataattggttataattttttttttttgaatatttgtagttttttttatttttgttgtttttgattttcgtttatagatttatttttttcgttggtgtgatttttgtggttattatggtagttattttggagagtcgttagtttagtttttttcgtttttcgtagagttttatttttgtttttgaagaagttatttggggtttggttttttttttggttttttagagtttttgtaatagtaggtattattttttttttttgtatttaattttttttttattttattgttttttagtgtgttaaaatacgaagatgtgttttgatttttaaaattttttttttgaagtttttatttgatatgtagttggagatgggtaaatatagcgtttttgaagtattattttatttatagtgtttggaatgtagtaggatttcgataattgttgttttaataaaggaatgattaaatatattaatattgtaaaaagtaaagtagaggtttttttttaaagagatttttttttttatttaattaagaataagtcgtaattttttttagaagtaaaatttatttaaagatcggtgttgatattttgaaatatttgttagttgtaataaagaaattaatgtattttatgtttttaatttttataatttagtttaaatatttgttttggtatgtttatattgatttaaataagtatgaggttatagtttgttttttttttttatttgaaggtgtttttattttatttagtattttataagtgagttttttttttttttgtttttttttgtttttgttttttttaaaaagttttaagttgttagttaattaggataaatatagaatgtgaggtttcgttttagttagtggaaattggatatagtagtagggtggatatattaagttataaatgatttttttttttttgtttagtgtattttcgtggtaaaattgttggcgagtgtattttttttgtagaaagtaaaaatggtttttgttgtaggaagttagggatttcgaacggagggatcggttggagttgtagtagaggaatataaattgtaaatattttattttaatatggatatttattagtttttaaattaatatttttataattttttatgtttgttttattttaattttttaattttgttatttttttaagttgaggatataggttattttaggattattgtgataattgtgttaattgtataaattgattgtaaaatatgtgtgtttgaataatatgaaattagtgtattttgaaaaagaatagaataatagcgatttttagggaataagagaagataattataaggtttgattgttcgtagggtcgggtaaaatagagttatgtttttttttttgtagagagtttataaatggatatgtaagtagggaagatattgttaaattttttttttagtagggaatattaatattaatattttgggaaaggaatgtatttttggggggaggtttataaatagtcgttttgggaatgaatgattgttttatgtagttgagataaggattgaaatatatttcggttttttgtagtatttttaggtggggaaaaaatttggttttggtaaatttgtggttagattggttttttgtttttgaattttgtgttttgttgtttaagatgtttattaagataatatgtgtattattgaatatagatttttattaggagttttatttttgtttttgttttgtttttttagaagtatgtgatttttgttttgttttttgttttttaaagtatgtgattttcgtatttattttttgttcgtatattattattttttttgtaatttttaataaaaatttgttggttttgaggttcgggtaggtattatggttttatcgatatgtgatgttatttttggcggtttagttgtaaaatttttttttttgtattttttttttttattttttagttggttgatatttatggaaaatagaaagaatttacgttgaaatattgggggtaggttttttaatagttttgttgaggaaattaaatttatgtttaagtgttatttttttatggtattaaggaataagtattttaaataatattaatgtaatagtattggttttatgtgttttaaaattattatttttatgagtgttagtttttttaaaaaatcgtttttttttttaattggatttagatattttattttttatagtttaagacggattaatttagaattataaatttttaatgtataatgagaaatataatgttttttagggttaggtatttgtgtttgtgttggtgttattgttttaatgtaggaaaatttatgtaagagtttattgtgaggttaaaattgttttttaaatatggatatttgttaggtatttgagttgggagtattgtttaggtttggatgggcggggagtgtttgtaataaggattgtgttttgttagttttagtgatatagtgtttaagtgttttaatttagtagttatttgttgattatttgatttttgtggtttaatagggatgtgatgaagtttatttgtttatttaattttaaattatatattatttaggtggtttgaaatttttttgatatattgggtttattttttggagttttaataatgttttagttaatttataaaaaataaaataaaataaaataaaataaaataaaataaaaaaattattttttttgtagtataatagtttggtttatattgtaaaatgattttttattaaaggtttattatttatttttatatgtttattattatttgtaatattttttaaagtagttaattttaggttaatttattgtataatttttttgaaagttttttttttattttgaaagaagaaagttggtaggttggatattgttttcgtggaggttgtattatgggttatatattacggtgtgattttaaaggttattggagttatcgttttatattgaagaatatatatgggttaggagttaggtttaggttcggaatggtggatttggagaggggagggtttttgtttgtggttttgtggggagtttttaggtttttttttggttattattttttgatttttttttttagtaggatagggttttggtttttttgagggataggttttgtggtaggttaggcgttattaatataggtttttataataattgttttagtattgattgagtggtgaagttaaatattaaaagttgaaaaaagttagtatttttatatagaggttggatgtaataaaagtttattaagagttttgtttaggttttttttgggttttaaagtatgataaaataatgaaggaatttttaataggatttatttagaattaaataagttttattgtgagtttgaagaaattttttaggtttttataaataagtttattgggcgtttgaaggaattttttaaattttcgtgatttagtaggagataagataagggtaattatttttcgtatttggatttatttagattaaataaatagattgaggttttagaataaggtttttaggatttagattttagttatagattaaagaagttaattatttatgtttttagatgaatgtatatttatttgtagatatatattttagaaggtatatatgttttggaaaattttgtaatattgagttggtttggtggtaatttttaggttttttttttgttatcggttgtagaaataaaatttttttttttttttatttgatttgtatttcgttattgggtttagagaaatagtagtcggatttttagtttggttcgggaagtttttttattttttttcgtttgttttttgtggttattgtatttattgttgttgttgttgtttcggtttttgtgaggtttatttagtggattggttggatatttttagggggtattttagatattttattaatttgttggatttgatttttggatttcgatttataaattgtgttaaaatacgaagtggttaatttatatagtatttagttagatgatcgaaggatttagtattcgagggtttttaatagaaaatatagattatattttttttattttggttttttttttgggggttttttttatattattgatattgtttttgtgtaggcggggttagaggggagattaagttttgggagtagttttcggattagaggaagttttgtttttatagtgataggggttgaattaaatttttaggttggggttattattttttagtttgatttttgtagtcggagttttttagagtttttgggaattcggtagcggagagaaggttgagggatatcgcgggtagggaggagaagggagaagagttttgtttcgttaggatttggttggtgttttaagcgtatagttaagtcgttgtggatttagtaagggttggatggattcgtggagttttagggttgggtagggaagttggcgaggtcgagtttcgttttgggtttttgggcgttttgatttcgttttcggaattttcgggtttgggaggcgggaggaagttttattgagtgtagttttaggcgttttttttcgggtttttagaatggcgtttttcgggttgtggcgggtcgaggggcggggtcgtagtaaggtttcgtttgtttttttttcggagtttttatattttgagttttgttcggtttaggtttgtttgcggaattcgtattaattagtattatgtttatgatattggggtattgggatattcgcggggtgagcgagggttcgttggacggtgggacgagggcgtaggggagggaagtgcgaagtagttgcgggacggattttagggatcgtttttttttagggttgttcgttttagaagggtttgtgtatgtcgttgtgtgtgtgttgggggtgtgggcgggtagaggaggtaacgggtacgtgtagtgtaaattgggggtttttttggtgtagataaagttagggattttttatttttgacgcgatttgcgggttattttttttagt

SEQ ID NO: 816 - DNA, 5312 bp, Artificial Sequence
  chemically treated genomic DNA (Homo sapiens)
gttgggagagatggttcgtaggtcgcgttagagatggagggtttttgattttgtttgtattagggaagtttttagtttatattgtacgtattcgttgttttttttattcgtttatatttttaatatatatatagcggtatgtataggtttttttgaggcgggtagttttgaagaggaacggtttttagagttcgtttcgtagttgtttcgtattttttttttttgcgttttcgttttatcgtttagcggattttcgtttatttcgcggatgttttagtattttagtattatgggtatggtgttggttggtgcggatttcgtagataggtttaaatcgagtagggtttagagtataagagtttcggagaggggataggcggggttttgttgcgatttcgtttttcggttcgttataattcgaaaggcgttattttggaggttcgggagagggcgtttggggttgtatttagtaagattttttttcgttttttaggttcgagggtttcgggagcgaagttagggcgtttagaagtttaaggcggggttcggtttcgttagtttttttatttagttttgaggttttacgagtttatttagtttttgttaggtttatagcgatttggttgtgcgtttgagatattagttagattttaacggagtaaagtttttttttttttttttttttgttcgcggtgttttttagtttttttttcgttgtcgagtttttaagggttttgggagatttcggttgtaggggttagattaaaaagtggtggttttaatttgggaatttaatttagtttttgttattgtaagagtaggattttttttgattcgaaagttatttttagggtttagttttttttttagtttcgtttatataggaatagtgttagtggtataggaaggatttttaggaaaagggttagagtaaaggaaatgtggtttgtgttttttgttaggggttttcgggtattgagtttttcggttatttggttaagtattgtgtaaattagttatttcgtattttggtataatttatgaatcgaaatttaaggattagatttagtaagttggtgaggtatttgaggtgttttttagaaatgtttagttagtttattaggtgaattttatagagatcggaatagtaatagtaatagtgagtgtagtggttatagagagtaggcgagggaggatggaagaatttttcggattaaattgagggttcggttgttatttttttaggtttaataacgagatgtagattaaatggggaggaagagaggttttatttttgtaatcggtaatagggagaaggtttagaaattattattagattaatttaatattataaagttttttagagtatatatattttttaaggtatatgtttataagtaagtgtgtatttatttaaagatataagtgattaatttttttaatttgtaattgaggtttgggttttgaggattttattttggagttttagtttatttatttaatttaaatgggtttaggtgcgggggatgattatttttattttgttttttgttaaattacggaggtttggggagtttttttagacgtttaataaatttgtttgtggaggtttggggagtttttttagatttataataaaatttgtttaattttaaataggttttgttaagaatttttttattgttttgttatgttttaaggtttaggaaaggtttaagtaaaatttttggtgggtttttgttatatttagtttttgtataaaggtattggttttttttagtttttaatatttaattttattatttagttagtattgaaatagttgttatggaggtttgtgttagtgacgtttggtttgttatagaatttgttttttagagaagttagaattttgttttgttgaggagggaggttagaggatggtggttagagaggagtttgagggttttttataggattataggtagggatttttttttttttagatttattatttcggatttggatttggtttttgatttatgtgtgttttttagtatgagacggtggttttagtggtttttgaagttatatcgtgatatgtgatttatggtataatttttacgagaataatgtttaatttgttaattttttttttttaaggtagaaggaagatttttaaaagagttgtgtaatggattagtttggggttgattgttttaaaggatattgtaaataataatggatatatggaaatagatgatagatttttaatgagaaattattttgtaatgtaaattaggttgttgtgttgtaaaaaaagtagtttttttgttttgttttgttttgttttgttttgttttgttttttgtaaattagttaaaatattgttaggattttagaggatgaatttagtatattaaaaaagttttaaattatttggataatgtgtggtttggggttgagtaaataggtagattttattatatttttattaggttatagaaattaggtggttagtaggtggttgttaagttggggtatttggatattgtgttattgaggttggtaaggtatagtttttgttgtaaatatttttcgtttatttagatttgggtagtatttttagtttagatatttggtaggtatttatgtttaggaagtagttttggttttatagtgaatttttatatagatttttttgtattgaggtaatagtattagtatagatataagtgtttggttttaggaaatattatattttttattatgtattaagagtttatgattttgagttaattcgttttgagttgtgaaagataagatgtttagatttaattgaaaaaaaaaacgattttttaagaaagttaatatttatgagaataataattttgaaatatatagaattagtattgttatattagtattgtttgaaatatttgttttttggtgttataaagaaatagtatttgaatataaatttaatttttttagtaaggttattggggaatttgtttttaatattttaacgtaggttttttttattttttataagtgttagttagttgagaaataaagagaaagagtataaagagaagaattttatagttgggtcgttaggggtgatattatatatcggtaggattatgatgtttgttcgagttttaaaattagtaagtttttattaaggattgtaaaaggggtggtggtgtacgaatagagggtaggtacgaagattatatgttttaaagggtaaaaagtagaataaagattatatgtttttgaggaaataggataaaggtaaaagtagaatttttgataagggtttatgtttagtggtgtatatattgttttgataaatattttaaataatagaatatagggtttaagagtagagaattagtttgattataaatttgttagggttaggttttttttttatttgagggtattgtaggagatcggggtgtattttagtttttattttaattgtataggatagttatttatttttaaagcggttgtttatagatttttttttaggaatgtattttttttttagagtattaatattaatattttttgttaggaaaagaatttagtaatattttttttatttgtatgtttatttataggttttttgtaagaagaaaaatatggttttattttgttcgattttgcggatagttagattttatggttgtttttttttgttttttaaaaatcgttgttattttgtttttttttaaggtgtattgattttatattgtttaaatatatatgttttataattaatttgtatagttaatataattattatagtggttttgaggtgatttatatttttagtttaagaagataataggattaagagattaaagtaaggtaggtataagaaattataaaagtattaatttgggaattgataaatgtttatattaaaatgaaatatttgtaatttatgtttttttgttgtagttttagtcggttttttcgttcggggtttttgattttttgtaataaaggttatttttattttttgtagaaagggtatattcgttagtagttttattacgagagtatattgaataaaggagaaagggttatttataatttgatgtgtttattttattgttgtgtttagtttttattggttggaacgggattttatattttgtatttgttttgattggttagtaatttagaattttttaaaagaggtagaggtagaggagaataaaggaagggggaatttatttgtggaatgttgagtaaggtaaaaatatttttaaataaggaagaggaataggttatgattttatgtttgtttggattagtataagtatgttagggtaagtatttaggttaaattgtgggagttaagaatataaagtatattaatttttttattatagttagtagatattttagaatattagtatcggtttttgaataaattttgtttttaagagaagttacgatttatttttaattagatggggagaaaagtttttttgaagaggaatttttattttattttttatagtattaatatatttggttatttttttattgaaataataattgtcgagattttattatattttaggtattatgaataaaatgatgttttaaggacgttgtatttgtttatttttaattatatattaggtgggaattttaggggagagattttgaaaattaggatatattttcgtgttttggtatattgagaggtagtggagtgggagaggggttgagtgtaggagagagaagtagtgtttgttgttgtaaggattttgaggagttaggaagaaggttaggttttaggtggtttttttagaagtaggagtagagttttgcggaaggcgggaaggattggattagcggttttttaaagtagttgttatagtggttataaggattatattagcggggaaagtgggtttgtggacggggattaggagtagtagggatgagggaagttgtaagtgtttagaaggaaggggttgtagttagttgttattatatagaaatttagtttcgatagggtttggatttttgtatttgtatgtgttgtttgaattgtaaaatgtggaaaagttttaatttttaaaataatgttgtgttagatagttaaaatgtattgggttttattttattaagggtttgtaatgggatttttggattggaatttataattttttttgttttttttgataatatttttatatttttaaggtaaattaatagaaaatttatttaatatgttgttagaattttaaaaattaatttattagaaataaatattgatagataaaataaaatgtatt

SEQ ID NO: 817 - DNA, 5326 bp, Artificial Sequence
  chemically treated genomic DNA (Homo sapiens)
aagtgttgagtaaaaggatttagataggagaaaggatatacgattttattttatttatacgaaatttaggagagggaaatgagtttatggtattagaggttagatgattggtgattttggtgagaattggaaggttgtttattgaaggtttttggtgtagtgttgtaagttttttttttttatttgggaggtgattttagaagagtatttaagtggaaaagtttatagagtagtatatttaaggtttatgtattgtatgtattatattttaatgaaaagtatgtttggttaggtgcggtggtttacgtttataattttagtattttgggaggtcgaggcgtgtggattatgaggttgggggtttgagattagtttgattaatatggtgaaatttcgtttttattaaaaatataaaaattagttaggcgtggtggtagcgtttgtaattttagttatttaggaggttgaggtaggagaattgtttgaatttaggaggtagaggttgtagtgagttgagattacgttattgtatattttagtttgggcgatagagtaagatttcgttttaaaaagaaaaaaaaaaagtatgtattaaggtttgtgtattgtatgtgtattatattttaatgaaaagtatgtttatatgttttatattatttgtgtgtttgtgttggtttgtttttttttataagatgttaacgtttttaggatatgtgtttttgtttttttttgttcgttgatgtaataggtgtttgtatattatttaggatagtttttgagtatagtaggtgtttattgaatagttattaggtaaattataggttttattttaatggtgttattttaaattttttttagatttttatttatgtttatttttttggataggtgagattgatgggtatatatatttttaggttttgtagttttttttttttaatattttatttaagaatttgtatatgttggtagtttatatgtatgtttatttttagtatttaatggttattattattttttgtggataaattatagtttgtttagttatttttattttattgggtatgtggattttttttatttatttatttttagaatagagtgattatgtttaaattaattttttttttggtttttgggtattttatttgagttggtttttaaaggtaattattataaggtaaaaggtgagaatggtgttatggtattattatagataaattgttttttagagagaatagtttttttttttttttttttttttttttttttttttttgatgtggagttttattttgttatttaggttggagtgtagtggcgcgattttagtttattgtaattttcgttttttgagttttagtaatttttttgtttttgttttttgagtagttggaattacgggcgtgtgttattattttcggttaatttttgtatttttagtagagatggggttttattatattggttaggttggtttcgaatttttgattttacgtgatttgtttgttttagttttttaaagtgttaggattataggtttgagttatcgcgtttagtttagagagaataatttaatttatggtgatatttgtaagttatatggatttttttgtattattttaggtatttgagggattgtagttttattttataatatttttataggtttatagaatatttttaagttttttatttttattttttttgtttatagtgtgtgtatgtttttgttaatgaattatagtttatgaatttattcgtttttgaattttttgtataaaattttttgtttatttattttttatttgtggtttagttaatttttggagaaaggttaaagaatgattttgtggtagttaagattttttttttaataggtataatgtaattaattatgattttgttttaggttttttgtggtataatgtgatggttaattttttgtattaatttgattgggttaagggatgtttagatggtaggtaaaattattgtgtttgtgagggtgtttttagaagagatttgtttttgaattagaagatagtaaagattttttttagtaatgaaggaggtatttattaaattgttagggtttagagagaagaaaaagataggaagggtgaatttgatttttttgattgggatatttatttttgtttattttgggatttttatatttttggttttttggtttttagatttgattagggattaatattatcgttttttatttttatttttgttttgaggtttttagtttttgaatgatattattggtttttttgtttttttattttgtagtcggtagattatgggatttttttattttaaaattgtgtgagttaatttttataatagatagataaatttataaataaatatataaattttttatagttttattttagtggtgttattttaaattttgaagaattttgatttagtatatatagtaaaaaataataacgataataataataaataaaaatatatatatatataaaaatttattattaataagttttaaaaaattaaatataagataaaacgttgtagtatatttattatttgggggtttttttatatggaaagtattttttgagatgttttgtagtaaattttaaggagattttgagggaagatattttttttttttttggtaaatttttttgttgatgattattattttaaagattttaaagatgaaaatatttgtttgtatattttgtcgatttattttgggtgagggtttttggtaggtttggaagggtgggtgaatagtggaagggggttgtttttggtgattagtattatttatatttatgtttgtggtagttattaggtgtttattatatattcgatttttggttatttttaatgggggtgttaaatgtaggaagagtttagttaagttattgtaaattggtattgatttttgggatttttttatatacgatagttaggtagatattttttttttaaatttgatttgttattatttttttttgagatagggttttattttgttatttaggttggagtgtagtggtgtgattacggtttattgtagtttcgattttttaggttttaatgatttttttattttagttttttaagtagttgggattataggtaaagggttattatggttagttaattttcgtatatttggtagataatgttttattatgttttttaggttgggtggatattttttaaaaataagtttagtttattttgtttagttttgttttagtagttttagaggaattatttattttggtgttgggtttaggttgtttgtttttggaataatgtgtttagagttgtagggtaggtttgttgtttgattggtagagagagttttatattttttattttgtattttgaaagattaaggttgtttagtttgtttatttggtagattatttttttgtttaatttttttttttttatttttgatgtgtagtttgatgtttgtagggattgtgttagttgagattgtttttaggtttttttttttgttagttggtgtttagggaagtgggttttttggtttgttttttgttattagaattttgaggattttgttttttttattgtaatttttgatttatttttgggttttttttttttttttttgagacggagttttattttgtcgtttaggttggagtgtagtggtgtaattttagtttattataatttttatttttttggtttaagcgatttttttgttttagttttttgagtagttgggattataggtattcgttattaggtttggttaatttttttgtatttttagtatagtcgggattttattacgttggttgggttttagattagggtttttttattttagtagtattgttattttggagggtaaaattatttgttgtggggtattgttttgagtattgtagggtgtttagtattttacgtaaattttatttattagatgttatgggcgttttttagtggtgataattaataaagtttttagatagatttatatgttttttgaggggtaaagttatttttatttgaagattagtggtgtgttggatggatattaatattaaaataataataataataataatagaaattataatataatttatgtagttaaggtaagttttttttgatggaatatttattttagttaataatatttgtgtatgtttgttttggtagttttttttttttaattttttattttgatttaatatgagagtttgagaaatttataaaacgaatgaatataaagatttttgattattttagattttaacgtttttatatgggtttttttttttttttttaagtttattagtttttgttttttatttttttgtttttttttttatttagtaagttttttaggagtatagtattatttatgataaaaatattatttttttttttttgaggcggtatttttgacgtttggatttaggttgataagtgatagtgagttataattatttttgtttgtgttgttttttttacgttaggtttgttatgttacgtatgttcgtagtttataataatttttattatatattgaaaagttttgaaaatttatttagtgaatttttgagtattaaatgtttttttgtgttatttttttttattaggttattattattttatttagaatttttttgttttagagagagttttttttttttgtttaatttagagtgtagcggcgcgattatagtttagtttagttttgaatttttggatttaattagttttttttcgttttgggtttttgggcgttttgattttttttttgaaatttacggggttgggaggtgggaggagattttatttttagttttatgagcgcgttttaggtttttagattggttcgtttcgggggtagggcgggtcgtggggcggggtcgtagtaaggttttttttttattttttttgggttttttataaacgttgagtttcgtttcgttgaggtttgtttgtagaatttatagtaattagtattatgtttatgatattggggtattggaatattcgcggggtgagttagggttcgttgggcggtgggacgggggtgcgtgggggcggggaagtgtggagtagttgtaggacgggttttagggacggtttttttttagggttgtttttgatagcggggtttgtgtttgtcgttgtttgtgcgtgtggttgggcgtgcggggtgggggcgggtgaggtaggaacgagaggaggagatggggttttttttgtgtagagtcgttataaagttagggattttttatttttgattcgagttgtgggttattttttttagt

SEQ ID NO: 818 - DNA, 5326 bp, Artificial Sequence
  chemically treated genomic DNA (Homo sapiens)
gttgggagagatggtttatagttcgggttagagatggagggtttttgattttgtgacgattttgtataaggggagttttatttttttttttcgtttttgttttattcgtttttatttcgtacgtttagttatacgtatagatagcggtaagtatagatttcgttgttagggatagttttgaagaggaatcgtttttagagttcgttttgtagttgttttatattttttcgtttttacgtattttcgttttatcgtttagcggattttggtttatttcgcggatgttttagtattttagtgttatgggtatggtgttggttgttgtggattttgtagataggttttagcggggcggggtttagcgtttgtgagaggtttagagagggtagaggggaagttttgttgcgatttcgttttacggttcgttttgttttcgaaacgggttaatttggaggtttggagcgcgtttatggggttaggagtaggatttttttttattttttagtttcgtgggttttaggagagagattaggacgtttagaagtttagggcgggggagaattggttgagtttaggggtttaagattgaattgagttatgatcgcgtcgttgtattttaggttaggtaagaaagaaaggttttttttaaaatagagagattttgaataaagtaataatagtttaataaagaaaaataatataaaagaatatttggtgtttagggatttattggataagtttttaaaattttttaatgtatgatagagattgttataaattgcggatatacgtggtatgatagatttaacgtgggaaggataatataggtaaggatgattataatttattgttatttattagtttaaatttaaacgttaggaatatcgttttagagaaaagaaaatgatgtttttgttataagtggtgttgtgtttttagggagtttgttgggtgggaagagagatagaaaggtggggagtaggggttggtggatttggggagggaggagaaagtttatgtggaaacgttagaatttggggtaattagaggtttttgtatttattcgttttgtaaattttttaaatttttatgttaaattaaaataaaaagttaaaaaaaaaaaattattaggatagatatatataaatattattaattgaaataaatgttttattaaaaaggatttattttaattatatgagttatattatgatttttattattattattattattattttaatattagtatttatttagtatattattggtttttaagtggaggtaattttgttttttaggggatatgtaggtttgtttggagattttgttaattgttattattgggaagcgtttatggtatttagtgggtagagtttgcgtaggatgttgaatattttgtaatgtttaggatagtgttttataataaatgattttgttttttaaaatgatagtattgttgaggtgaagaaattttagtttaaaatttagttaacgtggtgaaatttcgattgtattaaaaatgtaaaaaaattagttaggtttggtggcgggtgtttgtaattttagttatttaggaagttgaggtaggagaatcgtttgaattagggaggtggaggttgtagtgagttgaggttgtattattgtattttagtttgagcgatagagtaagatttcgttttaaaaaaaagaaaaagaaatttaggaatgggttaaaagttgtagtgggagaaataaggtttttaaaattttggtggtaggaagtaggttaaaggatttatttttttggatattagttggtagaagggaggatttagagataattttagttggtatagtttttgtaggtattaagttgtatattaggaatgagagaaggagaattgggtagggaaatggtttattaggtggataggttgggtagttttgattttttagggtatagggtagggagtatgggattttttttgttagttagatagtaggtttattttgtagttttgagtatattattttagagataggtagtttgagtttagtattagagtgggtaatttttttagagttgttggggtaaggttaggtaggatgaattgaatttatttttgaaaagtatttatttagtttgggaagtatggtgaaatattgtttattaaatatacgaaaattagttggttatggtggttttttatttgtggttttagttatttgagaggttgaggtgggaggattattggagtttgagaagtcgaggttgtaatgagtcgtgattatattattgtattttagtttgggtgatagaatgagattttgttttaaaaaaaagtaataataagttaaatttaaaaagaaggtatttatttgattatcgtgtgtagaaaggttttaaaagttaatgttaatttgtaatgatttgattggattttttttgtatttaatatttttattaggggtggttaaaagtcgaatatataataagtatttgatgattgttatagatatggatatgagtgatgttagttattagaggtagtttttttttattgtttatttatttttttaagtttgttagagatttttatttaaaatgaatcgataaaatgtgtaagtagatgtttttatttttggagtttttaaaataatgattattaatagggagatttattaggagaaaagagaatatttttttttaaaatttttttggagtttattgtaaggtattttagaaagtgttttttatatagaaaagtttttaggtaatagatatgttgtagcgttttattttgtgtttgattttttaaaatttattgatgatgagtttttgtgtgtgtgtgtgtttttgtttgttgttgttgtcgttgttgttttttgttatgtgtattaggttagggttttttaaaatttgaagtgatattattaagataaggttgtaggaaatttgtgtgtttatttataaatttatttatttgttatgggaattggtttatataattttggagtgaagaagttttatgatttgtcgattgtaggatagagaagtaggaaagttagtggtattatttagaggttaaaggttttagaataaaggtgggggtgggaggcgatggtgttagtttttgattaagtttgaaggttagagaattaggagtgtggaggttttaggataggtagagatggatgttttagttagagaggttaaatttattttttttgttttttttttttttttgggttttgatagtttggtggatgttttttttattgttgaaggaaatttttgttgttttttgatttaaaggtaaattttttttggaaatatttttataagtataatgattttatttgttatttgagtattttttagtttagttaagttgatgtagaaaattgattattatattatgttataggaaatttagaatagaattataattaattatattgtgtttattagagagaaggttttgattgttataagattattttttaatttttttttaggagttgattaagttataggtagagaatgggtaaatagagagttttatataggagatttaaggacgggtagatttatagattgtgatttattggtagaaatatgtatatattataaataaaaaaggtgaaggtagaaaatttgaaggtattttataaatttataaaaatattataagatgaaattgtaattttttaagtatttaaggtagtgtagaaagatttatgtgatttgtaggtgttattatgaattaagttattttttttgggttgggcgcgatggtttaagtttgtaattttagtattttgggaggttgaggtaggtaaattacgtgaggttaggagttcgagattagtttggttaatatggtgaaattttatttttattaaaaatataaaaattagtcgagggtggtggtatacgttcgtaattttagttatttaggaggtagaggtaagaaaattgttggaatttaggaggcggaggttgtagtgagttgagatcgcgttattgtattttagtttgggtgatagagtaagattttatattaaaaaaaaaaaaaaaaaaaaaaaaaaaaaaaaaaaagttattttttttagagagtaatttatttatgataatattataatattatttttattttttgttttgtagtaattgtttttggggattaatttaaataaagtatttaaaaattagagaaggaattagtttaaatatgattattttgttttaaaaataaataaatgagaaaaatttatatgtttaatagggtaagaatgattaagtaaattataatttatttataggaagtaatgatagttattaaatgttagaaataggtatgtatatagattgttaatatgtatagatttttaggtaaaatgttaaagagaaaaaattgtagaatttaagagtgtatgtgtttattaattttatttatttaaagaagtaggtataaataaaaatttaaagggaatttgaaatgatattattaagatagagtttataatttgtttaataattatttagtgagtatttgttatgtttagggattgttttaggtgatatgtaaatatttgttatattagcgaataagaagagataaaaatatatgttttgaggacgttgatattttatgagggaaagtaaattaatataagtatataaataatgtaagatatatgagtatgttttttattgaagtgtaatatatatatagtgtataggttttaatgtatgttttttttttttttttttgagacggagttttgttttgtcgtttaggttggagtgtgtagtggcgtgattttagtttattgtaatttttgttttttgggtttaagtaatttttttgttttagttttttgagtagttgggattataggcgttgttattacgtttggttgatttttgtatttttagtagagacggggttttattatgttggttaggttggttttaaatttttaattttatgatttatacgtttcggttttttaaagtgttgggattatagacgtgagttatcgtatttggttaagtatgttttttattgaagtgtaatatatatagtgtataggttttaagtgtgttattttgtgggtttttttatttggatatttttttggaattattttttagataaagagagaaaatttatagtattgtattaggagtttttaataggtaattttttagtttttattaaggttattaattatttgatttttgatattatggatttattttttttttttgaatttcgtgtaagtggaatgagatcgtgtgtttttttttttgtttggatttttttatttaatattt

SEQ ID NO: 819 - DNA, 5297 bp, Artificial Sequence
  chemically treated genomic DNA (Homo sapiens)
ttgtgtagttttaggattgggaaagtattataaaggagggaaaggaataagagatataaagagaaaggaggttgggggtattattttaaatcgggagatgaagttttttaggtttgggaaggtatttaggtagttgggtttaaatatttggttttttttaaggatattataagcgatgaaatttataaaggtgatttggataaggttaaggatatgtgggttgaaatttttataatataggaagtatgataaatttgtggtgtttttattatacgtttttattattttgtttttaagaaattatggttgtttttttagaaattgtgagtagagttttagtattttagggagtgtttgtaggtattttggttttagttttttttgaggtagaaaatagttgttaatatttttagatataagttttttgtatagatgcggttttttagttttgtgtatggttttagttggtcgcgggtaagtagttattttttttatagttggaattgggttattgtttaggttttagttggatatattagtatttattagattttaattgggtagttggagtttttttgaggtgatgggatggtagagcggaatgtgatattgtttttaaatttgtttttattgattttttaataatttttgggttagttttaggagtatttgagtatttggtaggttttggattagatatgagtagaattaaggatgtaaagaattaaaggagtttagagaaagaagtagaaatttttttttagttgggtagtagaagaatataatggatattgagtggtttttggaaagatgaggagatatttagaggatgagtggaagaaaggagggggaaaaagagtttttggttgtttttaagttgtttgttaggaaaattcgttgattttagtgtatgttaagagagtattcggaagatattaaaattttaggtgttattatttttttgttttgtatttgttttttttatagtttgtgtatttttaaagtaggtagatgatataaattattgggagagatggtttaaagtataggttatgggttagagatggaagggattttggaagtaattattattgtttagagagtgaatttatattttggggagttaggattttataagtagattggtggggaattgatttagaggttttatttgatacgattttggggtttgagggttattttggtggtagtataggaaatagtttgaaggatgagtagtattaaagagtttaaatagaaaataggattcgtgtatttggtaggattattgttttggtttttgattaaaatgagaggtgaagttggttgggtttttgggttaggtgaggatttggagaatttttttgtttagttaaaggattgtaaatgtataaattagcgttttgtgtttagttaaaggtttgtaaacgtattaattagtattttgtaaaaatagattaattagtattttgtaaaacggattaattagtattttgtaaaatggattaattagttttttgtaaaatggattaatttgtatgtgggtggggttaaataagggattaaaaggaggttatttttttttttttttttaaagtggttaaagtatatgagtagatattttttaaaagaagatatttatgtagttaaaaaatatatgaaaaaatgtttattattattggttattagagaaatgtaaattaaaattataatgagttattattttatattagttagaatggtaattattaaaaagttaggaaacgaggtgttggagaggatgtggagaaataggaatatttttatatttttggtgggattgtaaattagtttaatattgtggaagttagtgtggcgattttttagggatttagaattagaaatattatttgatttagttattttattattgggtatatatttaaaggattataaattatgttgttataaagatatatgtatacgtatgtttattgcggtattatttataatagtaaagatttggaattaatttaaatgtttaataacgatagattggattaagaaaatatggtatatatatattatggaatattatttagttataaaaaatgatgagtttatgttttttgtagggatatggatgaaattggaaattattatttttagtaaattatcgtaaggataaaaaattaaatatcgtatgtttttatttataggtgggaattgaataatgagaatatatggatataggaaggggaatattatattttagggattgttgtggggtggggggaggggggagggatagtattaggagatatatttagtgttaaatgaggagttaatgggtgtagtatattaatatggtatatgtatatatatgtaataaatttgtacgttgtgtatttgtattttgaaatttaaagtgtaataataataaaatttaaaaaaaagaaagtaatgtaaaaattgtaaaaaaaaaaaaagaaaaagaaaagaaaatgggtataatatttattttttaaagttgttgtgaagtttaaattggaataaattagttaatatacgtaaatatttagatattgtttggtatatgataggtgtttaataaatgttaattttatattttaggtgaatttgtgattggttttttgtttttttgggaggagagatataggtattataaattttatttgtttatgtggtttgtatttttttttttttttgtttagtaaaatgtttttttaaaaagttttaattttgttttagttgaattgatgggtaaatgtgattttttatatttgagttaggggatttaggtttttagattgttttgagagttgtgttgtagaggtttggttagaatttttagagtagtttcggatttttttttttgttatttttttatatttaattagaattttatgtttttcgagttgattttgttgtaaatttgtgtttttttttatttgtatgggttttgtcgaaatttagaagtttagttttttttatgattataggggtttcgggtaggttttttgttttgttaaggttaaaatttttatttttttaaatttaattattgattttttatttttattttatttgattagttatatttgatatagttgattatttttttttttaaatatttttatatggtttttgggattttttgttttttttttatttttttggttatttttttttagatttttttgttggtttgtttttatttttttttaatttttatatgttgatatgttagagtattttaaatttttagattttatttttgttattcgtgtttttatggtgattttatttagtttttggttttaaatatagagtgattatttttgtatttgttgtttttttttttttggagttttttttgttttttgtaggtaggaagtgattcgagataagagagggagagaatttttttggttaggatagagggtgattttgagaaggttttaaggaagaagtgagtatttgagtacggttatttgaggaaggttaggttatggatattagggtgtaggtaggagtagagtaaatatgtttgtaaaaggaatagtaattattttgttttatatttatattagtttatggtggtttttatagtagagtggtttgattttttattttttttaggtttttgtttaaagattaatttttttatgaggttttttatgaatataatttttaaaaatataaattttttttttattgggatttttttagtttttattttgagattttttattttttttttcgattttatttttttttataggatgtgtattattatttgatttattagttatttattatatattagtttattttttttttattagaatgtaaattttttgagggtagggattttgtttgttgagtttagttttgtatttttagtatttaaaatagtgtttgtttataataggtatgttaaatattgttggatagatgaatgagtgaatgaaaaatggtagtatttttttttttttagtttattttatataaagaggtaagattaatttttttaaatgcgtgagtattaggaagtgggagggattggaggaggaaattataataaggaatttataaattatttaagtttataaaataaaggtaggaaatatttaagataagagattttttttggttaggatagaggttggttttgagaaggttttaaggaataggtagatattttagtaaggttgttgaggaaggataggttgtggaaattaggatgtaggtaggaggattatagagtaaatattttaaggtgggaaatgtaagtgtgtgtagaaggaatagtaagtattgttgggttgggttggtttatgaagttgtgacgggttgagggagagataggattggaaaagtacgttggggttaggttgtagaggtttttgattgatagagaggggagtttggtttgtggggaattttttgttttgtgtggttagaggttggtttgatttttcggttttgttttagtttttttattttttatttagtttcggttggttcggtaaaaacggcgcgaatttcgttttttttgggtaattagggtttttattgtttggttagtggtgtttttcgcgtttttattggtattattaatgaatgaagtttggtttttattcgcggggaagggaggagttttaatttcgggttttttgtttttttgtagtatttttgttcgggtttcgtttcggggtcgttaggttttgaattttaacgtcggtattagtcgcgtttgcgtacggttttgtggagtcgcggaggtaagggacggagaacggggcggaggcggagttagggcgttcgcgcgtgggtttcgtttttttatgtcgggtataaagtttttttcgtttatagtttttttagttttcgaaggttcggaagttcgttattatgtcgtgcgagtcgtttatggttttcgggtattgggatattcgtggggtgagtgtcgttttaacggtagagtcgttcggttaaagagattgacgcggagagggcgggtttttgggttcgcgatttttagtaggagtagttttacgcgggagttttttcgagttgtcgagttacggatgtcgatttttgtttagtttttgggatcgcgggttttgtggggaggggcggaggagattacgtcggagtcgggtttaggggtcgtttaattatcgtttcggtaggacgtagggattcggtagtttcgggtcggggaacgttagcgggcgggggttgggaatgggtgggagttgcgtagtcgttgaatcgttgttttttttagt

SEQ ID NO: 820 - DNA, 5297 bp, Artificial Sequence
  chemically treated genomic DNA (Homo sapiens)
gttggggaagatagcggtttagcgattgcgtagtttttatttatttttaattttcgttcgttaacgtttttcggttcggggttgtcgagtttttgcgttttgtcggggcggtggttaagcggtttttaggttcggtttcggcgtggtttttttcgtttttttttatagggttcgcgattttagaggttgggtaggggtcgatattcgtggttcggtagttcgaaaaggttttcgcgtagagttgtttttgttggagatcgcggatttagagattcgtttttttcgcgttagtttttttgatcgagcggttttatcgttgagacggtatttattttacgaatattttagtattcgagaattatagacgattcgtacgatatggtgacgggttttcgagttttcgaggattagggaaattgtgagcgggaggggttttatattcgatataagggggcggggtttacgcgcgggcgttttgatttcgttttcgtttcgtttttcgttttttgttttcgcggttttatagggtcgtgcgtaggcgcgattaatgtcggcgttggggtttagggtttggcgatttcgaggcgggattcgggtaggagtgttgtaggagagtaaaggattcgaggttgaggtttttttttttttcgcgggtgggagttagattttatttattaatggtgttagtgaagacgcgaaaagtattattagttaggtagtggggattttagttatttagggagagcgagattcgcgtcgtttttatcgagttagtcggggttggatgaaggataggaagattggggtaaggtcggagagttagattagtttttgattatatagagtagaagattttttatagattaagtttttttttttgttagttaaggatttttgtaatttgattttaacgtgtttttttagttttgttttttttttagttcgttataattttataagttagtttaatttaataatatttgttgttttttttatatatatttgtattttttattttggagtgtttgttttgtgatttttttatttgtattttaatttttatagtttatttttttttagtagttttgttgaaatgtttgtttattttttgaagtttttttagaattaatttttattttggttagaagaggttttttattttgaatgttttttatttttgttttatgggtttaagtaatttatggattttttattataatttttttttttaattttttttattttttaatgtttacgtatttagggaaattaattttgtttttttgtgtaggatggattggaggaggaaaggtattattattttttatttatttatttatttgtttaataatgtttaatatgtttgttatggataggtattgttttaggtgttggggatatagaattgaatttaatagataaaatttttgtttttaggaagtttatattttaatggggaagaaataaattaatatatagtaaatagttagtaagttaggtggtgatatatattttatggagagaaataaaatcgagaagagagatagggggttttagggtgggaattgggggagttttagtaggaaggggatttatgtttttaaaggttatgtttatagaaggttttatggagaagttaatttttaaataaagatttgaaggaggtgagagattaagttattttgttgtgggggttattatgggttgatataaatataaaatagaataattgttgttttttttataagtatgtttgttttgtttttgtttgtattttaatgtttatggtttagttttttttaagtagtcgtgtttaaatgtttattttttttttgaagtttttttagaattattttttattttggttagaagagtttttttttttttttatttcgaattattttttatttgtaggaggtagagagaattttaggaaaagggaaatagtaagtataggagtgattattttgtgtttgaaattagagattagatgagattattatgggagtacgagtagtagagatgaggtttaagggtttgaggtgttttggtatattaatatgtaaaggttagggaaaaatgagagtaaattagtaaaggagtttgaaaaggagtggttagggaggtaggaggaaaataaaaggttttagaagttatgtgaagatgtttaaagggagaagtgattaattatgttaagtgtggttgattaagtaagatgaagatggagaattaatggttgaatttaggaaagtaggggttttgattttgatagagtaagagatttgttcgaggtttttatagttatgggaagaattaagtttttgaatttcggtagggtttatgtaaatgaaaaggggtatagatttgtaatagggttaattcgggagatataggattttagttgaatgtggaggagtgatagaggaaggagttcggagttgttttgagggttttggttaggtttttgtagtatagtttttagggtagtttgagagtttagattttttagtttaggtgtgggaaattatatttgtttattagtttaattgaagtaaggttgggattttttaaaagggtattttgttaaatagaagaaaggaagagtataaattatatggataggtgaaatttataatgtttgtgtttttttttttaagaaagtaaaaggttagttataaatttatttgaggtataagattaatatttattgagtatttattatatgttaggtaatatttaagtgtttacgtatgttagttaatttattttaatttaagttttataataattttaggaagtaggtgttatgtttatttttttttttttttttttttttttttttgtagtttttgtattatttttttttttttaaattttattattattatattttaagttttagggtataggtgtataacgtgtaggtttgttatatatgtatatatgtgttatgttggtgtgttgtatttattaattttttatttaatattaggtatattttttaatgttattttttttttttttttttattttataatagtttttggagtgtgatgtttttttttttgtgtttatgtgtttttattgtttagtttttatttatgagtgagaatatgcggtgtttggttttttgtttttgcgatagtttgttgagaatgatggtttttagttttatttatgtttttataaaggatatgaatttattattttttatggttggatagtattttatggtgtatatgtgttatgtttttttaatttagtttatcgttgttggatatttgggttggttttaagtttttgttattgtgaatagtgtcgtaataaatatacgtgtgtatgtgtttttatagtagtatgatttataattttttgggtatatatttagtaatgggatggttgggttaaatggtatttttagttttagatttttgaggaatcgttatattgatttttataatgttgaattagtttatagttttattaaaagtgtaaaagtgtttttatttttttatattttttttagtatttcgttttttgattttttaatgattgttattttaattggtgtgagatggtaatttattgtggttttgatttgtatttttttgatggttagtgatggtgagtatttttttatgtgttttttggttgtataaatgtttttttttgagaagtgtttgtttatatgttttgattattttaggggggaaggggggggtggtttttttttaattttttatttggttttatttatatgtagattggtttattttatagagagttgattggtttattttatagagtgttgattggttcgttttatagagtgttgattggtttgtttttatagagtgttgattggtgcgtttataaatttttagttagatatagagcgttgatttgtgtatttataattttttagttaggtagaaaagttttttaagtttttatttgatttagaagtttagttagttttattttttattttgattaggagttaagatagtggttttgttaaatatacgggttttgttttttgtttgaattttttagtgttatttattttttaagttattttttatattgttattagagtgatttttaaattttaaagtcgtgttaaataaaatttttaaattaattttttattaatttatttatagaattttgattttttagggtatgaatttattttttagatagtaatggttatttttagaattttttttatttttgatttatgatttgtgttttgggttattttttttagtggtttatattatttgtttgttttaggaatatataaattatgaggaaaataagtgtaaaataaaggagtaatggtatttgaaattttggtgtttttcgagtgtttttttgatatatattgagattagcgaatttttttaatagatagtttaggggtagttagaggttttttttttttttttttttttttatttattttttgaatatttttttatttttttagaaattatttaatgtttattgtatttttttgttgtttaattaggaggaaatttttatttttttttttgagtttttttagttttttgtatttttgattttgtttatatttggtttagagtttattaggtgtttaggtgtttttggggttgatttagaggttgttgggaggttagtggggatagatttagggatagtgttatatttcgttttgttattttattattttagaaagattttagttatttagttggagtttaataaatgttgatgtatttagttgaagtttggatagtgatttagttttagttgtggggaagatgattgtttgttcgcggttagttggggttatgtataaaattgggaggtcgtatttgtgtagggagtttgtgtttgagggtgttgatagttgttttttgttttaggagaaattgaaattagaatatttgtaggtattttttgaaatgttgaagttttatttatagtttttggggaagtagttatggttttttggggataaggtaatgggggcgtgtgatggggatattatagatttgttatattttttatattatggaggttttagtttatatatttttggttttatttagattatttttgtggattttatcgtttatgatgtttttgagagaaattaagtatttgagtttagttgtttggatgtttttttaaatttgaaggattttatttttcgatttgaggtgatgtttttagttttttttttttttatgttttttattttttttttttttttgtgatgtttttttagttttggagttatataa

SEQ ID NO: 821 - DNA, 5649 bp, Artificial Sequence
  chemically treated genomic DNA (Homo sapiens)
cggtggtttatatttgtaattttagtattttgggaggttgaggtaggcggattataaggttaggagatcgagattattttggttaatatagtgaaatttcgtttttattaaaaatataaaaaattagtcgggtgtggtggcgggcgtttgtagttttagttattttggaggttgaggaaggagaatggcgtgaattcgggaggtggagtttgtagtgagttaagatcgtgttattgtattttagtttgggcgatagagttagattttattttaaaaaaaaaaaaagaaaaaagaaaatattttaagttttgaggattatatagtttttgttgtaattatttatttgggttattgtagtataaaaataaatatagataatatatatatgagtgagtatggttggggtttaataaaattttatttatataagtaggtgatgaattacggtttatagtgttttaatttttgatttagatggtgaattattatgagttttcgttgtttttttcggtagaaatatgggagaaattatagagagaaatagagattttaggaaaatagtaaaattaaataaataaagtgagacgtcgttttttttggaggttgtaggttgtgttgaatttgtgtgtgtttgggtgtatagggatgtgagtagatgcgcgtggagatgtgtgtgtgggtggagattgagcgtggttggaggtggttgtggtaggatgttagaaggaaggagtttgtatttagtttttttattagtattttttggagttgttgaggggatgttattgttgaatattgattttggtgtaggttaaatcgaagttagtttttgttattttttgttgggtgaggtattggggagaatagtgggattgaatggggcgggtttttttttttttatattttttttggaaatatttagtattagtatattagaatatggggagttattttttttagcgttgttttttaaggttcggaaggggaaattttgattttaagttttgtttgaagagcgatagtaaaggggagaggttggttgtggtttggtggtgtttattttttttttttgttttgaaattataggttggtatattattcgagagaatgattagtgttattaagggaagggtataagtttattggttttaggggagatattttaggggataggaatattttttgacgttgaatgagtgtagtatatagacggagaatatatataagagaaattatgaggatatgagagaaggtattggtaataggaagttataaaaagtaataaaaagaaagagtagatataaaaataataatcgaagaaagttaataatagatgggatgaattatacgaggtatgcgatttatggatgaagaggtgagtgatgagattagttggggaatttttttttaggaaagataaattagaagaaatataaatgatatcgaagtggttaggcgtagtggtttacgtttgtaattttagtattttgggagttcgaggtaggtggattatttgaggttaggagtttgagattagtttggttaatatgatgaaattttgtttttattaaaaatataaaaattagttaggtgtggtggtaggtatttgtgattttagttatttaggaggttgaggtaggagaattatttgaattaggaagtagagattgtagtgagttgagatggtgttagtgtattttagtttgggtagtagagtgatagtttgtttaaaaaaaaaaaaaggtagtaaagtgataggaggatagattagaagggttattttttagatagtgtaaggaagaaagaagaagaagaagaggaggaggaggaggaagaggaagaagacggagaagagggtattttagaagaaataatggagatatattttttaaaattgaagaaagatgattaattttagatcgaaggttaagaggtaaattagagagatagtttggtaagttaggaagagtattaaagttagataattagagtgaaattaaagaaaatttaaggtgataaaaatttaaaaagtttttttgtgattttagtttattggtgaaaatttaaaaaaaaaaaaaaaaaaaaaaggatagtttgggtaatatggtgaaattttatttttataaaaaatataaaaattagttgggtgtggtggtatatgtttgtagttttagttattcgagaggttaagtaaggtaggaggattatttggggttaagagttttagattagttgcggtaatatatatgttgtgggaagttaggtatttcgaacggagggattggttgaagttatggtagaagaatataaattgtgaagattttatggatatttattatttttttaattaatatttttgtgattttttatgtttgtttttaattttttaattttgttattttcgtaaattgaggatgtatgtcgttttaggattttgtgatgattgcgttaattgtataaattgtttgtagaggataattgttgtgtgtttgagtaatgtgaaatttgggtattttaagaataggataatagtaatttttagggaataagggagataattttaaagtttggttgtttgtgggttgggtaggatagagttatattttttttattatcgtaaataggtaagagaaatatcgttgaattttttttttagtaaggaatattaataattaatagttttgagaaaagaatgtatttttagggtcgggttattgaaatggtttttttgagagtgtttgtttttatttagaagtagaaagggatgaaatacgttttagttttttgtagtatttttagatttgataggattaggaaattttagtttggtaaattttagttagatcggttttttgtttttgaattttgatagtgcgtgttagtgggatttggaagtttattagtgattttagtttcgtcgtgattttttgttttgtgattttttgtcgtttttgaagtatgtgatttttgtgatttatattttgttcgtgtatttttttttttttgaaaattgttaataaaaattcgttggttttacggtttagggggtattacggaatttgcggatatgtgatgttttttttggatattcggttttaaaatgttttttttttgtattttttttttttattttttaggttagtcgatatttagggaaaataggaaaggatttacgtgaaatattgggggttgaatttttttcgataataagttttttaaaaaagatttttaaatgaaatttttttgttttttaatttttatttttgttttgggggtatatgtgaaggtttgttatataagtaaattcgtgttttcggtgtttgttgtatagaatattttattatttaggtattatgtcgagtatttaatagtttttttttttgtttttttttttttttttattttgtattttggagttaattatagtgtttgttgtttttttgtttgtgttataagtttttattatttagtttttatttataagtgagaatatttagtatttggatttttgtttttgtattagtttgttaaggataatagtttttagttttatttatgttttataaaagatatgatttagttttttttaatggttgtattaaatgaagttttaaagatataatataaatattaattttttttttattataaaaattttttgttgaatttgattatatttaaattaacgagttttgttttatgaaagattttttggataaatttgatagttgatggaataggagaagttgtttgttatgtttaaagttaataagagattaatatttagaataaatggagatttgtaaattaatagaaagtaggtagtaaagttaaagaaaatagtttaaggtatagttattaaaaggaacgtgattatgttttttgtagggatatgggtggagttggaagtcgttagttttagtaaatttatataggaatagaaaattagcgagatcgtatggttttatttataagtgggagttgaataatgagaatatatggttatatggcggcgattaatatatattggtgtttgttgagcggggtgttggggagggagagtattaggaagaatagttaagggatattgggtttaatatttgggtgatgggatgatttgtatagtaaattattatggcgtatatatttatgtaataaatttgtatattttttatatgtattttagaattttaaataaaagttggacggttaggcgtggtggtttacgtttgtaattttagtatttttgggaagtcgaggcgtgtagattatttaaggttaggagttcgagattagttcggttaatatggtgaaatttcgtttttattaaaaatataaaaattagttagatgtggtacgttatttataattttatttattcgggaggttgaagtagaattgtttgaattcgagagcggaggttgtagtgagtcgtcgagatcgcgttattgtattttagtttgggttatagcgtgagattacgttataaaataaaataaaataatataaaataaaataaaataaaataaaataaaataaaataaaataaaataaaataaaaaaataaaataaaataaaataaaataaaataaagtaatttttttttttttaagcggtttttattttttttttttgttttgtgaagcgggtgtgtaagtttcgggatcgtagcggttttagggaattttttttcgcgatgtttcggcgcgttagttcgttgcgtatatttcgttgcggttttttttttgttgtttgtttattttttaggtttcgttgggatttgggaaagagggaaaggttttttcggttagttgcgcggcgatttcggggattttagggcgtttttttgcggtcgacgttcggggtgtagcggtcgtcggggttggggtcggcgggagttcgcgggattttttagaagagcggtcggcgtcgtgatttagtattggggcggagcggggcgggattatttttataaggttcggaggtcgcgaggtttcgttggagtttcgtcgtcgtagttttcgttattagtgagtacgcgcggttcgcgttttcggggatggggtttagagtttttagtatggggttaattcgtagtattaggttcgggttttcggtaggtttttcgtttatttcgagattcgggacgggggtttaggggatttaggacgtttttagtgtcgttagcggtttttagggggttcggagcgtttcggggagggatgggatttcgggggcggggagggggggtagattgcgtttatcgcgttttggtattttttttcgggttttagtaaatttttttttgttcgttgtagtgtcgttttatatcgtggtttattttttagttcgaggtaggagtatgtgtttggtagggaagggaggtaggggttggggttgtagtttatagtttttcgtttattcggagagattcgaatttttttattttttcgtcgtgtggtttttatttcgggttttttttttgtttttcgtttttttcgttatgtttgtttttcgttttagtgttgtgtgaaattttcggaggaatttgtttttttgttttttttttgtatttttgattttttttcgggttgttgcgaggcggagtcggttcggtttttatatttcgtattttttttttttcgtagt

SEQ ID NO: 822 - DNA, 5649 bp, Artificial Sequence
  chemically treated genomic DNA (Homo sapiens)
gttgcggggagggagaagtacgagatgtggggatcgggtcgatttcgtttcgtagtaattcggggaggggttaggagtgtagggagggaatagggaaataggttttttcgaagattttatataatattggggcggggagtaggtatggcgggagaggcggggaataggaaggaggttcggggtaaaagttatacgacggagggataagggggttcggattttttcgggtgggcgaggggttgtgggttgtagttttagtttttgttttttttttttgttagatatatgtttttatttcgaattgggaaatagattacggtgtagggcggtattgtagcgaataaagaaaagtttgttggagttcgggggaggatgttaaggcgcggtgagcgtagtttgtttttttttttcgttttcggggttttattttttttcgaggcgtttcgggttttttgaaagtcgttaacggtattggggacgttttgggttttttaggttttcgtttcgggtttcgaggtgggcgaggagtttgtcgggagttcgggtttgatgttgcgggttggttttatgttgggagttttgagttttattttcggggacgcgggtcgcgcgtatttattggtggcgaagattgcggcggcgaaattttagcgaagtttcgcggttttcgagttttataagggtggtttcgtttcgtttcgttttagtgttgagttacggcgtcggtcgtttttttggagggtttcgcggattttcgtcggttttagtttcggcggtcgttgtatttcgggcgtcggtcgtagaggggcgttttggagttttcggagtcgtcgcgtagttggtcggggaagttttttttttttttttaggttttagcggggtttagggagtaaatagatagtaggaagaggatcgtagcgaagtgtgcgtagcgaattggcgcgtcgggatatcgcggggggaaattttttaagatcgttgcgatttcggagtttgtatattcgttttatagggtaggggagaggggtggaggtcgtttagaggaaaggaaattgttttattttattttattttattttattttatttttttattttattttattttattttattttattttattttattttattttattttgtgttattttattttattttatgacgtagttttacgttgtggtttaggttggagtgtagtggcgcgatttcggcggtttattgtaattttcgttttcgggtttaagtaattttgttttagtttttcgagtaggtggaattataggtggcgtgttatatttggttgatttttgtatttttagtagagacggggttttattatgttggtcgggttggtttcgaatttttgattttaggtgatttgtacgtttcggttttttaagagtgttgggattataggcgtgagttattacgtttggtcgtttaatttttatttgaagttttggggtatatgtagaggatgtgtaggtttgttatataggtgtgtgcgttatgatggtttgttgtatagattattttattatttaggtattaagtttagtattttttagttattttttttggtattttttttttttagtatttcgtttaataggtattagtgtgtgttgatcgtcgttatgtgattatgtgtttttattgtttagtttttatttataagtgagattatgcggtttcgttggttttttgtttttgtgtgagtttgttgaggttaacggtttttagttttatttatgtttttgtaaaggatatgattacgttttttttagtggttgtgttttaggttattttttttggttttgttgtttattttttgttgatttgtagatttttatttattttagatattgattttttgttggttttagatatgatagatagttttttttattttattaattgttaagtttgtttaaggagttttttatgaaataaaattcgttaatttaagtgtaattaaatttagtaagggatttttgtggtggggaagaggttggtgtttatgttgtatttttaaaattttatttaatgtagttattaaaaagaattagattatgttttttgtgggatatggatggagttagaggttattatttttagtaaattaatgtaggaatagaaatttaaatattggatgtttttatttgtaagtgggagttaaatgatgagaatttataatataaataaggaaataatagatattgtggttgattttagggtgtaggatgggaggaaggagaggagtagaaaagagaattattgggtattcggtataatatttgggtgatgaaatattttgtataataaatatcgaagatacgagtttatttatgtaataaatttttatatgtatttttaaaatagaaataaaagttaaaaaataaagaaattttatttaaaagttttttttaagagatttattatcgggggaaatttagtttttaatattttacgtgggtttttttttattttttttaagtgtcggttggtttgagaaataaagggaaagagtataaaagagagatattttaaagtcgggtgtttaggggagatattatatgttcgtaggtttcgtgatgttttttgagtcgtaaaattagcgagtttttattagtaatttttaaagaggagggagtgtacgaatagggtgtgggttatagagattatatattttaagggcgataaaagattatagggtagaaggttacggcgaaattagaattattaatgaatttttaggttttattggtacgtattgttagggtttaagagtagagaatcggtttgattagaatttgttaggttggaattttttaattttattaagtttgggggtgttgtaggagattagggcgtgttttatttttttttatttttgaataaaggtaggtatttttagggaggttattttagtggttcggttttgggaatgtattttttttttagggttgttaattattaatattttttattggggaaagaatttagcgatattttttttatttgtttgcggtaataagagaagtatggttttgttttgtttagtttataggtagttagattttaaggttattttttttgttttttgaaaattgttgttattttgtttttaagatgtttagattttatattgtttaaatatataataattgttttttataaataatttgtgtagttaacgtagttattatagggttttaaggcgatatatatttttagtttacgaagatgataggattaagagattaaagataggtataggaaattataagagtattgattggggaagtgataaatgtttatgaaatttttataatttatgtttttttgttatggttttagttagttttttcgttcggggtgtttgattttttataatatgtatgttgtcgtagttggtttggaatttttggttttaagtgatttttttgttttatttagtttttcgaatagttgggattataggtatgtgttattatatttagttaatttttgtattttttgtagagatggggttttattatgttgtttaggttgtttttttttttttttttttttttttaaatttttattaatggattgaggttataaggaagttttttaaatttttgttattttgggttttttttaattttattttaattgtttagttttggtgttttttttggtttgttaagttgtttttttggtttgttttttggttttcggtttgaggttggttatttttttttagttttgagaaatgtatttttattgttttttttgagatgttttttttttcgtttttttttttttttttttttttttttttttttttttttttttttttttttgtattatttggaaaatggtttttttaatttatttttttattattttattgtttttttttttttttagataggttgttattttattgtttaggttggagtgtattggtattattttagtttattgtaatttttgttttttggtttaagtgatttttttgttttagttttttgagtagttgggattataggtgtttgttattatatttggttaatttttgtatttttagtagagatagggttttattatgttggttaggttggttttaaatttttgattttaagtgatttatttgtttcgggtttttaaagtgttgggattataggcgtgagttattgcgtttggttatttcgatgttatttgtgttttttttggtttgttttttttgggagagagttttttagttgattttattatttatttttttatttatgagtcgtatatttcgtatgatttattttatttgttgttggtttttttcgattattgtttttatatttattttttttttttgttgttttttgtaattttttattgttagtgtttttttttatgtttttatgattttttttgtgtgtatttttcgtttgtgtgttgtatttatttagcgttaggggatgtttttgttttttgagatgttttttttggaattagtgagtttgtgttttttttttggtggtattggttattttttcgggtagtatgttagtttgtggttttaaagtaaaggaaggagataagtattattaaattatagttaattttttttttttgttatcgttttttaaatagagtttgaggttagagttttttttttcgaattttgggaagtagcgttggggaaggtggttttttatgttttaatgtgttggtgttgggtgtttttaggggaagtgtgggagggagaaagttcgttttatttagttttattgttttttttagtgttttatttagtagagggtagtagaggttaatttcggtttagtttgtattagggttagtgtttagtagtgatatttttttaataattttagagagtattaataaaggaattgaatgtaaattttttttttttggtattttattatagttatttttagttacgtttagtttttatttatatatatatttttacgcgtatttatttatatttttgtatatttagatatatataggtttaatatagtttgtagtttttaggaggggcgacgttttattttatttgtttaattttattgtttttttgaaatttttgtttttttttgtggttttttttatatttttatcggagagggtaacgaaagtttatgatagtttattatttaaattaaggattgggatattatggatcgtggtttattatttgtttgtgtaaataaagttttattgggttttagttatgtttatttatgtgtgtgttatttatgtttgtttttgtgttatagtggtttaaatgagtgattgtaatagagattatgtggtttttaaagtttaagatatttttttttttttttttttttttttgagatggagtttggttttgtcgtttaggttggagtgtagtggtacgattttggtttattgtaagttttatttttcgggtttacgttattttttttttttagtttttagagtagttgggattataggcgttcgttattatattcggttaattttttgtatttttagtagagacggggttttattgtgttagttaggatggtttcgattttttgattttgtgattcgtttgttttagttttttaaagtgttgggattataggtgtgagttatcg

SEQ ID NO: 823 - DNA, 7445 bp, Artificial Sequence
  chemically treated genomic DNA (Homo sapiens)
ttgaagatatatgtttagataaaaatttgtacgtgaatgtttattatagtatggggatttataatagttgaaaagtagaattaatgtaaaagtttattaattggtgaatggataaatagaatgtggtgtatatataaaatggaatataatttagttataggaagggatgaagtattgttatatgttatattatgaatgaattttgatattattatgttaaatgaaagaagttagttataaaagtttatatattttattattaaatttgaatgaaatgtttagaataggtagatatttattgtttatagaggtagaaagtagatgaatggttattaggggttaggagaagagggaaatggggagtgattgtttaatgggtatagagttttttttaggggtgatgaaaatgatttagaattagataattgtgatggtgataaaattttgttaatatattaaaaattaatgaattggttttaaattaattgaattttaaagtatattttgaaagagcggatattatggtatgtgaattatattttataatgaaaatatgattgtattgtttaaaagagtatgaaaggaagtatataaaaaatatgaaatataaaatatggttttttttattttaaagtgtagaaattgaatattttgttttaggatataaaataaaaataaagaaagttaaaagtttttttatttggttattttggagtaagatttattatagtttagtgttttttatttagttttatagtttagtttattgtttgcgtgaaattttgtagtttttatttttgtttgattgttgggtgtaaagttatgagtgattatattgggggaagggaggaaaattttttataaaagtatattttgggggtttgaggatagacgtgggtttagcgatagatgtgggtttaggtattagaacgtgatatgtttatttgtttttatttcgttgtttatatatagggtttggaagatggttatgttttatattatgtgatttttaattaatgagttgattggtttttttaataagagtttaggtagagattgttgtttagaagagtttattagattttagagaattaggtttttggtagtagggtatggtggtttatgtttttgggaggttgaggtgggtagattatttgagtttaggagttcgagattagtttgattaatatggagaaattttgtttttattaaaattataaaaaattagttgggcgtggtgatgtatgtttgtaattttagttattcgggaggttgaggtaggagaatcgttttaatttgggaggtagaggtcgcggtaagtcgagattacgttattgttttttagtttgggtaataagagcgaaatttcgttttaaaaaaaaaaaaaagagagagagaattagttttttgatagtggaaatttttttgggaagatgttatagggtttttagggttagatatagagagaaggagatattaggatagagagaagaggtaagaaaaaaatatattttgtagtttgtgaggaatagagtggtttttaggggtttttagtttaggttttggattaaagttttttaaagtttaaggcgtatttggattatttgaggattttatgaaaatatagattttgtttgatttagtaggtttgggtttgggggtgggagtttgttagtatatttttaataagtttttaggtaaggttgttgttgttgttgatttaatgattatagtttgaggttggatagagtggtttatatttgtaattttaatattttgggaggataaggtaggagggttttttgaggttagaattttgagattagtttgggtaacgtagtaggatttcgtttttaaaaaataagagagaagaagaaaaaggaaataaaaagaagattttaattagagtaggaagtagttaggttatatatttttttaatggagaaaagagttttttttttgagtaaattggagtgtatttatgttttttgttaatgacggtaattttaaatgttaagaatgtgagagaggtcggggcggcggattatatttttataattttagtattttgggaggttgaggtgggaggattatttgagtttaggaatttaagattattttgggaaataaagtgtgatgttttttttataaagttaaaaaattagttaagtatggtggtatgtgtttgtgattcgaattatataggagggtgaggtagaaggattgtttgagtttaggaggtcgaggttatagtaagttgagtttgtagtattgtatttattttagtttgggtaatagtaggattttgttttaaaaaaaaaaaaaaaaaaaaaaaaaagaatgtgagagattatggggaaggtgtggttttggggtaggggttaggagattatagaataattgttagtggttttattattgtttagaggagatagtgatttgtttatttttatgatttttttggattttttggataggattggttatatatgaaaatgtggggatttttatttttaaattgttaagaatgttaagatagtaataataaagttttaaattaagtgtatggtttttttgcgttgtaggtttacgaggtaggtagattggtatttatatttttgtatagttttttttttttgagtgtgattggggtttgtgttttattgtttggaagtaaggtttatttttaagttttattttcggggaggtggatttgagagttattattttatttttttgtttggtatttttgtgaataaatttttagttttttgtaaaatttatgttatagtgattaatttattgtgtatgggtagaacggatttggttttggttagtaatatttacgaggttttttaggagattatattgttaagagagtattgagtaatggttgggagtattttgtttaaatgattttttttttttttttaggtcgggtacggtggtttacgtttgtaattttagtattttgagaggtcgaggttggtaggttatttgaggttaggagtttaagattagtttggttaatatggtgaaattttgtttttattaaaaatataattagttgagtatggtggtatatgtttgaaattttagttattcgggtggttgaggtacgagaatcgtttgaatttaggaggtagaggttgtagtgagtagagattgtattattgtattttagtttgagtgatagagaggggtaaagttaaaaaataaataaacgaattaatttatatatttttatttttattttgtttttataaattaataaatatagtttttgtgagttggtttatgtgagttagatttaaagaaaatgattaattttgaaacgtggattaaattagttgttttgttttttagttggagttatttttttgtcgtttagtttggagtgtaatggcgtagttttggtatacggtaatttttgtttttagagtttaacgatttttttgttttagttttttgagtagttggaattataggtgtatgttattacgtttagataatttttatatttttagtagagatggggttttattaagttggttaggttggttttaaatttttgaatttaggtgattcgtcggttttagttttttaaggtgttggggttataggaatgagttattattttcgttttaaattaggttttgaatttaaaagataggttgagttttgaattagaattttgatagtttttttttgggtttttgattggagttatttagaggtgaggataaggtagttattgttttttttgagtgtttatttttttttaaaattttaatatggaaatttgaattttttatttttttttaattttttttttagttaaaaattattattattggttagttgtagtggtttatatttgtaattttagtaggtggtagaggtgggaggattagtttaggtaatatagtgagattttgtttttatagaaaaaaattttttttaattagttgggcgtttttgtgcgtatttgtagttttagttatttggggaggttgagatgggaggatggtttgagtttaggagttggagtttgtagtgagttgtgattatgttattgtattttattttgggtaagagagtgagattttatttaaataaaataaaatagttgttatttttattttatttgtagaaatgttttttattttttagaaaatattatgcgttggttgatatatttttagtgggattcgttttagaaaatgatatgtgattttgatattatttgataggttttatggtagtaaggggtaggtttgggtttacggtttagtagatgaatttaggggggtggatttgtaaggattttggagggttttagtttttttgttattttaaagatggagaaatataggtttggagaaaggaagaaataaatttagggaatgcgatagatggtattgtgttggtaggggtaggaagattaaggttgtgatattttagggagtgcgattgtagtgaagcgagtgattataaaatattgaacgtaagttttgaggttttgttatttgttggtattaaggattttgtagtgttgagttaagaggatggattttggagttagattttttgggtttataattatttagtgtttgtttttttttttaaaatgcggacggtgggaaattttgatatacgttttaatatagatgtattttgaagatattatgttaagtgaaatgagcgagttaggtacgaaagggatgggattggggtttttttgtgcgtttttttgagagataacggttttttggttatttattttgattttataggagttaggcgggtttagttttgagataggtcgttcgtcgttcgtaattggattaaagagtgttttaggcgttcgtgtcgtttaatggggtatagcggtcggggtgcgtagtcgtaggggcgtggtttgaggttcgagattcgagttttggtattggagtttgttgattttttttggttttcggttaggtcggtcggtttttattatgggtttggagttgtatttggatttgttgttttagttttgtcgcgttgtttatatttttgttaagaagaacgatatttttttcgagttgcgtatcgtggatttgattaaaggtaggtttagtttcgggtttggggaatcgaaaagttaggaaggggataggtaggtatatatagtttagggaattttttttagcgttattttttttttggggttattgttggtttggtttggagatcgaatagagaaaggtgagttagtagggagatttaagagtcggggttttttaaaattttgttcggttttacggaatagattacggggtttttttgaggtcgaataaaggggtggggattatgaagagaagttagataggaggataaaaacgggcgtagttgggtgtaggggtatacgtttgtagttttagtaattcgagaggttggggtgggaggatcgtttgagtttaggaattttaggtcgtagtgtattattatggtgtttttgaatagttattgtattttcgttagggtaatttagcgagatttcgttttaaaaaaaaaaaataaaaaaaaataaaatgaaagtaggtgtgatttcggtttagggaaaggtgggatgagagaggttaagggtgttaagtgtagagattgggatagcgttaagttttttttttatggtttagttgttgagattttgtaatagtaaatagtttaggacgtgattttttatttttgttttttgtattcgtttagtttgtattggggtttttttttgtttttttttttttttgttttttttgttttgtttttgattttgtttttgtttttttttttttgagatagagttttgtttttgttttgttgtagtgtagtggtacggatttcgaattattgtaattattatttttcgggtttaagtaatttttttgttttagttttttgagtagttagattataaatgtgtgttattatgtttggttaatttttttgtatttttaatagagatgggattttataattttggttaggttgttttcgaatttttgatattaaatgatttgtcggtttagttttttaaagtgttgggattataggtatgagttattgtgtttggtttaaggtattttgtttatttgtttgtttgtttttgagacggagtttcgttttgtcgtttaggttggagtgtagtggtaggattatagtttattgtaatttttgtcgttcgaaattttgttttttgttttttgtttttgttggggaggtaggttgttttaggttgttgatgttggaagtagtagggggattttggggtttgatgagttttatattttgttttgtttttttagtatgtttttaaggtttttgaggatttagttggtaggtttaggtttaggtttagtgtagggtggggtagtaggaggggttggaagtagaatttaggtatggttggtggggtaagtaaggcgattttatttggttaagttttttgtttagggtttttattttatggttggttttttgtttgaaatttttttatataattttttttgtaaattgtttattgttttgcgtaaggattttttttgtagagtgtggagtagaggaaagggaatgggggataagaggacgtttaagttggttgttaaatgtagtggtgtagagggaagtgtgtttttttaggagatagaggagggtttttttggtgaaggaatagtttgaagggagggtgaagagagggtagtaggttgggtatggtggtttatatttgtaattttagtattttgggaggtcgaagtaggaagattatttgaggttagtagtttaagattagtttgggtaatatagtgagattttaattgtaaggggaataaaagtttggggtatagggggtggtagtaggtatgttatatatagttttatagtgtttagggtagggtgaataaagggatatggtggggttagtagaagttgtttttaagtaggtagatattagaaaaagattatttttttgtgttttatgattttgttttagaattaatggtggaagggataaggtagttagtttttttaggtgatttatcgtgtagtttggggtgttttgattgtgagtttatgaagttggtaatagtggaaagaggagatgggtagggtgtatgtaaaggtttaggaattatattttgtatagtgagttttgttgtagaggggtagtttgtgggaggaggttgtgtttataggatttagtaaggggtgttgtttattttgtattagtcggtggagtggttttttttttttttcgtaggggtttttttagtttttgttaattaggagtgtagattggtgggaagaagaattgtgaaattggggttagagtattgtagggaggggtataggttatggcgggtttagcgttttttttttattatttattatgttggattttttttagg

SEQ ID NO: 824 - DNA, 7445 bp, Artificial Sequence
  chemically treated genomic DNA (Homo sapiens)
tttgggaagagtttagtatggtgggtggtgggaggagaacgttgagttcgttatggtttgtgtttttttttgtaatgttttggttttagttttatagtttttttttttattagtttgtatttttggttggtaaagattggaagggtttttgcgggaggaggaggagattattttatcggttggtataaaatagataatattttttgttaagttttgtaggtatagtttttttttataggttgtttttttgtaatagagtttattgtgtagggtgtggtttttggatttttgtatgtattttatttattttttttttttattattgttagttttatgaatttataattagagtattttaagttgtacgataggttatttgaggggattgattattttgttttttttattattaattttaaggtagggttatgaaatatagagaagtggtttttttttggtatttatttatttagaagtaatttttattggttttattatgtttttttgtttattttgttttgggtattgtggagttgtgtgtagtatatttgttattattttttgtgttttaaatttttattttttttatagttggggttttattatgttgtttaggttggttttgaattattggttttaagtaatttttttatttcggttttttaaagtgttgggattataggtgtgagttattatgtttagtttgttattttttttttattttttttttagattgtttttttattaggaaaatttttttttgttttttgggaaaatatatttttttttgtattattatatttgataattagtttggacgtttttttgttttttatttttttttttttattttatattttgtagaggaagtttttgcgtaggatagtgggtagtttgtagaagagattatgtggagaagttttaggtagagggttagttatggagtgggagttttgggtagaaggtttagttaagtagagtcgttttatttgttttattagttatatttggattttgtttttaattttttttattattttattttgtattgggtttgggtttgggtttgttagttgagtttttaagggttttggaggtatgttagagaaataaaatagggtgtagggtttattaagttttagggtttttttgttgtttttagtattagtagtttggggtaatttatttttttagtaggaataagaggtagaggataaggtttcgggcggtagaggttgtagtgagttgtgattttgttattgtattttagtttgggcgatagagcgagatttcgttttaaaaataaataaataaataaataaaatgttttgggttaggtatagtggtttatgtttgtaattttagtattttgggaggttaagtcggtagattatttgatgttaggagttcgagaatagtttgattaaaattgtgaaattttatttttgttaaaaatataaaaaaattagttagatatagtggtatatatttgtaatttagttatttaggaggttgaagtaggagaattgtttgaattcgggaggtggtggttgtagtgattcgagattcgtgttattgtattgtaataaagtaaaagtaagattttgttttaaaaaaaaaaggataaggataaggttagaggtaaaataggaggaatagaggaaggaagggataaagagggattttaatgtagattggacgagtgtagagggtagggatggaaagttacgttttgagttgtttgttgttgtagaattttagtagttgggttataaagaagggatttgacgttgttttagtttttatatttggtatttttgattttttttattttatttttttttaggtcgaggttatatttgtttttattttgtttttttttgttttttttttttaagacggggtttcgttagattgttttgacgggagtgtagtggttatttaagggtattatgatagtgtattgcggtttggaatttttgggtttaagcgatttttttattttagtttttcgagttgttgggattataggcgtgtgtttttgtatttagttgcgttcgtttttgtttttttgtttggtttttttttatgatttttatttttttattcggttttaggggaatttcgtggtttatttcgtgagatcgagtagagttttggggagtttcgatttttggatttttttgttggtttatttttttttgttcggtttttaaattagattagtaatggttttaggaagaaggtggcgttgggagaagttttttaagttatgtatgtttatttgttttttttttgatttttcggttttttaaattcgaggttggatttatttttaattagatttacgatgcgtagttcgaagggaatgtcgttttttttggtaaagatgtaaatagcgcggtagggttgggatagtaggtttaggtatagttttaggtttatagtggggatcgatcgatttgatcggaaattagagggagttagtaaattttagtgttaggattcgggtttcggattttagattacgtttttgcggttacgtatttcgatcgttgtgttttattgggcggtacggacgtttgggatattttttagtttaattgcgggcggcgggcggtttgttttagggttgggttcgtttggtttttgtgggattagggtgggtggttaagagatcgttgttttttagggggacgtatagagaggttttagttttatttttttcgtgtttggttcgtttattttatttagtataatgtttttaaggtgtatttgtgttgaagcgtgtgttagaattttttatcgttcgtattttagaggaggagatagatattgaatgattatagatttagaaagtttggttttaaagtttatttttttggtttaatattgtagagtttttggtgttagtaagtggtaaagttttagggtttacgtttagtgttttgtggttattcgttttattgtagtcgtattttttggaatgttatagttttggtttttttgtttttgttagtatagtgttatttatcgtattttttgggtttatttttttttttttttaggtttgtgtttttttatttttaaaatgatagggaagttagagttttttagagtttttgtaagtttatttttttggatttatttgttgagtcgtaagtttaggtttgttttttgttgttatggagtttgttaaatagtattagggttatatgttattttttaaaacgaattttattgaaagtgtgttagttaacgtataatgttttttagagaataaggaatatttttgtaaataaagtggaagtaataattgttttattttatttagatagagttttatttttttgtttagggtagaatgtagtggtatgattatagtttattatagattttaatttttgggtttaagttatttttttattttagtttttttaagtagttgggattataggtgcgtataaagacgtttagttagttaaaaaaaatttttttttgtagaggtagggttttattatgttgtttaggttgatttttttatttttgttatttgttgggattatagatgtgagttattataattggttagtaataatgatttttaattggaaaaaaaattaaggaaagatgagaaatttagatttttatgttaaagttttgaaaggaggtagatatttagagaaggtaatggttgttttatttttatttttggataattttagttagaggtttaaggaggagttgttaggattttggtttaaggtttagtttgttttttaagtttaaaatttaatttggggcgggagtggtggtttatttttataattttagtattttgggaggttgaggtcggcggattatttgagtttaggagtttgagattagtttggttaatttggtgaaattttatttttgttaaaaatataaaaattatttgggcgtggtggtatgtatttgtaattttagttatttaggaggttgaggtaggagaatcgttgaattttagaggtagaggttgtcgtgtgttaagattgcgttattgtattttaggttgggcgataagagagtaattttaattaaaaaataaaataattaatttggtttacgttttaggattgattattttttttgggtttgatttatataaattaatttataaaggttgtatttattaatttatagaaataagataaaagtgagagtgtgtgggttggttcgtttgtttgttttttgattttgtttttttttgttatttaggttgaagtgtagtggtgtaatttttgtttattgtaatttttgttttttgggtttaagcgattttcgtgttttagttattcgggtagttgggattttaggtatgtgttattatgtttagttaattgtatttttagtagagatagggttttattatgttggttaggttggttttgaatttttggttttaagtgatttgttagtttcggttttttaaagtgttgggattataggcgtgagttatcgtgttcggtttagaaagaagagaaaagttatttagatagaatgtttttaattattgtttagtgtttttttggtagtgtagttttttaggaagtttcgtgggtgttattggttaggattaggttcgttttgtttatgtatagtaaattaattattgtgatatgagttttgtaaaagattaaagatttatttataagggtgttaagtaaggaggtaggataatagtttttaaatttattttttcgaaaataaggtttagggataagttttgtttttaagtaataaagtatagattttagttatatttaaggggagggggttatataaggatgtgaatattagtttgtttgtttcgtgggtttataacgtagaagggttatgtatttggtttaaaattttgttgttgttgttttgatatttttaataatttaaaaataagggtttttatatttttatgtgtagttagttttgtttaaggagtttaaagaggttatgagggtggataggttattgttttttttgggtagtgatggggttattagtagttgttttgtagttttttagtttttattttagggttatattttttttatggttttttatatttttttttttttttttttttttttttttgagatagggttttgttgttgtttaggttggagtgagtgtagtgttgtaaatttagtttattatagtttcgattttttgggtttaaataatttttttgttttatttttttgtgtagttcggattataggtatatgttattatgtttggttaattttttgattttgtagagagggtattatattttgttttttagggtggttttgaatttttgggtttaagtgatttttttattttagttttttaaagtgttaggattataaagatgtgattcgtcgtttcggttttttttatatttttggtatttaaagttatcgttattgataaggaatatgggtatattttaatttatttaagaaaaaaatttttttttttattgaagagatatgtggtttggttgttttttattttagttgaggttttttttttgtttttttttttttttttttttttgttttttagagacgaggttttgttgcgttgtttaggttggttttaaagttttagttttaagagatttttttgttttgtttttttaaagtgttgggattataggtgtgagttattttgtttagttttaaattgtggttattagattagtagtagtagtagttttgtttgggagtttgttagaaatatattaataggtttttatttttaaatttagatttattgaattagatagagtttgtatttttataagatttttagatgatttaaatgcgttttaaattttgaggagttttgatttagaatttgggttggaggtttttgggggttattttgttttttatagattgtaaggtatgttttttttttgttttttttttttgttttaatgtttttttttttttgtgtttgattttgaggattttatgatatttttttaggggagtttttattgttaaagagttgatttttttttttttttttttttttttgagacggagtttcgtttttgttgtttaggttggagggtaatggcgtgatttcggtttatcgcgatttttgttttttaggttgaagcgatttttttgttttagtttttcgagtagttgggattataggtatgtattattacgtttagttaattttttgtagttttagtagagatagggtttttttatgttggttaggttggtttcgaatttttgaatttaggtgatttgtttattttagttttttaaaggtatgagttattatgttttattgttagaggtttgattttttagaatttgatgggtttttttagatagtaatttttatttgggtttttgttgaagaagttaattagtttattggttggaggttatatgatataaaatatggttattttttaagttttatgtgtggataacgagatagggataagtaggtatattacgttttgatatttggatttatatttgtcgttgggtttacgtttgtttttaggtttttaggatatatttttatggggagtttttttttttttttttaatgtggttatttataattttatatttaatagttaaataggagtggaagttatagagttttacgtaaataataggttaggttgtgggattgagtaaaaggtattggattgtggtaggttttattttaagatggttaaatggaagggtttttagttttttttgtttttgttttatattttgagataaaatgtttaatttttatattttagaataaaaagagttatattttatgttttatattttttgtatgtttttttttatatttttttgaataatgtaattatatttttattatgaggtataatttatatattataatattcgtttttttaaaatatattttaaaatttaattggtttaaagttaatttattggtttttagtatattaataaagttttgttattattataattatttaattttagattatttttattatttttaaaagaaattttgtatttattaaatagttattttttatttttttttttttttagtttttggtaattatttatttattttttatttttgtggatagtaagtatttgtttattttggatattttatttaaatttaataatgaaatatgtgagtttttatgattggttttttttatttaatataatggtgttaaggtttatttatggtgtagtatataatagtattttatttttttttgtggttgaattatattttattttatgtatatattatattttgtttatttatttattagttgatggatttttgtattgattttattttttagttattgtgaatttttatgttgtgatgaatatttacgtataagtttttgtttggatatatgtttttag

SEQ ID NO: 825 - DNA, 5999 bp, Artificial Sequence
  chemically treated genomic DNA (Homo sapiens)
acgtttcggcgtggtcgtagggcgcggcggaatgattttcggggcgtttttaaagcggcggagaggagtgtcgggttgagttttcggttgagagtttttttagcggcgtcggtgagttcgcgtgtggaagtttgtgaggcgtagaggtggggtaggtcgtttgattagttaggcggttgggagcgttttcgtggcggggaacggaggttgaattgttttgtttgggtttatagggaaggaggatgtgaaggagtttgtgaaggtagaggaaggtaattttcgtttggggagtcgtagagtagggagggaagttgtaggtcgtttttttttaagtaaaagcgcgatttttagaaatgatggtttagggttcgagtttgtgattcgtttgagaaagtgattaatttttgagtttgaattttatatttgaaaaataaggatagtaattatttttgttagttttatatagtttggtaaggtgtgaagaaaagttttttaaattgggatgtttggtgtttttatttgttggtagatagtatttcgagtttatgtaacgggaattatattagtaggtttatgttgaggaacgtggattgtttggggttggattttaggaaatagattatttaaaaaaattttttttttttcgagacggagtttcgttttgtcgttaggttggagtgtagcggcgcgatttcggtttattgtaatttttatttttcgagtttaagcgattttttttttttagtttttcgagtagttggaattataggcgcgtgttattacgtttagttaatttttgtatttttagtagagacggggttttattatgttggttaggatggttttgattttttgatttcgtgattttttcgtttcggttttttatagtgttgggattataggtgtgagttatttatttggtttcggtgatatttttaagaagaaaatggattgttgggaagtgataggttattggagatttttataaagtttatttttaggatgtatgaattttttaaatagtatgtatgtttataattagattttttattgaacgtttgtagttttagggattttaatattttttgtttagtcggattttttattgtaggtagttttaattaagaagtttttttagtcgggcgtggtgatttatgtttgtaattttaatattttggaggatcgaggtgggcggattagttgtggttaggaattcgagattaggtttggttaataggttggtgaaatttcgtttttattaaaaataaaaaggttagttgtggtggcgtgtgttttaattttagttattcgggagatagaagagatagtagaatcgtttgaattttggaggcggaggttgtagtgagtcgagattgcgttattgtattttaagtttgggcgatagagtaagatttttgttttaaaaaaaaaaaaaaaagaatttttttgatatggttagttaaaagttttttagttgttatttatttttatatttataatatttattatatatttgtaattattttatttattttgagatagggttttattttgttatttagtttggagtgtagtagtgaatatagtagtttcgatttttttgggtttaagttatttttttatttttgttttttaagtagttgggatttaagtattcgttatttcgtttagttaattttttgatgttttgtagagataaggttattgtttaggttgatttgagcgtttgaatttaagtaatttttttgttttggttttttaaagtgttgggattataggtttgagttattgtgttttgcgaagaatttgagtttaaaaacgttgagaacgttatgcgagttttttatttttaaagtttataatacgtaatagaaaatagggaggagtaaaatgtttagttgaggttgggtgtggtgatttacgtttgtaattttagtattttgggaggtcgaggtgagtgggttatttgaggttaggagttcgagattagtttggttattatggtaaaattttatttttattaaaaatataaaagttagttaggtgtggtggtgggtttttgtaattttagttattcgggaggttgaggtaggaggattatttgaattcggaggcggaggttgtagtgagtcgagatcgcgttattgtattttagtttgggtggtgagtgaaatttcgttttaaaataaaaaaagaaataaaaatattttgtttataggtagattatttgaggttaggagtttgagattagtttggtaagttaggcgaaattttggttttataaaaatataaaacgtggtaaaattttgattgtattaaaaatataaaaattagttgggtatggtggtacgcgtttgtaattttagttttttgggaggttgtaggataggagaattatttgaattcgggagatggaggttgtagtgagttacgaggtggtggagttgggagggagattgtattggggaggatggaggtgtgatgaggatatttatttgtgtatgaatgaatgaatgatagagtttcgtttttttatttaggttggagtgtagtggtataattttggttcgttttagtgtttatttgttaggtttaagtgatttttttgttttagtttttcgagtagttgggattataggtgtgtattattaggttttgttgatttttgtatttttagtggagacggtattttattatgttggttagtttggttttgaatttttgatttgaaatgatttgttggtttcggttttttaaagtgttgggattataggatgagttatcgtgttcgttttttttttttttttttttttttttttttttttttttttttgaggtagggttttattttgttgtttaggttggagtgtagtgatttgatttcggtttattgtagttttcgtgttttttgggtttaagtagtttttttgttttagtttttttagtagttgggattataggggttcgtttttattaattttttagttaatttttaaatttttgattttaagtgattatttgttttagttttttaaagtgttagaattatagatgttagttattatatttggtttggtttttttttttttttttttttgagacggagttttgttttgttatttaggttggagtgaagtggcgtgattttggtttattgtagtttttgttttttaggtttaaggaatttttttgttttagtttttttagtagttgggattataggtatttgttattatgtttaattaatttatgtatttttagtagagacgggtgttgttatgttggtttgattggtttcgaatttttgattttaggtgattcgtattttgtttttttaaaagtgtagggattatagggatggagtcgttgtatttggttttggtttgtgtttgtttgttttgttttgtttttaatttttatttttacggagtacgtgtgtatgttggttatatggataaattgtttgttgttgaggtttggtatataaatgatttcgttattttggtagtaaatatagtattcgataggtagttttttaatttttatttttttttatttttttttgtttaatagtttttaatgtttgttgtttttatcgttatgtttacgtgtatttagtgtttagtttttattcgtaaatgagaatatgtcgtttttggttttttgttgttgtttttttttaggttagagtgtagtggtacgatttcggtttattgtaatttttttgtttttcgggtttaagtaatttttttgttttagttttttgagtagatgggattataggtgttcgttattatatttggttaatttttttttatttttagtagagatagggttttattatgttggttaggttggttttaaatttttgattttaggtgatttatttgttttggttttttaagtgttaggattataggcgtgagttattgcgttgggtttttgttcgtgttaatttaatgaggataatggtttttagttgtatttatgttgttgtaaaagataggattttattgtgttttttttttcgttgtttttttggttgttagtattttatgatatattacgtattatattttttttatttagtttattatttatgagtatttaagttgatttgatgtttttgttattttggatagtgttgtgattaatatgagtgtttttgtatttttggtagaatggttttatttttttttgggtttatatttagtattgggattgttggatcgatatatatgtgtttaataaatatatgaaaaaatgtttaatattattgattattagagaaatgtaaattaaaattataatgtaaattaaaattataaatttattttattattagttagaatggatattattaaaaagttaaaaaataatagatgttggtaaggttgtgaagaaaagggaatgtttatttattgttggtaggaatgtaaattagtttagttattatggaaagtagtttggagatgttttaaagaattatgtttaattttgtgttttttttttttgaattatgagttatagtatttatttatttataaataataaatgtgatttaaaaatttttgattatgagaaaattgagatatatatagagagatagtataatgaattatatgttatttagttataatagtttaattacgtttatattgattttttataagtttatagtttgttatgtgatatatttataaagtatttttgtttttttataaatcgtaaaaagacgtttatttttattggtattaagtttgtgtataagtttatattattttttggaaatgagaaatggagttttatgaagatttttaagataattattgagtaaaatataaagaataagatgatttggtattttatttttttttattttatatatgtgtttaatttttaaatttaattggatgaattttgtaataaatatttttagataatttatattttaatggtttttatagattattgaataataaaatatagttttgaaaaaaatggatgaagaatttgaaagaattaagcgatgggaaggaggttatgaaagaatatggtaaggagagttttattgttttgtttttttttttagataatgtttttttttttttttataattttattaaagtatattttatatatgttaaaatttatttatttttaatgtataatttagtgatgttttattaataatttattgagttgtgtagttattattataaattagttttagaatattgtaattattttagtaagattttttatatttatttataattaatttaaattttaatttaattttatttgtgggtaattattagtttattttttgtttttaaattttaattttttttggatattttataaaaatgtgattatatataattatgtgttatataatgatgttttggttaaagatagattgtatatatgataatggttttataatattataatattgtatttttattttattttttttatgtatgtttagatatataaatattgattattgtgttatagttgttttaagatatttagtatagtaacgtgttgtataggtttgtaatttaggcgtgggataggttatattatttaggtttgtgtaagtatattttgtgatatttatataataatgaaattgtttaataatgtattttttagaatgtatttttgttagtaagcgatgtatgattataatagttggtttgttgtggttggtttttatttatttttaagatttatttatgatgtagtgtgtattaatattttattttttttttattgttgaatagtatttttatttatggttatgttatattattgtttatttatttattagtttgtggatatttaggttttttatagtttttgattgttaggaaaatgtagttatgaatatttatatgtaaatttttgtgtggatatatatttttattttatttgggttagtaattattttagtttgtttttttaaataaataattatgatttatagg

SEQ ID NO: 826 - DNA, 5999 bp, Artificial Sequence
  chemically treated genomic DNA (Homo sapiens)
tttataagttataattatttgtttgaaaagataagttaaaatgattattagtttaaatgaaatgaaaatatatgtttatataaagatttgtatgtaagtgtttatggttgtatttttttaatagttaaaaattgtaaagaatttaaatatttatagattagtgaatggataaataataatgtggtataattatagatgggaatattatttagtaataaaaaaggaatgaagtattaatatatattgtattatggatgagttttaaaaataagtgaaagttagttataatagattaattattatagttatgtatcgtttattgatagggatatattttgagaaatgtattgttaggtaattttattattgtgtgaatattatagggtatatttatataaatttagatggtatagtttattttacgtttaggttataaatttgtatagtacgttattatattgaatattttaagataattgtaatataatggttagtatttgtatatttaaatatatatagaaaaggtagagtaaaaatatagtattataatattatgggattattgttatatatgtagtttgtttttgattaaaatattattatgtggtatatgattgtatatgattatatttttgtgaaatgtttagaaaaggttaaaatttggagataaaaagtagattaatgattgtttataggtggaattaaattaagatttaaattaattgtaaatgaatgtgaaggattttattggagtggttataatattttaaaattggtttatgataatggttgtatagtttagtaaattattaataaaatattattgaattgtatattggaaatgggtgaattttaatatatgtaaaatatattttaataaagttgtaaagaaaaaaaaagatattgtttaaaagaaaagatagggtaataaagttttttttattatgtttttttatagttttttttttatcgtttagtttttttaggttttttatttattttttttaaaattgtattttattatttaataatttgtaaaaattattagaatgtaagttatttaaagatgtttgttataaaatttatttaattaaatttgaaaattagatatatatataaagtaaaaaaaaatggaatgttaggttattttattttttgtattttatttaataattgttttaaaaatttttatagaattttattttttatttttaagaaataatatgaatttatatataaatttggtattaataaaaataagcgtttttttacgatttgtaaaagaataaaaatgttttatagatgtgttatatgataaattgtagatttgtgaggagttagtatgggcgtagttgaattattatagttgagtgatatgtgatttattgtattatttttttgtgtatgttttaatttttttataattaaaagtttttaaattatatttattatttataaatgggtaaatgttatagtttataatttaaaaaaaaaggatataaaattaaatatagttttttgagatatttttaaattgttttttatagtggttgaattaatttatatttttattaatagtggataagtatttttttttttttataattttgttaatatttgttattttttgattttttaataatatttattttaattggtggtgagatgggtttgtggttttgatttatattgtggttttggtttgtatttttttaatgattagtgatgttgaatatttttttatatatttattggatatatgtatgtcgatttaataattttaatattgggtataaatttaaaggaaaataaaattattttattaaaagtataagagtatttatattaattatagtattatttaaaatagtaaagatattaaattaatttagatgtttataaatggtggattggataaagaaaatgtggtacgtaatatattatggaatattagtagttaaaaaaataacgaaaaaaaaaatataatgaaattttgttttttgtagtaatatggatatagttggaggttattatttttattgaattaatacgaatagaggtttaacgtaatggtttacgtttgtaattttagtatttgggaggttaaggtaagtggattatttgaggttaggagtttgaaattagtttggttaatatggtgaaattttgtttttattaaaaatagaaaaaaattagttagatgtggtggcgagtatttgtaattttatttatttaggaggttgaggtaggagaattgtttgaattcggaaggtagagaggttgtagtgagtcgagatcgtgttattgtattttggtttaaaaaaaaatagtaatagaaaattaaagacggtatgtttttatttacgagtggaaattaaatattgagtatacgtggatataacgatgagaataatagatattggagattattagatagggaaggatgggagagagtgagggttgaaaaattgtttatcgggtattatgtttattattagggtgacgggattatttgtatattaaattttaataataagtaatttatttatgtaattaatatgtatacgtatttcgtgaaaataaaagttgaaaataaaataaaataaataaatataggttagggttaggtgtagcggttttatttttgtaatttttgtatttttgagaggataaggtgcggattatttgaggttaggagttcgagattagttaggttaatatggtaatattcgtttttattaaaaatatataaattagttgggtatggtggtaggtgtttgtaattttagttattagggaggttgaggtaggagaattttttgaatttggagggtagaagttgtaatgagttaaggttacgttattttattttagtttgggtgatagagtaagatttcgttttaaaaaaaaaaaaaaaaaaaaattaggttaggtatgatggttgatatttgtaattttagtattttgggagattaaggtaggtgattatttgaggttaggagtttgaaaattagttaggaggttggtgggagcgggtttttgtaattttagttattggggaggttgagataagaggattgtttgaatttaggaggtacggaggttgtagtgagtcgagattaggttattgtattttagtttgggtaatagaatgagattttgttttaaaaaagaaagaaaagaaaggaaagaaagagagagagagaaacgggtacggtggtttattttgtaattttagtattttgggaggtcgaggttagtagattattttaggttaggagtttaagattaggttggttaatatagtgaaatgtcgtttttattagaaatataaaaattagtagggtttagtggtgtatatttgtaattttagttattcgggaggttgaggtaggagaattatttgaatttggtaggtagatattggagcgagttaaggttgtgttattgtattttagtttgggtgagagagcgagattttgttatttatttatttatgtataaataaatgtttttattatatttttattttttttaatgtaattttttttttaattttattatttcgtggtttattgtaatttttatttttcgggtttaagtgatttttttgttttatagttttttaaggagttgggattgtaggcgcgtgttattatgtttagttaatttttgtatttttagtatagttagggttttgttacgttttatatttttgtagagttagggtttcgtttgatttgttaggttgattttaaatttttgattttaagtgatttgtttgtaaatagaatatttttgtttttttttttgttttaaggcggagttttatttattatttaggttggagtgtaatggcgcgatttcggtttattgtaattttcgttttcgagtttaagtgatttttttgttttagtttttcgagtagttgggattataagagtttattattatatttggttaatttttgtgtttttagtagaaatggggttttgttatggtggttaggttggtttcgaatttttgattttaggtgatttatttatttcggttttttaaagtgttgggattataggcgtgagttattatatttagttttaattgaatattttgtttttttttgttttttgttacgtattgtgaattttaaaaatgaaaaattcgtataacgtttttaacgtttttaaatttaaatttttcgtagggtatagtggtttaaatttgtaattttagtattttgagaggttaaggtaaaaggattgtttgagtttaggcgtttagattagtttgggtaataattttgtttttataaaatattaaaaaattagttgggcgaggtggcgagtatttgagttttagttatttgggaagtaaaagtgggaggatggtttgagtttaggagagtcgaggttattatgtttattattgtattttagattgggtgatagagtgagattttattttaaaataaataaaataattataaatatataataaatattataaatataaaagtaaatagtaattgagagatttttggttgattatattaaaggaatttttttttttttttttttgagataagagttttgttttgtcgtttaagtttggagtgtagtgacgtaatttcggtttattgtaattttcgtttttagggtttaagcgattttattgttttttttgtttttcgaatagttgagattaaggtatacgttattatagttaatttttttatttttagtagagacggggttttattagtttgttggttaggtttggtttcgaatttttgattataattggttcgtttatttcggttttttaaagtgttgggattataggtatgagttattacgttcggttaaaaggattttttaattagagttgtttgtaatgggaaattcgattggataggaggtattaaggtttttaaaattgtagacgtttaatgggaagtttgattgtaaatatgtatgttgtttaaaggatttatgtattttgaagatggattttgtaaagatttttaatggtttgttattttttaatagtttattttttttttaaaaatattatcgaggttaggtgggtggtttatatttgtaattttagtattgtgggaggtcgaggcgggaggattacgaggttaagaaattaagattattttagttaatatggtgaaatttcgtttttattgaaaatataaaaattagttgggcgtggtggtacgcgtttgtagttttagttattcgggaggttgaggaaggagaatcgtttgaattcgggaggtggaggttgtagtgagtcgagatcgcgtcgttgtattttagtttggcgatagggcgagatttcgtttcgaagaaaaaaaaatttttttaagtgatttgttttttggaatttaattttaaataatttacgttttttagtataagtttattggtgtgattttcgttatatgagttcggaatgttatttgttaataaatgagagtattaaatattttaatttaagaagtttttttttatattttattaagttatgtgaaattggtaagggtgattattgtttttgttttttaggtatgggatttaggtttagaggttggttatttttttaagcgggttataaattcgaattttgaattattatttttaaaagtcgcgtttttatttagggagagacggtttgtagtttttttttttattttgcggttttttagacgaaagttatttttttttgtttttataagtttttttatattttttttttttatgagtttaggtagggtaatttaattttcgtttttcgttacgaaaacgtttttagtcgtttagttagttagacggtttgttttatttttgcgttttatagatttttatacgcggatttatcggcgtcgttagaaggatttttagtcggaaatttagttcgatattttttttcgtcgttttaggggcgtttcggaagttatttcgtcgcgttttgcggttacgtcgaaacgt

SEQ ID NO: 827 - DNA, 5424 bp, Artificial Sequence
  chemically treated genomic DNA (Homo sapiens)
attattggtaattaaaagttagtataattattattttaatataagttaaatatatagaggttttttgtatttagatatgtagtaggttttttaaatatgagaaatgataaaattttttagatttgtaaagtaaaaagatacgtttattatgataaaagatgatatagtaaaatttgtaatgtggataggttgaggattttttagataaagttttggttttttttcggtttaatagttttttttttaatttttttttgtttttttatattttataatagtaagaagaaagtaggttgtgtttttattattttgtttaggaatttttttagttaaatatttaagattaatatttttatatatttgtgagatataattcggttaagttttttgttattatatattgatatattagtttgtttttacgttgttaataaagatatatttgaggttgggtaattttttaagaaaaagaggtttaagggatttatagttttatatggttggggaaggttttataattatggcggaaggtgaaggaggagtaaaattacgttttatgtggtaataagtaagataagttgtgtaggggaattttcgtttataaaattattatatttcgtgagatttatttattattaggagaatagtacggggaaaattgtttttatgatttaattatttttatttggttttgtttttgatatgtgaggattgttaaaattcgaagtgagatttgagtggggatatagttaaattatattaattgatgatttttttttttataatttttaataatattttttttatttttatttgtattttgttcgtagtatttttaatgtttatatttgtattagtagtttgtttatgatgatttatgatgatttatgtattttttaagatgatatagattttttttattatgttttttatttttttttgaggttttattagtagagttagtatttatgtttttattaataatgtgtttaaggtaatttaggtttttattttattttattttttattattatattttaagttttaggatatatgtatataacgtgtagatttgttatatatgtatatatgtgttatgttggtgtgttgtatttattaatttattatttatattaggtatattttttaatgttattttttttttatttttttattttgtaatttaggtttttaaaatgttggttatatataatttttttagtttttgttattgtttaatattaaagatattttgatatttagttttttattattattgtaataaattattttcgaatttagtgtttaatataatatacgtttattattttatatttgtggaagtttgaagtttgaaatgagttttattagattaaaatttaggtgatggtagggttattttttgttttagagattttaagggaggataattttttagttttatttattttttagaggttgtatatattttttggttaagttttttttattttttttttttttttattttttttttgttttgagacggagtttcgtttttttcgtttaggttggagtgtaatggcgtgatttcggtttattgtaatttttattttttaggtttaagtaatttttttgttttagtttttcgagtagttgggattataggtatttgttattatgtttagttaattttttgtatttttagtagagatagggttttattatattggttaggttggtttcgaatttttgattttaagtgatttattcgtattcgttttttaaagtgttgggattataggtgttagttattgtatttagttttttttttatttttaaagttagtaattgtttattaattttttttaatatagtattatttcgattttgattgattttattgttttaattttttttttataaggatttttttgattgtatttggtttatttatttaatttggaataatatttttattttaagattagttgattagtaattttaattttatttgtatttttattttttttttgttatgtaaaattgtatatttataggttttaaggattagtaggtagatatttttggagtgttattattttatttattattgtatttattgtttataaatattaattttttggtaaaaatatagtggatagcgtttataaatattatttttttggtaaaaatatagtggatagtatttttgttattattagaattttttttagtttaggttgttttgtgaatgtttatattaggattagaaatgcgtggacgttaatttaataagatttagtttttttaattaaagttttatatttatataaaagagatattttggagtttttgtattattttattgtaagttattagtgtaaattttaattaggtatattaaaataaattgaaaatgaataatattaagaaaaggaggaaataaggagttagaagtttattttattttttttatatttgagaggttattttaatttggtaaattatataatttatagtttgttcgtttgttaaaaataaaataaagttttgattttgatatatatgtaatattttttttatttttatttttttattgttttttatttcgtttttaattttttttggtttatggattttttatggtttataaagttagtagagatgaaattattagttttattattttatttgaattgatatggtaatagtaatttagaaaaataaagatgtaggttttaaaaatttttgaatttagaaagatttatacgatgtgttttgaggtttattatatttaatgttttgatagtagattagtgttttttaaattttaatgtgtataggaattatttgaggattttgtttaatggatagtttgatttagttggtttagagaggggtttgaatttttgtatttttaataagattgtaggttatgggatattgttaatatagaaattatattttgagtagtaaggatttagatattatttttagttgttattgtttttttatttgtaagtgtgaaagtaatgtatatttaaatgtttttatgttgttgttaattgtgggttgtaggtataagaaaaataaagtattttgagaggaaataaaaattttttgagtttttttgttagtattaatatggttaaggagattgttttatattgagtaattttttttgttaatatttttattaagttgttatgataatttttttattttttataaagtggaggaaagtaggttttaatttataagttaattataagaaagaagattggatttggaagatgatgaaatatttaggtatttatttatttatttagtaggtattttagtgaatttcgttatgaattatttttattattaggaaattaggttgtgaagattagtatttttttaataataaggaatttttgttatttttttagagtatattaaatatttagattatagaatgttttttgtagttattttttggtggttttagttatttttatgtttagattggttgttttttttttttatttattgtttgatagttagaaaggatagaggaggaagaagataagatattatttagttgagagtttatttttagtaaaattcggtagtttttggtagaatgtattggggttaaatgtaatattaattaaggagtttggtgtgttataaaatttgagaatggtaaaagtagaaattaatgggttaaataagttattttttagaatgaaaggaatattggtaatggtattaatagacgaggataatagtaataataaagtttttatataagtttgtaatacgtgataattgcggattaggtatttgaattcggtttatttttttatcgtatttttttatatttttttttatgtattttttatttttattagatggtattattttttgttttttgaataatagtgttatgtttttttaatttttgtatgtttgtttataagtttttttttgttagagaaaagtaaaaataataaaaaagttttttattttatttttttttaaatataattaattttttaagttttatttttagtattgtttttttatgaattttgttagataatattttatttttttttgaatgtttatagtatttatttaaaaatagtatgattttttttttttttttattaatgaattattgtgtattttttaagtttttttttatatttgaagttttaaatatttttagtataaatgttttattgatttaagagagtattatgggttaaatgtagaggaagagaagtttttgagatggtaggaaggtaaaagtttttgtgattatttgtgtttatattgttgatttttttaattgtttttgatttatttaaatgtattttttttttgattttgattaatgtttattatgaggtaagtatagtaggtaagattgggagaaagtttgtaaatgtgatgagtttataaatgggattagattagatggtgtatttgggggagatataaaagaggaagataattatgaattgaattgaattgaaaatggattatataaagattatgattaattgttaatttataatggaatagtatgatgggatttttttaagttagaaaggtgattaaaagtataatattataatatatataacggtaataaatataattaaatgtattgaattaggtagaagttagattttattgaaaagatgtaaaatttttgtaattataaaattgtatttgtaaatgagtagattggttttaattttgaaaattaggataagagagttattagcgtagatgttaatttttttacgtaaaaagtgatttttgttatggcgattgggcggttgtagagattaggatttagtttttttgttttagtttgagtttagtgggtgggatttagtttagagttagttttttagaagtaggttttagtgtagagtttttttatattttttttgcgttagagtagcgagtagtttggaatagatttaggcggaggatatttgtgggggagggagcgtttggaggagtttagagattttagtcgggcgtgattttattatggtgcgttttggttgttatttttttttttagtttttcggtgcggagaaggggaggaggcgggtagaggtttgaaaaaatcgaatgttttatggaaaggaattgtaagggtttttttggggtgattaaagagggagatatagatatagagagataaaggtaaggaggattgtttgggagttacgcgggcgatatagttttcgaggtacgtcgcgtttcgtttagtttgttgaataggtagatatgagcgatttaagcgtaagtgtcgttgtcgcgagtgtttagggtgtattcgcgcggggatcgataggtgttattgtagggttttttttttcgtttattgtttgttatttttgacgtttgttttttttttttattcgtagt

SEQ ID NO: 828 - DNA, 5424 bp, Artificial Sequence
  chemically treated genomic DNA (Homo sapiens)
attgcgaatggagaaagagagtaggcgttaggggtggtaggtagtgagcgggagaggggattttgtagtggtatttgtcggttttcgcgcgagtgtattttgggtattcgcggtagcggtatttacgtttgggtcgtttatgtttatttgtttaataggttaggcgggacgcggcgtgtttcggaaattgtatcgttcgcgtggtttttagatagttttttttgtttttgtttttttgtgtttgtgtttttttttttgattattttaaaggaatttttgtagtttttttttataaggtattcgatttttttagatttttgttcgtttttttttttttttcgtatcgaaagattgaaaaagaaagtagtagttaaaacgtattatggtgagattacgttcggttggggtttttaagtttttttaggcgtttttttttttataggtgtttttcgtttgggtttgttttaggttgttcgttgttttagcgtaggaaaagtgtaggaaaattttgtattgaaatttgtttttggaaaattgattttgagttgagttttatttattaggtttagattagggtaggggaattgagttttggtttttgtagtcgtttaatcgttataatagaaattattttttgcgtggggaagttgatatttgcgttgatgatttttttgttttggtttttagaattgaagttaatttatttatttgtagatgtagttttatggttatagagattttatatttttttagtaaggtttggtttttgtttggtttagtgtatttagttatatttgttatcgttgtgtgtgttgtgatattatgtttttagttatttttttgatttaaaaaaattttattatgttgttttattgtgaattaataattaattatgatttttatgtgatttatttttaatttagtttaatttatggttattttttttttttatattttttttaagtatattatttaatttggttttatttgtaagtttattatatttgtaaatttttttttagttttgtttattgtgtttgttttatagtgaatattaattagaattaggaaaaaaatatatttaaataagttaggaatagttaagaaagttagtaatataagtataggtagttatagaaatttttgtttttttgttattttagaaatttttttttttttatatttaatttatgatatttttttagattagtaggatatttgtattaagaatatttagaattttagatgtagaaggaaatttaaaaaatatatagtaatttattagtaaaaagaagagggaagttatattatttttaagtaaatgttatgaatatttagaagaaaatgagatattgtttgatagggtttataaaggaatagtattagagataggatttgaaggattggttatgtttggaaaaagataaaatagaggatttttttgttgtttttgtttttttttgatagagggaaatttgtgagtaaatatatagaggttggaaaggtatgatattgttatttaagaaataaggagtaatattatttggtagaaataaaaagtatataaagaaaagtgtaggaagatacggtggaaagataggtcgggtttagatgtttgattcgtagttgttacgtgttgtaggtttgtataaagattttgttgttgttgttgttttcgtttgttgatattattattaatattttttttattttggaaaatgatttgtttaatttattaatttttatttttattatttttaagttttatggtatattaaattttttgattagtattgtatttgattttagtatattttgttaggagttatcgagttttattaagagtagatttttaattggatagtgttttgtttttttttttttttattttttttgattgttagataatgggtaagaagaggaagtaattaatttaaatataagggtggttagaattattaaaaggtgattgtaaaagatattttgtaatttggatgtttgatatgttttaaaaaagtaataagagttttttgttgttagggaaatattaatttttatagtttaattttttagtaatgaaaatggtttataacgggatttattaaaatgtttgttgagtggataaatgaatatttgaatattttattattttttaggtttaatttttttttttatagttgatttatgggttaaaatttatttttttttattttatggagaataagaaagttgttatgataatttaataaaaatgttaataaggaaaattatttagtgtaaagtaatttttttagttatgttgatgttggtagaaaagtttaagaaatttttatttttttttaagatgttttgttttttttgtatttataatttataattgataatagtatgaaagtatttaaatgtatattatttttatatttgtaaatgaaaggataatggtaattagagatagtatttaaatttttgttatttagagtatggtttttatattagtagtattttataatttataattttgttggaaatatagaagtttaggtttttttttaaattaattgaattagattatttattaaatagaatttttaagtgatttttatgtatattaaagtttgaaaagtattggtttattattaaggtattaagtatgataagttttaaaatatatcgtatgaatttttttaaatttagggatttttagaatttgtatttttatttttttgggttattattgttatgttagtttaaataaagtaatgggattaatggttttatttttattgattttgtggattataaaaaatttataaattaaggggaattaagaacgagatagagaatagtaaaagggtagaaatgagagaagtgttatatatatgttagggttagagttttgttttatttttagtaaacgaataaattatggattgtatggtttattaaattaggataattttttaaatataagaaaaataagataaatttttggttttttatttttttttttttttagtattatttatttttaatttgttttaatgtatttggttaaagtttatattggtaatttgtagtaagatgatgtaaagattttaaaatgttttttttgtatgaatgtaaagttttagttagaaaaattagattttattaggttggcgtttacgtatttttagttttggtatagatatttataaagtagtttggattggaagagattttgatggtaatagaaatgttgtttattatatttttgttaaggagatggtgtttgtgagcgttgtttattatatttttgttaaggagttggtgtttgtgagtagtaaatatagtggtaggtagaataatggtattttaaagatgtttatttgttaatttttagaatttgtgaatatgtaattttatatggtaagagagaagtaaggatgtagatagaattagggttattaattagttagttttgagatgggaatattattttagattaggtgggtgaattaaatgtaattaaaagggtttttgtaaaagaaagattaaagtaatagagttagttagagtcggagtgatgttatgttagaaagaattgataagtaattgttggttttgaaaatagaaagggggttgggtgtagtggttgatatttgtaattttagtattttgggaggcggatgcgggtggattatttgaggttaggagttcgagattagtttgattaatatggtgaaattttgtttttattaaaaatataaaaaattagttgggtatggtggtaggtgtttgtaattttagttattcgggaggttggggtaggagaattgtttgaatttgggaggtggaggttgtagtgagtcgagattacgttattgtattttagtttgggcgagaagagcgagatttcgttttaaaataaaaaaaaagtagaaaagaaaagaaaatagaaggggtttagttaaggaatatgtgtagtttttagaagatgaataaggttagaaaattatttttttttagagtttttgggatagaaagtagttttgttattatttaggttttagtttaatgagatttattttaaattttagatttttatagatgtaagataataaacgtgtgttgtattaagtattaagttcgggggtaatttgttataatagtaataggaaattaaatgttaaagtgtttttggtattggataatggtaaaggttggaagaattgtgtgtagttagtattttaaaaatttagattgtagggtggggggatgggggagggatagtattaggagatatatttaatgtaaatgatgagttaatgggtgtagtatattaatatggtatatatatatatatgtaataaatttgtacgttgtgtatatgtattttagaatttaaagtataataataaaaaataaaataaaataaaaatttagattgttttgaatatattgttagtagaaatatggatgttaattttgttagtgaggttttagaagaaagtgagaggtatggtagagaaaatttgtattattttagggaatatataaattattataaattattatgaatagattgttggtataaatatggatattaaaagtgttacgaataggatataggtggaaatgaggaaagtgttattggaagttgtaggaaaggagattattagttgatatggtttggttgtgtttttatttaaattttatttcgaattttaataatttttatatgttaaaggtagggttaggtggagataattgaattatgggggtaatttttttcgtattgtttttttggtagtgaataagttttacgagatataatggttttataaacgggagtttttttgtataatttgttttgtttgttgttatataagacgtggttttgttttttttttatttttcgttatgattgtgaggttttttttagttatgtggaattgtgagttttttaaattttttttttttgaaaaattatttagttttaggtatgtttttattagtagcgtgagaatagattaatatgttagtatatggtggtagaaaatttagtcgaattatgttttatagatatgtggaaatattgattttggatatttaattgagaagatttttaagtaaaatggtgaaggtatagtttattttttttttgttattgtaaaatgtgagaaaatagagaaagattgaaggaagaattgttaagtcgaaaaagaattagaattttatttgggaaatttttaatttatttatattgtaaattttgttatgttattttttgttatggtaaacgtgtttttttattttgtaagtttgagagattttattattttttatatttgaaaagtttgttatatgtttagatataggaggtttttatatgtttaatttatattaaaataatagttatattgatttttagttgttaatagt

SEQ ID NO: 829 - DNA, 6698 bp, Artificial Sequence
  chemically treated genomic DNA (Homo sapiens)
aatgttatgtgatgatggaggtagaaattgaagttatgtagttgtaaattaagtaatgttaaatattaacggtgatattagaagcgaagagaaagaaatagattttggaatacgtttttttttatagtttttgaaagaggatggttttgttgatatttttattttagatttttagtttttagaattaagagaaaataaatttgttgttttaagttagattaatagaaatttttgtttatagtaatttgttatagtagttttaggaagttaagataaatgtgaacgtgtgtacgttttaaattataaaatgttgtttagagaagttaaagaagatttaagtaaaagagatatatattttaataatatgtaaaaatttaagaatatatagaaattttttatttttagttttgtttttaacgtttttagttgttgatgtataaatttttttttttttttttttttttgagatggagtttcgttttgttatttaggttggagtgtagtggtgtgatttttgtttattgtaagtttcgttttttaggtttaggttatttttttgttttagtttttcgaatagttgggattataggcgtttgtaattatgttcggttaattttttgtatttttagtagagacggggttttattatgttagttaggatggtttttattttttgatttcgtgattcgttgtttcggttttttaaagtgttgggattataggcgtgagttatcgcgttcggttcgttgatgtataaaattatatttttatatattgtatgtttttaaataaaattaataatttttttttttttttttttttttttgagataaagttttgttttgttatttaggttggagtgtagtgatgcgatttcggtttattgtaattttcgtttttttggtttaagcgatttatttgttttagttttttgagtagttgggattataggtatatgttattacgtttagttaatttttgtgtttttagtagagatagggttttattatgttggttaggttgattttaaatttttgattttatgatttattcgttttagttttttaaagtgttgagattataggtatgagttattatatttggtttaataatttttttaaatatatttgttttttaaattatgtggaaaataagatgtagagttataaattaaagttataataatattagtttttagattattatttttgaaaatatattttttttttaaatcgtttagaaaataaaacgtggacgttaggtgtagtggtttacgttagtaattttagtattttgggaggtcgaggtaggtagattatttgacgttaggagtttaagattagtttggataatatggtgaaattttatttttattaaaaatataaaaattagtcgggtatggttattagtatttgtaattttagttattcgggaggttgaggtaggataattgtttgaattagggaggtggatgttgtagtgagttaagattgtattattgtattttagtttgggtgatagagggaaaatttgttttaaaaataaacgaataaataaataaaaaataaaaagtggagatatagattgttgttatggattagtcgggtatgtatgtttgtaattttagttattcgggaggttgaggtaggagaattgtttgaaattgggacgcgaaggttgtgatgagttaagatggtattattgtattttagttggggtaataagagcgaaattttgttttaaaaaaaaaaaagaaaaagaaaaagaaaaagaaatttgatttttaatgttggaagtggggttttgtgggaggtgtttaggttataggggtaggttttttatgaatggtatggtgttattttcgtggtaattagtgatttttatttttttttttttttttttttttttttaattttttgagatagagttttgttttgtttttttaggttggagtgtagtggtgtgattttggtttattgtgatttttatttttcgggtttaagtgatttttttgttttaatttttttagtagttgggattataggtatttgttattatgtttggttaaattttgtatttttagtagagatggtgttttattttgttggttagattggttttgaatttttgattttaggtgatttgttcgttttagttttttaaagtgttgggattataggcgtgagttattgtttttggtttgaattattgatttttatatattgtataaacgtttgtattttatttttttttatttttgttaaatttggtttaaagttgttttataaatagtgaattgtattttaatttaagtatgttaagattttattaatgaaatataaaagtaaaatttaaaaaaagaaaatatgaaaataaaaaaataatgtaaatatttgggagagagtttttaggttttgttagtttttagaatgtatttatttttattatgttggggattttatttttagtattgaggtttatttttagaaggtggatttggtgagtatgaaaaaagggggtgggggagtaattatataaataattgtgtttaggttaggtttttaggatatgagggttttttttgtatggtagaggtatttgatattcgtaattgttgtgtattttgcgaatgattttatggtttaagaatgtatgtttagagttttagttaaggaattaggagtggtaagattttggaaggatgttaatttatgaaattttgagttaagaggttaagttgggtatttgtttttttttttttttttttttgtaggagttttatttttgttgtttaggttggagtataatggcgtgatttcggtttattgtaatttttggtttaggcgatttttttattttagttttttcgagtagttgggattatagatatgtgttattatgtttagttaaatatggagatgcggtttttttatattggttaggttggtttcgaatttttaattttaggtgatttgtttgttttagttttttaaagtgttgggatgataggcgtgagttatcgtatttggttaaggtatttggttttttagattatttatttggtttttttttaagttgtatttttttttttttttttttgttttaaagttttttaatattttttttttttttgaaatggtattttattttgtagtttaggttggagtgcggtggcgtgattttagtttattgtaatttttgttttttgggttaaagtattttttttgttttagttttttaaatagtagggattataggtgtttgttattacgtttggttaatttttgtatttttagtagagatggggtttttttacgttggttaggttggttttaaatttttgatattaagtgattttttcgttttggttttttaaagtgttggagtttggagttataggtttgaatttttgtgtttggtttgtttttttttttagattgagttttgttttttcgttaggttgtagtgttgtggtgcgatttcggttgattgtaatttttgtttttcgcgtttaatcgatttttttgttttagtttttcgagtagttgggattacgggcgtatgttattatgtttagttaattttttagtagagatggggttttattatattggttaggttggttttaaatttttgatttcgtgatttttttattttcgttttttaaagtgttgggattataggtgtgagttattacgtttagtattggtttgttttttaataagtttttattattgttttgtagtttatttttttttggttttttgttttatgttttttagtgtaatttttttttttgaggaggtaagaattgaggttgttgttgatgtgtagggatttattattcggaattttattagtaataggtcgaggatgttagttgaaaatgttatgtaagttgtatgttttttataaatggtagtggtttttatgtttagtaatggttattgtatcgtttttgtatgaaagttttttttataaatttatgttttttttgttgtttttagatttttttttttattttttttatacggtgttttttttattggagtaaattggggtttcgtagggtattttttttttgtaattttttttttttttttgagatagagtttcgttttgttgtttaggttggagtgtagtggtgcgatttcggtttattgtagtttttgtttttcgggtttaagcgatttttttattttagttttttgagtagttgggattataggtacgtattattacgtttcgttaatttttttttttttttttttgtatgtttataaaatagggacggggttttattatcgttggttaggttggtttcgaatttttggttttaagtgatttgtttttttcgggtttttaaagtgtatttggtttttttttttgtatttttatgtgtttgtaatattaagagggagtttttggtttttgggttaaggttagggttttagaagtttagggttaaggttatggtcgtattttaaggacgtgtatttttgtaagaggttgtattagataggtatggaagaggcgtcgttggggtttttttgaatttttgttgggaaaagtaagtggaggtgttttttgaagaaatagggggattttatcgattttaggggttttgttttggtttgcggttttggatcgtttagtttgggtcggggtggggagtagatttcgtttttatcggttggggttgagggtgagggtttcgtttttttaaaggtttagtttggggttttagttataagttttatcggtagcggtattcgtttttttaggtttggtattcgtttttaattaagatggcgcggatggttttaggcgtattacgatatcggcgcgttacgcgattcgttttacgggtatttttcgcgttttttttagcgtcgtagacggtggtcgagcgggggatcgggaagtatggttcgggggtcggcggttgtttgggcggcgttcgggtcgttgttgtggggttgcgcgttggggttgtagggcgggatgttgtatttttaggagagttcgtcgcgggagtgtaaggagttggacggtttttggagttttcgcgtcgatttttttgataatcgacgtcggggtttcgaggagtagtggtatcggcggtcgttgtgggaggtgcgatttcggggtagggtcgggacgattcgaaagttcggcggtgggagtaggggagttcgggtttttcgtagatttttttttttgggcgttttcgagttggggttcgtaggaggttaaaggttaacgggtttgggggcgtcggtttgggggacgggggaataggagtattttggagggtcggggcggattaggtaggaggagaaaaggtttttgtcgagttttttttcgaggtaaaggttgagtttgtgtagtatttttttttttaatatttatttttaatttttaaaaatttttttgagattgggtttgtatttgttttttaggttggggcggagtggcgttagtttaatttttgagtttaagcgattttttcgttttagttttgtaatttagggggtgttaatacgtttggttaattgaaaaaaaaaaaattatttgggttcggtggtttatatttgtaattttagtattttgggaggtggagggcggcgaatcgtttgaggttaggagtttgagattaggttggttaatataatagggtgaaattttatttttattaaaaatataaaaattagttaagtgtggtggtttatgtttgtaattttagttatttgggaggttgagttaggagaattgtttgaattcgggagtagaggttgtagtgagttgagattaggatgttattgtattttaatttgggcgatatagtgagattacgtttttaaaaaaaaaaaaaaggtaaaaaaatttaaaaaaaaaaaaaagatatagggtgttattatttatttagggtggtttcgaatttttggttttaagttatttttttacgttgattttttaaagcgttgattattggtatgagttatttatatattttggttatagcggtatgtattgtatagagttgggttcggggatcgggagaaggtgatagtttagatgttttgaggttagttttgtcgaggtaggaagttttttggtttttaaggtttatatagaggataggatatgatattaggtttaggacgttatttttgttttttttttgatttggatgtgatttgtagagaagtggaattgggtgaggtttgggcggtttttgtttggtttatatttttttattttgattttgtagtatttagtataggagggaaagaggagggggttgggtgttagtgtgtattttatttatagtgttttaagtaaagttttttttatttttttaattagtttttttttttgtgataggtagtggttatttgttttttagttataggtttgaatttttttgtttttggttgggatgtggttttgggtttgtttttgttttaggagatattgtgttttatttattttgaggaggaatttttggttttattggtttaggtgtatagatcgttttggtagttgatttgttattagtaagttatttgttttttttgttaagaattttcgttatgtgttagggtttgtgttaggtttgggggatagcgtgtagtatattggttttggatttttttgggggtttaggagttgagttcggtttttttttttatagt

SEQ ID NO: 830 - DNA, 6698 bp, Artificial Sequence
  chemically treated genomic DNA (Homo sapiens)
attgtggagagaagagtcgggtttagtttttaggtttttaaaagggtttaggattagtgtgttgtacgttgttttttaggtttagtataagttttgatatatagcggggatttttggtagaaaggatagataatttgttgatgataggttaattgttagggcgatttgtgtatttgggttagtggggttaggagtttttttttagagtggatggggtataatattttttgagataggagtaagtttagggttatattttagttagaggtaagaaggtttagatttgtgattaagaggtagatggttattgtttgttatagggaggaaggttggttggaggaatggggggagttttgtttaggatattgtgagtggggtgtatattggtatttagttttttttttttttttttttgtattgaatgttgtaaagttagaataagaggatgtagattaggtaaaagtcgtttagattttatttagttttatttttttgtagattatatttaagttaggaggggaataggggtggcgttttgggtttgatgttatgttttgttttttatgtgaattttgaaaattaagggattttttgtttcggtagagttgattttaggatatttaaattgttattttttttcgattttcgggtttagttttgtgtagtgtatgtcgttgtggttagagtgtgtgggtggtttatgttagtaattagcgttttgggaggttaacgtgggaggatggtttgaggttaggagttcgagattattttgggtaaatagtgatattttgtattttttttttttttttaagtttttttgttttttttttttttttggagacgtagttttattatgtcgtttaagttggagtgtagtggtattttgattttagtttattgtaatttttattttcgggtttaagtaatttttttgatttagttttttaagtagttgggattataggtatgaattattatatttggttaatttttatatttttagtagagatgaggttttattttgttatgttggttagtttggttttaaatttttggttttaggcgattcgtcgttttttattttttaaagtgttgggattataggtgtgagttatcgagtttagataatttttttttttttaattagttaggcgtgttggtattttttaaattgtaaggttggggcgggagaatcgtttgagtttagaagttaggttggcgttatttcgttttagtttgggaaataggtgtaaatttagttttaaaaaaatttttaaaaattaaaaataaatattgaaaggaaggatattgtatagatttagtttttatttcgggaaagggttcggtaagagttttttttttttttgtttaattcgtttcggttttttagggtgtttttgttttttcgttttttaagtcggcgtttttaagttcgttgatttttaattttttgcgggttttagttcggagacgtttaggggaagaagtttgcggggggttcgggtttttttatttttatcgtcgggttttcgggtcgtttcggttttgtttcgagatcgtattttttatagcggtcgtcggtattattgtttttcgaagtttcggcgtcggttgttagagaagtcggcgcggaagttttagaggtcgtttagttttttgtattttcgcgacgggtttttttgggggtatagtatttcgttttgtagttttagcgcgtagttttataataacggttcgagcgtcgtttaggtaatcgtcgattttcgggttatgtttttcggtttttcgttcggttatcgtttgcggcgttaagaaaagcgcgggaggtgttcgtagggcgggtcgcgtgacgcgtcggtgtcgtgatgcgtttgaagttattcgcgttattttggttgaggacgagtgttaggtttggaggggcgggtgtcgttgtcggtagggtttgtggttggaattttaggttaggtttttggggaaacgggatttttatttttagttttagtcgataagggcgaggtttgttttttatttcgatttaggttggacgatttagggtcgtaggttagaatagaatttttgagatcggtgggatttttttgtttttttaaggagtatttttatttgttttttttagtaggaatttaaggaggttttagcggcgttttttttatgtttgtttgatgtagttttttgtagggatgtacgtttttgggatgcggttatagttttgattttgggtttttggagttttgattttaatttaggggttaagagtttttttttggtgttgtaggtatataaagatgtagggagagaggttaggtgtattttgggaattcgaggggggtagattatttgaggttaggagttcgagattagtttggttaacgatagtgaaatttcgtttttattttgtaaatatataaaaaaaaaaaaaaaagaattagcggggcgtgatggtgcgtgtttgtaattttagttatttaggaagttgaggtaggagaatcgtttgaattcgggaggtaaaggttgtagtaagtcgagatcgtattattgtattttagtttgggtaatagagcgagattttgttttaaaaaaaaaaaaaaaattgtagggaaagggtgttttgcgggattttagtttattttagtagggaaggtatcgtgtgggagaggtagaggaggagatttggagatagtaaaggagatatagatttatggaggggatttttatatagggacggtgtagtggttattgttggatatgagaattattattatttgtaaaaagtatgtagtttatataatatttttaattagtattttcgatttgttattggtggagtttcgggtggtgaatttttatatattagtaataattttaatttttgtttttttagaagaaagaattgtattgaggggtataaggtagaaagttagagggaggtaagttgtagagtagtagtaaaagtttgttaaaaagtaggttagtgttgagcgtagtggtttatatttgtaattttagtattttgggaggcggaggtggggggattacgaggttaggggtttgagattagtttggttaatatgatgaaattttatttttattaaaaaattagttgggtatggtggtatgcgttcgtagttttagttattcgggaggttgaggtaggagaatcgattgaacgcgggaggtagaggttgtagttagtcgagatcgtattatagtattatagtttggcgagagagtaagatttagtttaaaaaaaaaagtaggttaggtatagaggtttaggtttgtaattttaaattttagtattttgggaggttaaggcgggaggattatttgatattaggagtttgagattaatttggttaacgtggagaaattttatttttattaaaaatataaaaattagttaggcgtggtggtaggtatttgtaatttttattatttgggaggttgaggtaggagaaatgttttaatttaggaggtagaggttgtagtgagttgagattacgttatcgtattttagtttgggttatagagtgagatgttattttaggaaaaaaaaaaatattaaaaaattttagaataggaaggaaagaaggaaagtataatttggaagagggttaagtgggtgatttaagaaattaagtgttttggttaggtgcggtggtttacgtttgttattttagtattttgggaggttgaagtaggtagattatttgaggttgggagttcgagattagtttgattaatatggagaaatcgtatttttatatttagttgggtatggtggtatatgtttgtaattttagttattcgggaaggttgaggtgagagaatcgtttgaattagagattgtagtgagtcgagattacgttattgtattttagtttgggtaataagagtgaaatttttataaaaaaaaagaaaaaggaaaataagtgtttagtttgattttttgatttagggttttatagattggtatttttttaggattttgttatttttgattttttagttggggttttgaatatatatttttagattataaagttattcgtagggtgtataatagttacggatgttaggtgtttttgttatatagagggagtttttatgttttaggaatttggtttggatataattgtttgtatgattatttttttattttttttttttatgtttattaaatttattttttgaaaatggattttaatattggaaatggagtttttagtatagtgaaaataagtatattttgggaattgataaggtttaaaggtttttttttaaatgtttatattgtttttttatttttatattttttttttttaaattttatttttatattttattagtgaaattttgatatgtttaaattagaatatagtttattgtttatgaggtagttttaggttaaatttaataaaagtaagaaaaagtaggatgtagacgtttatatagtatgtaaaaattagtaatttaggttaggggtagtggtttacgtttataattttagtattttgggaggttgaggcgggtagattatttgaggttaggagtttaagattagtttggttaataaggtaaaatattatttttattaaaaatataaaatttagttaggtatggtggtaggtgtttgtaattttagttattagagaagttgaagtaggagaattatttgaattcgggaggtggaggttatagtgagttaagattatattattgtattttagtttgggggaatagagtaagattttgttttaaaaaattaaaaaaagaaaagaaaagaaaaaagagtgagaattattaattgttacgagaatggtattatgttatttatgagggatttgtttttatgatttaaatattttttataaggttttatttttaatattgagaattaaattttttttttttttttttttttttttttttttttgagatagagtttcgtttttgttgttttaattggagtgtaatggtgttattttggtttattataattttcgcgttttagttttaagtaatttttttgttttagtttttcgagtagttgggattataggtatgtatgttcggttaatttataataatagtttgtatttttattttttgttttttgtttgtttgttcgtttgtttttgagatagattttttttttgttatttaggttggagtgtaatggtgtaattttggtttattgtaatatttatttttttggtttaagtaattattttgttttagtttttcgagtagttgggattataggtgttggtgattatgttcggttaatttttgtatttttagtagagatggggttttattatgttgtttaggttggttttgaatttttaacgttaggtgatttgtttgtttcggttttttaaagtgttgggattattggcgtgaattattgtatttggcgtttacgttttgttttttaaacgatttaaagaaagaatatatttttaaaaatagtagtttaaaagttagtgttattgtaattttagtttgtaattttatattttgttttttatataatttaagggataaatgtatttaaaagaattattaggttaggtgtggtggtttatgtttataattttagtattttgggaggttgaggcgggtggattatgaggttaagagtttgagattagtttgattaatatggtgaaattttgtttttattaaaaatataaaaattagttgggcgtggtggtatgtgtttgtaattttagttatttaggaggttgaggtaggtgaatcgtttgaattagggaggcggaggttgtagtgagtcgagatcgtattattgtattttagtttgggtgatagagtaagattttgttttaaaaaaaaaaaaaaaaaaaaaagaattattagttttgtttggggatatgtaatgtataaagatataattttgtatattagcggatcgggcgcggtggtttacgtttgtaattttagtattttgggaggtcgaggtagcggattacgaggttaggagataaagattattttggttaatatggtgaaatttcgtttttattaaaaatataaaaaattagtcggatatggttataggcgtttgtagttttagttattcgggaggttgaggtaggagaatggtttgaatttgggaggcggagtttgtagtgagtagagattatattattgtattttagtttgggtgatagagcgagattttattttaaaaaaaaaaaaaaaaaaaaaaatttgtatattagtaattgaaagcgttgaagataaagttggaaataaagagtttttatatgtttttgaatttttgtatgttattaaagtatatattttttttatttaggttttttttaatttttttgagtaatattttatagtttaaagcgtatatacgtttatatttgttttagttttttagggttgttataataaattattatgaataaaaatttttgttgatttggtttaaaataataaatttatttttttttagttttagagattagaaatttgaaataaaggtgttagtagagttatttttttttaaaggttgtagaggggaacgtgttttagaatttgttttttttttttcgtttttggtgttatcgttaatgtttggtattatttgatttgtagttgtataattttaatttttatttttattattatatggtatt

SEQ ID NO: 831 - DNA, 5893 bp, Artificial Sequence
  chemically treated genomic DNA (Homo sapiens)
tttgaaatattttgagtttattagatattgttgtaatttaagtgagagtaagtattaaggatttattgagtatatagtagtatatagggaagagaggatttattgagtatattttgtagtatatagggaagagagattagtattttttaagatattttaggggaggataaaatagtgtaatagttaagagtataggtatgaggaatatatagaattgggtttaaatttagttttattttttaaggttggggaatattaaggtaaattatgtgtttatatttttatgtgtttttgtttttaaaatgtaggtaatgttggtatttgttttataataattgcgtaaagattaaataaaatgtttaatggaatatatttattgatgtttgaaataaagtaaaatgttaagtttattatgtattttttatgattagaattaattattatgattaataagtattaataatatattattaaaataagtagtagttattagtagttatagattagggaataaatttacgtatgtgattggtgatttttgaaaagttagagagaaaagaaaattatagaaagaaaatagaaaataaatatagttattttaattttttaagtagaaaagtatgaaaatatttagtttgaagaaaaaataaatgaaagggatgtagtgtaatatttgtatatgtatttatatatttgaagtgttattatatagaaaaaaaagatgtattttttgtgttgttttatggggtaaattaaattggatgtaatttaaataaaattagatattgtatattttattggggggtgtgtttagtatttgggaaaattttgtgtgatttataagtgttttaaatttggaaagggtttttggtaaagaaatgatttttttttttaatttttataattatataagtagatagtgaattaaagttttaaatggtatttaataaagaggttattggggtaagatgattttgaaagttataatggtttttagtatttaagttgttattattttcgtagttttagaaattttttaaggaaatttttttgatgtggttatttaatagtataatagaaaggtgtaagattaagttttttttttatattgattagttgaagattaaatatggtgaagttttttttttttttttttttttttttttttttttgtgttatgaaaaaaagacgattgttttgttttttttaggaattttaagaataaagttaatatttttaattttaaatttattagagatttttttttaaatggagaattattttttttaatatgatttgattcgtagtttttgaatttttgtatttatttgatgatttagttattatatgttagattgtgaattagatattgagtttagggtaggaagaaaaatgggtttttatggaggatatacggaggttgggtatagtggatggtgggagggaacgtagataataaatggaataataattattttattaaaatatagataaatatagttaaaaataatatagagtatataaatttaggtaagatgatatatatgaatgtcgaaaattgtttaagaaaagggtagtagggagttattttttgagtagatgatatttatgttaaacgtggaataaggagaatggagttaattttgaaaattttgggaaaagaggatagaaggtagagggaagagtaagagtaaaaattttgaaataggaggtaagttagtgtttttaaggaaaagttggagtttttatttgaaaattagattttgaagttaagaattaatttgaaaatatagtattatattattttaattaggaaattatggtataaattaggagtttttaaaagtttttttgtgtttatttaaaaatttatataaaatttgtattttaggttataatatattaatttaattggaggaaataaagggattggtgtgatattattatgtttattttatttagtcgtgtatttttagaatttagtatagttttcgattggtatttatagtagtatattggttgaataagtaaggaaggaggtgaagggagggagaaggagagataagtagagagggagagaaaggaagaaggaaaaggaaaaaggaaggaaagaagagaggatggagagagagagggaggtaagaagggagaagagagaagggaaaggaagagataggaggaaggggaggaggaaaggaaagaggaaatatttgtttttatttggttagatatagtgagtgtttcgtatagatagattattattgttttgtgtatttgatttatattatagtaggtatattagtttgaaaagtatatgttaagtgaagaaataaggtatttttttttttttttttttttttagggatttaagaagagagttttgttagttgtttatttaattggtataggaaagagttataggaattgtatgttagggaatatatgattataaattttttaaaagttaaatttgtgtttttgtttatgtgttttatatattgttagttatatagtaggtagttagtattaattatttaaaatgataaatgataaatgattagaattttgtggtagattagtttagttatgaaaaattatttaatattcgtgggttttagtttttttgtgtttttttaataaagcgtcgagtagatggtatttataattattttttatttgtaaattttaatgaatttttaaaatttagtttgagatgagttggattagttgttaaatttatagatatttttagtttggtgtgaaatagggtttttagagagaaatagatatttattgtgaatttttttgtagaaaaggtttgaatagaggggaaagtagggatggtattttaaatttatttcgtagtgattttaaattaggaaatttagttttatatttttgtgataaatttttttttattttggaatgattagtttatatatttaggattgttcgtgagaagttgtttttttttgtattgtaatatttatttgttatttattgatttgagaaatatttattgttaagtgtgttatgagtatttattggtaaataagatagatatagttagggtgtgtttatttaaaaattgtagtttagtggagatataatgattgtaatgtagtgtaataagttttatgataagggaagaagatggaattatataagtatagagtaggggtatatgagaaagataggaagttagggaaggttttgtggaggaagtattatttaattaagagtttaagtagaattggaggttatttaaaaaggagtaggtgtattttaggtgaagatagtataatttagaggaaaaaagaattaaataggattttatttgtgtatatataattttgagattttgttgttttttacgtatttattttattttgagtttttatatttttatttttgaaaatatgattttaatagttgttttaatagtttattgtaagaatagtgatagttatttatttatttttagaaatagtatttttaagatttatgttaatcgttttttttttgttaatataaaattatgtgaattaatttttattgtttatatgaatattaataatattttttttatttggttgatttttgagtataatttttgtaatttaatttgatatttagttataataaatattgattttatggaaggtgttaaattattatgtattgtttaattttaattttttagtaaaatttgttgtagttgttttatatgaattggtagggttttaagaggtattttggattttttttttgttgtttagattatttcgtttgtgttatttattttttcgttttttttaagtttgtatttttattttttttatttattagaggagttttaattttaggtttttttttttttgggatgttttgttgatatttatttttattttttatttagtaaatatttttttttttttgtggtttagttttttgaagttgtaaatattaattttataaatgatttttttaaattatattttgggtaaatatgtaagtatgatatatgtggtaaattgtttatatagtaaattgattttttgggttaggtaggaaagatttttataaaaattttataggaagtaagatgatttagatggagtatttagttattttttgttgaattattttagatttaatttatattttttgttttgtttttttttaatgtttttatatttttatattttttattttaatttattttaatgataaggtttttggtttgttgggttttgtttttgattgtttgtatttattgttttggtatttatttatgtttatttagtaaggtatattttagatagaaatagtttattggttttatagttgtatagtattagttttttagtttaaattttatttttattgaaagatttgttgtattttatgttttttatattgttgtgtgatttattatgagtttgggagttttgtagaattttagaatatttaaatgatttaaattttttaaatatgtttattttatatataggaagttatttttatttggattatcgggttttgatattagaaatgagaaggtttatggttttataatagttattttagtttggtacgtgttttggttttagagatttatagtttagttttttgtttagttgggtggtttttgtttattattttattatgtttatttaatttatgtaaagttaatattataagtagttatttgttttttgtagtgaaaattgtatttattatttttatagttttaagatatttatgtatttttattaataggcgtttaataatttgtattatttaaaatgttttttttgtttattagttgatgatggtcgtaggaaggtgggtttggaagataatagttagtaggttaaggttagatattgatatttgtagttgtttttggtagtttttttgtattaattttaggaattagtttatgattttaggatgtatggaaaaataatttttgtattattattgttaggtaagtgattttattttattttggttttgttatattgggtatgagattatagaataaaatatgaattattttattttagttttattttatttaaattaataaatgagtagtatttttttttttagtttggtggatggattttattggaatttagttattaatgtgggggaaatgatataagggagtttagtatttatggtcgaatttagttttttagtatgagaagtttattttaattttaagtttagttagaattaaaataattttattaaatgttatgagaaatagttttttgtgaataaatgtattgttttgtttgagttataaggagtatttatatgtttatttttttattgtgttgatttaggtgattataagaagttgtattagagtaattgattttggtgaattaaagtaagtatttttaagaatataagtggtaatttttagttttaaattaatttggttattaattagtttttgtaagggtataaataggatataatatgtttagatgggatttggataaagtgtatataattttatattgaggaaattgtgttaatgtgttatttttaatgttagaaatttttaagttttgataatagtttagagttttgttaaaagttagagtggaggtatgtagatttagttggaaagagaggtattatggtttaatttaggatatattttaaagttagtgttagggtttgagtttagttttgtaaatttgagtatagtgtttgatttttggggttttagtttttatttcggtataaaatttttattaagtgtttttttattgtgaggagtagttgttgaagaataaagaagtttatttatttgttagagtgttaataattgttttgataaagtttaaaatttatttaaataagtttt

SEQ ID NO: 832 - DNA, 5893 bp, Artificial Sequence
  chemically treated genomic DNA (Homo sapiens)
agagtttatttagataagttttgagttttattaaaataattgttaatattttagtaaataggtagatttttttgttttttaatagttattttttatagtaaaagagtatttggtggaaattttgtatcgaaatgaaggttgaaattttagagattaaatattgtatttaagtttataaagttggatttagattttaatattggttttaaaatgtgttttaagttagattataatgtttttttttttagttggatttatatgtttttattttggtttttaataaggttttgaattattgttagaatttgggaatttttaatattgaaggtaatatattgatataatttttttaatgtaaaattgtatatattttatttaagttttatttgggtatgttatgttttatttgtatttttataaaaattggttggtggttaaattgatttgagattgaaagttgttatttatgtttttagaaatatttgttttaatttattagaattagttgttttgatataattttttatagttatttaaattaatatagtaagaaaataaatatataaatgttttttataatttaaataaagtaatatatttatttatagagagttattttttatagtatttgataaaattattttaattttagttagatttagaattgaagtaagttttttatattagaaaattggattcggttataaatattgggtttttttgtgttattttttttatattggtagttgagttttagtaaaatttatttattagattggaagaggaaatattatttatttattgatttaaataagatagaattgaaatagggtagtttatattttattttatgattttatatttaatataatagaattaagatgaaataaaattatttatttgataatagtaatataaagattatttttttatatattttgagattatgagttggtttttgaagttagtgtaaaaaaattattaaagataattgtaagtgttagtgtttggttttagtttattagttgttattttttaggtttatttttttgcggttattattagttgataggtaggggaggtattttaaatgatgtaagttgttaagcgtttgttaataaagatatatggatattttggggttgtgaaagtggtaagtataatttttattgtaaggaataggtggttatttgtgatattaattttgtataagttaaatgggtatggtaaggtggtagataggagttatttaattggataaagaattggattgtgaatttttgaggttagggtacgtgttaggttgaggtagttgttgtggagttatagatttttttatttttaatgttaagattcggtggtttaaatgaaagtgattttttatatgtgaaatgaatatatttgagaaatttaaattatttgagtgttttgaggttttgtaagatttttaaatttatggtgagttatatagtaatgtaagagatatgagatgtaataaattttttagtgaaaatagagtttgaattgaagagttagtgttgtgtagttatgaaattagtgagttgtttttgtttgaaatatattttgttaagtaagtataaatgaatattaagataataaatgtaaatagttagaaataaaatttaataaattaaaaattttattattaaagtaggttaaaatgaaaggtatggaaatgtgaggatattaaagggagatagaataaaaaatataaattagatttgaaatggtttaatagaaggtgattggatattttatttaaattattttattttttgtaagatttttgtgaaagttttttttgtttgatttagaaaattaatttgttatgtaagtaatttgttatatatattatatttatatatttatttaaagtgtggtttaaaaaaattatttatgaagttaatgtttgtagttttaggaaattggattatagagaaaaaaaagtatttattggataaaagatggagataagtattagtagagtattttagagagggaggagtttgagattgaggtttttttaatggatggagggagtggagatgtagatttgggagagacggaagaatgaatgatatagacggggtaatttgagtagtaagaaaagaatttagagtgttttttaaggttttgttaatttatgtaaaataattgtagtaaattttattaaaaagttaaaattaaataatatataataatttaatattttttataaagttagtgtttgttatggttggatattaggttgagttgtaggaattgtgtttaagagttaattaagtaaaggaaatgttgttgatatttatataagtagtaagaattaatttatatgattttatattgataaagggagagcgattagtatgagttttaaaaatgttatttttgaaaatggataaataattgttattatttttataatggattattagagtaattattaaaattatgtttttaaaaataaagatatagagatttaggataaaatggatacgtggaaaatagtaagattttaaaattgtatatatataaataaaattttatttgattttttttttttttgggttgtgttgtttttatttggaatatatttatttttttttaggtggtttttaattttgtttaagtttttaattgaatagtattttttttataaagttttttttgattttttgttttttttatgtgtttttgttttatatttgtgtggttttattttttttttttattataggatttattatattatattgtaattattgtgtttttattggattataatttttaagtggatatattttgattatgtttattttatttattaatgagtgtttatggtatatttgataataaatattttttaaattaataaatgataaatgaatattgtagtgtaaaggaaagtaattttttacgggtagttttgggtgtataggttgattattttaaggtgaaaagaaatttattataagaatgtgaagttaaattttttaatttaaaattattacgaagtaagtttgagatattatttttatttttttttttatttagattttttttgtaaaggagtttatagtgggtgtttgtttttttttaaaaattttattttatattaagttaaagatatttatagatttggtaattagtttagtttattttaggttgaattttggggatttattggggtttatagatgaaaaatgattgtagatattatttattcggcgttttattgaaaaggtataagaaaattgaggtttacgggtgttaaatgattttttatggttaaattagtttgttataaaattttggttatttgttatttgttattttgagtagttgatattgattgtttattatgtggttgataatgtgtgggatatataagtaaagatataggtttggtttttaaagaatttatagttatgtattttttggtatatagtttttgtaatttttttttgtgttaattaaatagatagttagtaaggttttttttttggatttttgaaaaaaaaaaaaaaaaaagagatgttttgtttttttatttaatatgtgttttttagattgatgtatttgttgtggtatgagttagatgtatagggtaataatgatttgtttatgcggagtatttattgtgtttaattagatgaaaataaatatttttttttttttttttttttttttttttttttgtttttttttttttttttttttttttttttttttgtttttttttttttttttattttttttttttttttttttttttttttttttttttttttttttttttttttttgtttatttttttttttttttttttttatttttttttttgtttatttaattaatatgttattataaatattaatcgggaattgtgttagattttggggatatacggttgaataaagtaggtatgatgatattatattagtttttttgttttttttaattaaattagtatattatgatttagaatgtaaattttgtatgaatttttaagtaaatataaaaaagtttttggagatttttggtttatgttataattttttagttgaagtgatatagtattgtatttttaaattggtttttagttttagaatttgatttttagataaaagttttagtttttttttgaaaatattaatttattttttgttttagaatttttgtttttgtttttttttttgttttttgttttttttttttagaatttttagggttggttttattttttttgttttacgtttagtataaatgttatttatttagaaaataattttttgttattttttttttaagtagttttcggtatttatgtgtattattttatttgggtttatatgttttgtattatttttgattgtgtttatttgtattttaataagatagttgttgttttatttattatttgcgtttttttttattatttattgtgtttaattttcgtgtattttttatgggagtttatttttttttttgttttgggtttagtgtttggtttataatttgatatgtagtgattgaattattaaatgagtgtaggaatttagggattgcgaattaagttatattagaaaaaatggttttttatttggaagaagatttttggtaagtttagaattagaaatattggttttatttttaagatttttggagaaagtaaggtaatcgttttttttttatagtataaaaaaaaaaaaaaaagaaaaaaaaagaaaaagattttattatgtttagtttttagttaattagtatgggggaaaaatttgattttatatttttttgttatattattaagtagttatattaagagagtttttttggagggtttttgaagttacgaagatgataatagtttgggtattggagattattgtagtttttagggttattttgttttagtgatttttttattaagtgttatttaaggttttaatttattatttgtttgtgtagttgtagaaattaaaaaaaaaaattatttttttgttaggaattttttttaaatttggggtatttgtaagttatatagagtttttttaaatgttgggtatattttttagtagagtatgtagtgtttaattttgtttgagttatatttagtttggtttgttttatggagtaatataaagaatatattttttttttttgtgtaatagtattttaaatatatgaatatatatataaatattatattatattttttttatttgttttttttttaaattaaatgtttttatatttttttgtttaaaaaattagagtagttatgtttgttttttgttttttttttgtaatttttttttttttttgattttttagaaattattaattatatacgtaggtttgttttttagtttgtaattattgatagttattgtttattttaataatatattattaatatttattaattatgatagttaattttaattatagaaaatgtatagtaagtttaatattttattttgttttaggtattagtaagtgtattttattaaatattttgtttaatttttacgtaattattataaggtaagtgttaatattgtttgtattttaaagataaggatatataaaaatgtgggtatataatttgttttaatgttttttagttttgagaagtaaaattagatttgaatttagttttgtgtgttttttatgtttgtgtttttaattattgtattattttatttttttttagggtattttagaaaatgttgattttttttttttgtatgttatagagtatgtttagtagatttttttttttttgtatgttattgtatgtttagtagatttttgatatttgtttttatttggattatagtaatgtttaatagatttagaatgttttaag

SEQ ID NO: 833 - DNA, 7631 bp, Artificial Sequence
  chemically treated genomic DNA (Homo sapiens)
taaatttttttgggttaaagaagtatgttttaatttattgtaaggaagttaaaaattttgaaaaaagattagacgaatggttaattagaataaatagtgtagagaagattttaaatgatttgaaggagttgaaaattatattacgagaatttcgtgatacgtgtataagttttaatagttaattttattaagtggaagaaaggatgttagtgattgaagattaaattaatgaaattaagtaagaagataagattagagaaaaaagagtgaaaagaaatgaataaagtttttaagaaatatgggattatgtgaaaagattattttgatttgtgtttttgaaagtgatggggagaatggatttaagttaggaaatttttaggatattatttaggagaatttttttaatttagtaaggtaggttaatatttaaatttaggaaatatagaaaatattataaagatattttttgagaagagtaaatttaagatatataattgttagatttattaaggttgaaatgaagggaaaaatgttaagggtagttagatagaaaggttaggttatttataaagggaagtttattagattaatagtagattttttagtagaaagtttataagttagaagagagtgggggttaatatttaatatttttaaagaaaagaatttttaatttagaattttatatttagttaaattaagttttataagtgaaggagaaataaaattttttatagaaaagtaaatattgagaaattttattattattaggtttgttttataagagtttttgaaggaagtattaaatatggaaaggaataattggtattagttattgtaaaattatgttaaattgtaaagattattaatgttaggaagaaattgtattaattaacgagtaaaataattagttagtattataatgataggattaaatttatatataataatattaattttaagtgtaaatgggttaaatgttttaattaaaagatatagattggtaaatgggataaagagttaagattaattagtgtgttgtatttaggagattaatttttatgtaaagatatatataggtttaaaataaagggatggaggaagatttattaagtaaatggaaagtaaaaaaagtaagggttgtaattttagtttttgataaaatagattttaaattaataaagattaaaaaagataaggttattatataatggtaaagggattaatgtaataaggagagttaataattttaaatatatatgtatataatttaggaggatttagatttataaagtaagtttttgaagatttataaagagatttagatttttatataataataatggaagattttaatattttattattaatattagatagattaacgagatagaaggttaataaggatatttaggatttgaatttagttttgtattaagtagatttaatagatatttataaaattttttattataaattaatagaatatatattttttttagtaatatatcgtatttaatttaaaattgattatataatttgaagtaaagtattttttagtaaatataaaagaatagaaattataataaattgttttttagattatagtgtaattaaattagaatttaggattaagaaatttattgaaaattatataattatatggaaattgaataatttgtttttgaatgattattgggtaaataataaaatgaagttagaaataaagatgttttttgaaattaatgagaataaagatataatatattagaatttttgggatatatttaaaggagtgtgtagagagaaatgtatagtattaaatgtttataagagaaagtagaaaagatttaaaattaatattttaatattataatgtaaaaaattagagaagtaagagtaaataaatttaaaagttagtagaaggtaagaaataattaagattagagtagaattgaaggagttagagatataaaaaattttttaaaatattaatgaatttaggaggtggttttttgaaaagattaataaaaatgatagattattagtaagattaataaagaaaaaaagagaagaattaaataaatgtaataaaaaatgaaaaaggggatattattatcgattttatagaaatataaattattattagagaatattataaatatttttatgtaaataaattagaaaatttagaagaaatggataaatttttggatatatttatttttttaagattaaattaggaagaagttgaatttttgaatagattaataataggttttgaaattgaggtaataattaatagtttatcgattaaaaaaagtttagaattagatggatttatagttaaattttattatatgtataaagaggagttggtattattttttttgaaattattttaattattagaaaaagagggaattttttttagtttattttatgaggttagtattattttgatattaaagtttggtagagatataataaaaaaaagagaattttagattaatatttttgatgaatatcgatgcgaaaatttttaatataatattggtaaattaaatcgagtagtatattaaaaagtttattcgttatgattaagttggttttatttttgggatgtaaggttggtttaatatatgtaaattaataaatataatttattatataaatagaattaataataaaaattatatgattattttaatatatgtagaaagggtttttaataaaatttaataatttttatgttaaaaatttttaataaattaggtattgatgggacgtattttaaaataataagagttatttatgataaatttatagttaatattatattgaatggatagaaattggaagtattttttttgaaaattggtataagataaggatgtttttttttattatttttatttaatatagtgttggaagttttggttatagtaattaggtaagaaatagaaataaagtgtatttaattaggaaaatagggagttaaattgtttttgtttgtagatgatatgattgtatatttagaaaattttattattttagtttaaaatttttttaagttgatgagtaattttagtaaagtgatgagtaattttagtagagttttaggatataaaattaatgtgtaaaaattataagtttttttatatattaataatagatagagagttaaattatgagtgaatttttatttataagtgttttaaagagaataaaatatttaggaatttaatttataagggatgtgaagtatttttttaatgagagttataatttagtgtttagcgaaataaaagaagatataaataaatggaaatatattttatgtttatggataggaagaattaatattatgataatggttatattgtttaaagttatttatggatttaatgttatttttattaagtttaataatgattttttttatagaattggaaaaaattattttaaagtttatatggaattaaataagagtttatattgttaagataatcgtaagttaaaagaataaagttggaagtattatgttacgtgtttttaatttatacggtaaggatatagtaattaaaatagtatggtattggtaatggttgtataattatgtaaatatattaaaatttattgatttatatattttaaatgggtgatttttatggtgtgtgaattatgttttataaagttgttagaagttaatataaatggaagagtaattatttatataaaaataaataaaattgttaatgttttaagaattttttagtaggtgtagttaattataatttgatttttttaagtttgtattaaaattatttattaaaattaatagtagggtttttattgttgttattgaaaatgattaatttttgatatatttgtaatatttgagaaaaagaaatgtaggggttttagtagggtttttttttaaggttatttgatttttaaagaagtaattattaggtttgaagttattaggatgttaattatggggatggttggtttagtatttaatattttgatagtatatttgattatgtatattgtatcggagattatatttttagtttagaaaaagagttgaatttattttaaatagaaagtatattgtatattgtttttttagggattgaggttgattttttttagagtgagatattttttaatattggaataaaaatgatttttatttttttttttatttaaatttgtttagaagaaagtaaggaagaaaggtaggaagtaggggtcggggggggcggggagggagggaaatatatttattataaagtgggaaggaaaatttaggtagggagtttttatgtaaataaattttttttttgtttttagtttgtatttggtttattaatttttatataatttaaggagatagttagaaagaattttgattggtgattaattttgaggatttttattaaaattttaatttaagttttcgagagtttttagttatggatattatagataatattgtagatgatgaaagcgtttttaaaattatagttgagatattttatagttttttttggtgtattttgatggtaataaggttttttgttttttttttattttgtagaattttagcgttttttttagtagttttagtaaaggaaagtttgtttgttggtagtgagttattatttattatttttatttatttggatttggttttttaatgttaaattttgaaatttgaaaaaaaaaatgaaaggaaattatattttttttatttttagtatatagatagaggtagttaagaattgaaaatagatttttaggttgattgatgtgggatagtagttataatgaggaatttttatagatttttggtatttttttttttagttgtcgttttttttttgttaatttttgaaggtaagattgattttttttatttttattatgattatgaagtaaaatggagtagatttttaatgaatttttggtaatattatttttttatattgaaagaagatgtttttttttaagttttataatgtttagttaggtataatggtatatgtttgtagttttagttattaggaacgttgaggtggaaggattatttgagcgtaggagtttgagtttaggttgggcgatatagtgagattttgtttttattttttttttttaaatagtatttttttttggattttaaatatgtttgtattttagaaaaaaaaaattttttttttttataattattttgtaaaagatagtagaattattaatgtttattgttgttaatttgtaatttgaaaattgttaaaaaggataatgtaaaaatgagttaataaaatttttttgttcgtaaaataaatagtattttttaggaaaggaatagtggtaatttagttagtttagttttttttgttgtagaaaatgtatagataaagataattaagataaatttgatttagatattaaaagtgaattaggaattattagaatttttatatttatttttttggtttagagattttttggtaataaattaaggcgtgaggttagtttttttattaattttttgggtgtgttatagtattttttattaagttaattttttgtttattaaatggtaattaatatttttgtttttgtgtgagttgagtatgtatgggttaaaatgttgtataatttatggtattattattgaaagggtgatagtttttggggagttttagattttttttgaagaatttgttaggaagtgaggattatttttaagttgtggtaatatggagttagttacggttttttttaggatttattagtttttggaggtagggatttatgtaataatttgttttgttaggaatttttaaagaattttggtttattatatttaggtgtatatttggtttatgtatttaaatatgagaagattttgggaggttgaggcgggtgttttataaggttaagagatggagattattttggttaatatggtgaaattttgtttttattaaaaaaataaaaattagttgggtatggtggtacgtgtttgtaattttagttacgtaggaggttgaggtaggagaatcgtttgaattagagagttggaggttgtagtgagttaagatcgtgttattgtattttagtttggtgatagagcgagattttgttttaaaaaaaaaataaaaaagagagagagagagaagaaatataaaaataataaggttgtaggatatttgggataaaggttggttatgttataagtagggtatagtatgattatatttaggtatgttaaattttttataatagaaaaatatagggtagataaatttagttatattttttttttaaaggaaaataataaaagtaatttgttgtgtttttttttgttttttgtgtttagagagggtagtgtgggtttatataaggaatagatagtaaagtaaggtatagttgaaatttatttgtatatgaattattttaggaaaattgggattgggtgaaggttttttgtttttataagttttttatttttttgtttttagagtttagaattttttttttttagttttttttttaaaagtagagatttttgtttttttaaattatattagttatattttatgtggttatttttttttttgtttttatttttattaaattttacgaaaggtttttatagttgttattaatatttgtttgtgaatttggtaatgatttagttttaattatggaataagaggtattgtgttttatttaagaaattatgagttttagtaaaattattttgggagaatttaagaatatttggtgtaggaggtggagtattcggagtgtattattaagatataaggttttttttatttgtatgtatggtttgttttgtgtttagtttttattgttttttaataatgggtttttattttaagattattattaaggaaatgttatttaggtagaatttttggtatatggtattttttttttttttttttttattttattggaaaagattttagattaaattttatggtttggtttagagattgaaggggaggtgtaatcgatgttatttttttaatttatgagtgagaatagtgtagtttaataattaaaagttttataatgattaaaggattgaggggtagggttatagttaaacgatgttaatatcggtttataagttatatttttgtaatggtttggggttaaaagggaagttatgaggtttttaaaagttttatttattttttttaaattaatagttagttaaaaagggtgggagtatttgaggttgttattattattggtattttttgtagtaattgttgatggtaaagattaaggtagagttttttgttttggggtttgaggttgttggtttgtgatatttagtttaatgattttggaatagttaatggtttcgtttttgtgggtggaaaaataggattttagagtttaataggaataggatttgtattagatgtttgcgggtttatatagagtaaaagtaggggaaatgtttttatttagattttttttttgagtgtaaaaagtatggttggttttagaaatatgattttgtgtagagttttttgggggtgagtattaatttgatttgtttttttttattgaataga

SEQ ID NO: 834 - DNA, 7631 bp, Artificial Sequence
  chemically treated genomic DNA (Homo sapiens)
tttgtttaatggaaaaagataaattagattggtgtttatttttaaagagttttatataaagttatgtttttaagattagttatgttttttgtatttagagaggaagtttggatgagagtattttttttgtttttattttatgtagattcgtagatatttgatgtaaattttatttttgttggattttagggttttgtttttttatttatagaagcgaggttattgattgttttaggattattaggttggatgttataaattagtaattttaggttttagggtagaaagttttgttttggtttttattattaatagttgttgtaggaaatgttagtggtagtgataattttaagtgtttttattttttttggttaattattaatttgggggaaatagataagatttttagaagttttataattttttttttaattttaagttattgtaaaaatatagtttatgaatcgatattagtatcgtttagttgtgattttattttttagttttttggttattatgagatttttggttattaaattgtattgtttttatttataagttaagaaaataatatcgattgtattttttttttaatttttagattaaattatggggtttaatttaaggttttttttaatgagatagggaagagaagagagaagatattatatgttaagaattttgtttaagtgatatttttttgatgatagttttgaagtagagatttattgttaaggaatagtgagaattaaatataaggtaaattatatatgtagatagagagaattttatgttttagtgatatatttcgagtgttttattttttgtattagatgtttttggatttttttaaaatagttttgttgagatttatggttttttgaatagggtatagtgttttttgttttataattaggattaagttattgttaaatttataggtaagtattaatgatagttatagaagtttttcgtaagatttgatgagggtaagagtaaggaggagagtgattatatgaaatgtggttagtgtgatttgaaaaagtagaggtttttgtttttaaaaaggaaattgggaggaagaaattttaggttttagaaataaaagggtaaagagtttatagaaataaaagatttttatttaattttaatttttttagggtgatttatgtatagatagattttaattgtgttttgttttgttgtttgttttttatatgggtttatattgttttttttgaatataggaaataaagaggagtatagtaggttgtttttgttgtttttttttgaagaaaagatatggttggatttatttgttttgtgtttttttgttatggaggatttaatatgtttgaatatagttatattatgttttgtttataatatagttaatttttgttttaaatgttttgtagttttgttatttttatatttttttttttttttttttttttttgttttttttttgagatagagtttcgttttgttattaggttggagtgtagtggtacgattttagtttattgtagtttttaattttttggtttaagcgatttttttgttttagttttttgcgtagttgggattataggtacgtgttattatatttagttaatttttgtttttttagtggagataaggttttattatgttggttaagatggtttttattttttgattttgtgaaatattcgttttagttttttaaagtttttttatatttaggtgtataaattagatatgtatttaaatatgataaattagagttttttgggaatttttggtaaggtaggttattatataagtttttgtttttaaaagttgatgaattttgggaaaaatcgtggttggttttatattgttatagtttgagagtagtttttattttttagtaggttttttaagggaaatttagagttttttaagagttgttatttttttagtggtaatattatgaattatatagtattttaatttatgtatgtttaatttatataaaagtagaaatattggttattatttggtagataaaaaattagtttaataaaaaatattatagtatatttaaagggttaatgagggaattggttttacgttttaatttattgttaaagagtttttagattagagaaataagtataaaaattttaataatttttgatttatttttggtgtttaggttagatttgttttaattgtttttatttatgtattttttgtagtaggaaaggttgagttgattaagttgttattattttttttttggaaggtattatttgttttacgaataagagagttttgttaatttatttttatattgttttttttggtaatttttaagttataaattggtagtaataagtattggtggttttgttattttttgtaaaataattatgagaagaaaagattttttttttttaaaatatagatatatttaaaatttaagaaagaatgttatttaaaaaaaaaaaatagagatagggttttattatgtcgtttagtttggatttaaatttttgcgtttaagtgatttttttattttagcgtttttagtagttgggattataggtatgtgttattgtgtttggttaaatattataaggtttgggggaaaatatttttttttagtataggaaggtaatattgttaaaagtttattgaaagtttgttttattttgttttatggttataatggaaatgagaagaattagttttatttttaggaattagtaggagagaaacgataattgagagagaggatgttagaaatttataggagttttttattgtggttgttgttttatattaattaatttgaaaatttgtttttagtttttaattgtttttatttatatattgagagtaaaaaggatgtggtttttttttatttttttttttaagttttaaagtttagtattaggaaattaaatttaaataagtgagaatggtggatgatggtttattgttagtaggtaggtttttttttgttaggattgttgaggggggcgttggaattttatagggtaggagaggggtaagggattttgttgttattagagtatattagggaagattgtaaagtgttttagttatgattttgaagacgtttttattatttgtaatattatttgtagtatttatgattggaaattttcgaagatttaaattagaattttaataaaagtttttaaaattggttattaattaaaattttttttagttgtttttttggattatataagaattagtaggttaagtgtaagttgaggataggagggagatttatttatatagaggttttttgtttggatttttttttttattttgtggtgagtgtgttttttttttttttcgtttttttcgatttttgttttttgttttttttttttatttttttttgaataggtttaggtgagaaaagaagtgggagttatttttgttttaatgttggggaatgttttattttaagaagagttaattttagtttttggaggaatagtatgtagtgtgttttttatttgaaatgagtttagttttttttttgagttgaggatgtggttttcgatataatatatatggttagatgtgttgttaggatgttgggtattgaattaattatttttatagttaatattttgatgattttaaatttagtggttatttttttagaaattaagtgattttagaagggagttttgttgagatttttgtattttttttttttagatattataagtgtattaaaggttaattatttttagtaatagtagtgaggattttgttattggttttggtgagtaattttagtgtagatttaaaaaagttaaattgtaattaattatatttattgaaaaatttttaaaatattgataattttgtttatttttatgtgaatggttgtttttttatttatgttgatttttaataattttatgagatataatttatatattataaaggttatttatttagagtgtatgagttaatggattttagtatatttgtatagttgtgtagttattattagtattatgttgttttggttattgtatttttgtcgtataggttgaagatacgtagtatgatgtttttagttttgtttttttggtttacgattgttttggtaatgtgggtttttgtttggttttatatgaattttaaagtagttttttttaattttgtgaagaaagttattgttaagtttgatggggatggtattgaatttataaataattttgggtagtatggttattgttatgatattgattttttttatttatgagtatggaatgtgtttttatttgtttgtgtttttttttatttcgttgagtattgggttgtagtttttattgaagaggtgttttatattttttgtgagttggatttttaggtattttattttttttgaagtatttgtgaatgggagtttatttatgatttggttttttgtttgttattggtgtataggaaagtttgtgatttttgtatattgattttgtattttgagattttgttgaagttgtttattattttgttgaagttgtttattagtttaaggagattttgggttgagatgatggggttttttagatatataattatgttatttgtaaatagagataatttgattttttgtttttttagttgaatatattttatttttgttttttgtttgattgttgtagttagaatttttaatattatgttgaataagagtggtgaaagagggtatttttgttttgtgttagtttttaaagggaatgtttttagtttttgtttatttagtatgatattggttgtgggtttgttataaatagtttttattattttgagatacgttttattaatatttagtttattgagagtttttggtatgaaggttgttgaattttgttgaaggttttttttgtatgtattgagataattatgtggtttttgttgttggttttgtttatgtgatggattatgtttattgatttgtatatgttgaattagttttgtattttagggatgaagttaatttgattatggcgaataagttttttgatgtattgttcgatttggtttgttagtattgtattgaggattttcgtatcgatgtttattagggatattggtttaaaatttttttttttttgttgtgtttttgttaggttttggtattaggatgatgttggttttataaaatgagttagggaggattttttttttttttagtgattggaatagttttagagggaatgatattagtttttttttatatatatggtagaatttggttgtgaatttatttggttttggattttttttggtcggtaggttattaattattattttaattttagaatttgttattgatttatttagagatttaatttttttttggtttagttttgggagggtggatgtgtttaggagtttatttattttttttagattttttagtttatttgtatagaggtgtttatagtattttttgatggtagtttgtatttttgtgggatcggtggtgatatttttttttttattttttattgtatttatttgatttttttttttttttttttattagttttgttagtagtttgttatttttgttgatttttttaaaaaattattttttggatttattgatgttttgaagggttttttgtgtttttagtttttttagttttgttttgattttaattattttttgttttttgttagtttttgaatttgtttgtttttgtttttttagttttttgtattgtgatgttagggtgttgattttagattttttttgtttttttttgtgggtatttagtgttatatatttttttttatatatttttttaaatgtgttttagagattttggtatgttgtgtttttgtttttattggttttagagaatatttttatttttgattttattttgttatttatttagtagttatttaggagtaggttgtttagtttttatgtagttgtgtggtttttagtgagttttttaattttgagttttaatttggttgtattgtggtttgagagatagtttgttgtgatttttgtttttttatatttgttgaggagtgttttattttaaattatgtggttaattttagattaagtgcgatgtgttgttgagaagaatgtatattttattgatttgtgatggagagttttgtagatgtttattagatttgtttggtgtagaattgagtttaagttttggatatttttgttaattttttgtttcgttgatttgtttaatattgatagtggggtgttaaagttttttattattattgtgtgggagtttaaatttttttgtaggtttttaaggatttgttttatgaatttgggtttttttgaattgtgtgtatatatatttaggattgttagttttttttgttgtattgatttttttattattatgtaatggttttgttttttttggtttttgttggtttaaagtttgttttattagagattaggattgtaatttttgttttttttgttttttatttgtttggtagatttttttttatttttttattttgagtttatgtgtgtttttgtatggagattggttttttgaatatagtatattgattggttttgattttttattttatttgttagtttgtgttttttaattggggtatttagtttatttatatttaagattaatattgttatgtgtgaatttggttttgttattatgatgttagttggttattttgttcgttagttgatgtagtttttttttagtattgatggtttttataatttggtatggttttgtagtggttggtattagttgtttttttttatgtttagtattttttttaggagtttttgtaagataggtttggtgatgatgaaattttttagtatttgtttttttgtaaaggattttattttttttttatttgtgaagtttagtttggttggatatgaaattttgggttgaaaatttttttttttaagaatgttgaatattggtttttatttttttttggtttgtagattttttgttgagagatttgttgttagtttgatgggtttttttttgtgggtaatttgatttttttatttggttgtttttaatatttttttttttattttaattttggtgaatttgataattatgtattttgggtttgttttttttaaggagtatttttgtggtgttttttgtattttttgaatttgaatgttggtttattttgttaggttggagaaatttttttggataatattttgaaggttttttaatttggatttattttttttattatttttaggaatataaattaaaatggtttttttatatagttttatattttttggaggttttatttatttttttttatttttttttttttaattttgtttttttgtttgattttattaatttgatttttaattattgatatttttttttttatttgatggaattggttattgaagtttgtgtacgtgttacgaagttttcgtggtatggtttttagtttttttaggttatttaagattttttttatattatttattttagttagttattcgtttaatttttttttaaggtttttagtttttttgtaatgggttagaatatgtttttttagtttagagaagtttg

SEQ ID NO: 835 - DNA, 6132 bp, Artificial Sequence
  chemically treated genomic DNA (Homo sapiens)
tttgtgatggtggttgggtaatgataagaataggtaataagggaaaattaaaggttgttttagtagatatttaaattttagaaaaataatagatgtatgtttgttttagaaatatttttttttttttatttttgttttttttttaatttttattattatagaagtaaaatggaagtattatattttttattttaatatgttatttaagtttttttttgttgatagattttttattttaaattatttttgattttatgtatatattttaggaattttgattagtattttattttaataggaatatagagataatttttaattgagataagaattttttttttataggttaagtgtggtggtttatatttgtaattttagtattttaagaggttaaagtgtgtagattatttgaggttaggagtttaagattagtttgggtaatatggtgaaattttgtttttattaaaagtataaaaattcgttgggtatggtggtatatatttgtaattttagttatttcggaggttgaggtacgagaattatttgagtttagggagcggaggttgtagtgagttaagatcggattaatgtattttagtttgggtgatagagtaagatgtcgttttaaaaaataaaataaaataaaaaaatagatttttttttttataatatagttgagttttatggttaaatgaaatttagggttaatttttggttttttatgtttgtaagttttgattttgttatgatttaagagaatgattaagtttagggaaattaggttataatattagaattaaatgttatgtatgagtgtgggaatgttatgttattgtgttgtttttatttatttgtaaggattggttttggttatttcgaaaagggattagttgtggtttagtgaaaggttaatatttaagagtatttttttttatgggtaaggtatgatatttttttatagattaagaatagtagggaaataaggaataaaagggaagagcgtgtgtaatatgaataaatttttttattattatatggtagttattgaggtattttttttttttaatagaattagaatttaatattagagatatagataaaagatttttattttttagtatttttttaatttttttttttaagtttttgaaaaatataggagatggtgaagtttgtagaatatttatattattaaaattagaaataaaagtggagatattattattaattttagagaaattaaaaggattataaaaagaatattatttatatttgtatattaataaattaggtagtttagatgaaatggataaattattagaaatatagaaattattaaaatagatttaagaagaaatagaaaatttaattagatgtttattttattattgttatttaatattgtattggaatttttaaatagagtaattaggtaagaaaatgaaagaaaaggtatttaattatgaaggaagaagtaaaattatttttatttgtagatgatatgattgtatataaagaaaattttaaataatttatataaaaattagtagagttaataagtaaatttaataaattttagggtataaaattagttgtgtttttatatataaatttataatgaataataaaaaaaggaaattaagaaaataattttttttataataatattttaaagaataaaatatatgggattaaatttaattaaggaagtgaaagaattgtatattaaaaattataaataattgttgattaaatggaaagatgttttatgtttacggatagggatatttaatattgttaaatggtaatattttttaaagtaatttatagatttaatgtaatttttgttaaaattttaaatggttttttttgttgaaatggaaaagttaattttaaaatttatatgtaattttataggatttaaaaaagtaaaattaatattgaaatagaaaaataaagttggagtatttatattttttaattttaaaatttataagttatagtaattaaaatagtatggtaaaggtataaggatagatatatggattaatggaatagatttagagtttagaaataaatataatatttatggttatttgatttttgataaggattgttaagggggttttgaatatttagtggggaaagaataatatttttaataagtggtgttggaataattggatagttatgtgtaaaatattttagtagatttttattttatgttatatataataattaatttaaaataaattaattttaaatataagggttaaaattataaaatttttagaagaaaataggcgtaatttttatggtttttgatttgttaatggatttttaaatttgatattaaaagtataagtaataaaagataaaattgatatatttgaatgtataaaatttttttaatttgtatatggaatgataatattaagaaaatgaaaagataatttgtagaatgggagaaaatatttataagttatatatttgataagggttgagtatttagaatatataataaatttttttaatttaataatgaaaataaaaataacgtaattttaagaatgggtaaaggatttgaattaatatttttttaaagaagatatgcgaataattagtaaatatatgaagtgatgtttaatattattatttataaaggaaatgtgaattaaaattatatgatatattattttatatttattaggatgaagataataattttaaaataataagtgttagtaaggatgtagagaaataggaatttttttatgttgttgataagtaatgtaaaagggtataattattgtggaaaatagtttggtggttttttaaaaaattaaaaataggattattgtataatttagaaattttaaaagtatatatatttggtatatatttaaaagaattgaaaatatattgtttatgtagaaatttgtatataaatgtttattattgttgtattagttataatagttaaaagatgaaaataatttaaatgtttattgatagatgaataaataatttgtggtataaatatataatgggaatattatttttttattaaaaagaacgaatattggtatgtgttatagtttgtatgaattttagaaatattattataagtgaatgtagttagttataataggttatgtattgtgtgatttcgtttatatgaaatatttagaggtggtggttgtagattttgaatgtgttaaatgttattgaattgaatattttaaaatggttaattgtatgttatgtgaattttattttaattttttaaatgggttataaatttatgtttagtataatttttttttaattttaaaaaatgtagatattatatgagaaaaaatgtgttagagtatattttaagatattaaagatggttattagtgaatgatgagaaattaggtaatgtttattattttcgttttgttaaaattatttaaaaattatttgtatattaaattttttaatgtttaggaaagaaagattatagttgtattgattaagatttttacgagtatggggaaaatgtttaatttgtagggttaattaaggataaaataaattgtattgtatgtataatgtgattttaagtatttaaaatatattgtttatggtaatagttagtttgtgggagataggttaaaaagtgatattttttttttttattttttaaatttttttaataaatatatattatgattataattagaaaaaattatttttaaaacgtttattatggggtaagttaggtttaaaaaatagaagtttgataaatgtagttggtttgttattgataaggaagacgtttatattggaattttatattttgagatatattattttttatagaaaaatttttttatagaaaatataaaggtggaaataaattataagaatcgaattatgtagagagatttagttgttttttaatagaattgggtacgggttgtttagaaataataattttttatatttattataatgatagtattagtgtagtttgtttagtaaatgtttattgtgagtttgttatgtgttgagtttgttatgtaagaagtgtggttttttggataggagatagaatattaaataatataattattgatttttggttgtttggtatgtttttttattttatatggtattagtaatttagtattataaacgttttttagagaattagtttttttttatttttggttttagtggtttgagtagattgattttagtttatttaaagtggatttgatttttagtaatttattaatttagtttaataaaatgttaagtataggatttttattgaaagtatttagaaaagaggtggatttttatattaaatatttgtaattaaataagggatgttagaaattttttagaaaggaagttatgataataaatgggttgttagatgggtttagtagatggtggttatgttttgttattgttttgtgtattgtgttattatagttttttttaaattgtattttggtttttggtattttcgtttttttaattagatggttagttttttaagtgaaggagatatatttttaatatgtttggttttagtataatagaagggtttaaatatatatttgttaaagaaattattttgatggatttagtagtatggttatgaggtattggcggttttattattgggaatttaggtttttggtgttttagtatttttattggttgatattatattttataatttattttataggtttgggtttttgttttgggttgaataggtggtttattttgagttattagttgtgggtgatgatgtggttattgtatgatttttatataagtatttagaggacgttattaggtagaggtagtgggggtgggtagtatttatagaaaatttgtgatgagatattataaaattagaggggaatatgaagttattgagtttgttttatttttttttttttttaagagttaaaagagagtaaggaggaaataatagtagttttaattagggtagtttttttgagaagatgtaattaattttgtttttgttggttttttttttgttgtttagggtagatgtaggtgagtgatcgtttttattttcgggggtttaattttattttataggttttttgttttttttttatatttttgatttatttatttattaggaatgttttgaattttagtttttattttattaagattttttaagtgtgatgttggataagttattagtaggaatggtagagtagtaggttatttttaagaagagttagtgggtattattttttttttagagtttatttttgttatttggagagtaggatttttttagaagtaaatggtagaggatgggaaattagaaaagagaaatattaaattattttagagtaggtttggtttttgtttttgggataagataggtgttttttttattgtttatttaggagagaaatttagagtttagttgatagtagaattggtataattattgtttttagaatattgttaatgtgtttgtttagttttattttttaattttgttttttttttttggtttttggtggtttttttttttttaaggatgaggtattacggtaggttttagtttttttgttttttagaattttattagtattgttttattagtttttatttagaggttaattggagttagtttattatgtagttatgaatatttattgggtatttattatatgttaggttttaggaaataggatatgatagtatttagatttttttatttatattttggttattagaaagtagtattattttagatattataggatttataagggttttggaaatttatttgaaataaagtaaagttaggagaggaatgattaggagtttttgggattttattgtttttaagataggtatgttcgtttttaattatatatggaagaaagatttatagattaaagtttgttgttttttttttttttagagtaggaaattgaagtttttttttttaggttatttttaattttaggttattttaggtttttaaatgtttaggagttttggagttattaagtaggtgtttatttagtagattttatgggtgtttataagtagatagattttttttttagg

SEQ ID NO: 836 - DNA, 6132 bp, Artificial Sequence
  chemically treated genomic DNA (Homo sapiens)
tttgaaggaaaagtttgtttgtttgtgggtatttatggaatttgttgggtgggtatttgtttagtggttttagaatttttgggtatttgggagtttgggatagtttggagttgggagtggtttggaggaaggggttttaattttttgttttgaaaaagggaagaatagtagattttggtttgtaaattttttttttatatgtagttgaaggcgagtatatttgttttagggatagtgaaattttagaggtttttgattattttttttttgattttgttttgttttaggtgagtttttaagatttttatgagttttgtggtgtttaggatagtgttgttttttaatggttagggtgtaagtggagggatttagatattgttatattttgttttttagagtttgatatgtagtgggtgtttagtaaatgtttatggttgtatgatggattggttttagttagtttttggatgagggttggtagagtagtgttggtggaattttagaaagtagggaagttggggtttgtcgtagtgttttatttttggaaagaggggagttattaaaggttagggaagaaaagtagagttggagaatgggattgagtaaatatattaatagtgttttgaggatagtgattgtattaattttgttgttagttgagttttgggttttttttttaagtagatagtgagagaagtatttgttttattttagaaatagaagttaggtttattttagaataatttaatattttttttttttagttttttattttttgttatttatttttaggaaagttttattttttaggtgataaaggtgggttttggggaagggatagtatttattggttttttttgagaatggtttgttgttttgttatttttgttgatagtttatttagtattatatttggggggttttggtagaatgggagttggagtttagaatatttttggtagatagatggattaggaatgtggagaaagggtaggagatttgtgggatggggttgggttttcgagggtggagacggttatttatttgtatttgttttgggtagtaggaggaaggttagtagaagtaggattggttgtatttttttaggaaggttgttttggttggagttgttgttgttttttttttgtttttttttagtttttgggagaggaaagaggtggagtaggtttagtgattttatgtttttttttggttttgtggtgttttattatagattttttgtaaatgttgtttatttttattgtttttgtttgatgacgttttttgggtgtttgtgtgagaattatgtagtgattatattattatttatagttgatgatttagagtggattatttatttagtttagagtaggaatttaagtttatgaagtgaattgtaggatgtggtattagttagtagaggtattggagtattagaaatttgagtttttagtgatagaatcgttaatgttttatggttatgttgttaaatttattaggatagtttttttagtaggtatgtgtttgagtttttttgttgtgttagaattaagtatgttggagatgtgttttttttatttagagagttgattatttggttgaagagacggaaatgttaggagttagagtatagtttggggagggttatggtagtataatatataaggtagtaataaagtatggttattatttattagatttatttagtaatttatttattattatagttttttttttagagaatttttaatattttttatttagttataaatgtttagtgtgagagtttattttttttttgaatgtttttaataaaagttttgtatttgatattttattgggttagattaatgaattgttaggagttaaatttattttgggtaggttggggttagtttatttaagttattagaattaagaatgagaaagggttggttttttaaaggacgtttgtggtgttaaattgttgatattatatgaagtgaggaagtatgttaggtagttaaagattagtagttgtgttgtttagtattttgttttttgtttagagagttatattttttatatagtaggtttagtatataataggtttatagtaaatatttgttaaataaattatattaatgttattattataatggatgtgaaagattgttgtttttgaatagttcgtgtttaattttgttaaaagataattaagtttttttatatggttcgatttttgtgatttgtttttatttttatattttttgtgaggaaatttttttatgaggaatggtatattttaaaatatagaattttagtgtaaacgttttttttgttaatagtaagttaattatatttattaaatttttattttttgaatttagtttgttttatagtagacgttttaaaaataattttttttgattatagttataatatatgtttgttaagaaaatttggaaagtaggaagggaaaatattattttttaatttgttttttatagattgattgttattataagtagtgtgttttaaatatttgggattatattgtatatataatgtaatttattttatttttgattaattttataaattaagtattttttttatgttcgtagaaattttagttaatataattatagttttttttttttaggtattaaaaaatttaatatgtaagtaatttttaaataattttagtaaagcgaaaataataaatattatttaattttttattatttattgataattatttttaatgttttgaaatatgttttagtatatttttttttatgtaatatttgtattttttaaaattaaaaggggattatgttaaatataagtttatgatttatttaaaaaattgaggtaaaatttatataatatataattaattattttaaagtatttaatttagtgatatttagtatatttaaaatttgtaattattatttttggatattttatataaacggaattatataatatatgatttgttgtggttggttatatttatttgtaataatgtttttgagatttatataagttgtagtatatgttagtattcgttttttttaatggaaaaataatatttttattgtatgtttatattataagttatttgtttatttgttaatggatatttgggttgtttttattttttggttattgtagttaatgtagtaataataagtatttgtgtataaatttttgtatgaataatatgtttttagtttttttggatatatattaaatatatatatttttggaatttttgagttatataataattttatttttaattttttaaggaattattaaattgttttttatagtggttgtatttttttgtattgtttattagtaatataggaaagtttttatttttttgtatttttgttgatatttgttattttaaaattattatttttattttaatgggtgtaaagtagtatgttatatggttttgatttatattttttttatgagtaatgatgttgagtattattttatgtgtttgttggttattcgtatattttttttggagaaatgttgatttaagttttttgtttatttttaaaattgcgttgtttttgtttttattgttgagttggaagagtttgttatatattttggatatttagtttttattagatatgtggtttgtaaatatttttttttattttgtagattgtttttttatttttttgatattgttattttatgtgtaaattaaaaaaattttatgtatttaaatgtattaattttattttttgttgtttgtgtttttggtgttaaatttaagaatttattgataaattagaaattatgaagattacgtttgtttttttttaagagttttatggttttggtttttatatttaggattgatttattttaaattaattattgtatgtgatataaggtaggagtttattagagtattttgtatatggttatttaattgttttagtattatttgttgaagatattattttttttttattgaatgtttaagatttttttgataatttttattaaaaattaaatggttataaatgttgtgtttatttttggattttgaatttattttattgatttatatgtttatttttatgtttttgttatgttgttttaattattgtagtttgtaagttttgaaattgagaagtgtaagtattttaattttgtttttttattttaatattggttttgtttttttggattttatggaattatatatgaattttaggattggtttttttattttagtaaagaagattatttgaaattttgatagagattgtattgaatttatagattgttttgggaagtattgttatttaataatattaagtatttttattcgtgaatatgggatatttttttatttaattagtaattatttgtggtttttagtgtataatttttttatttttttggttaaatttagttttatgtattttattttttgggatgttattataaaggaaattgtttttttagttttttttttttattgtttattgtgggtttgtgtatagaaatataattgattttgtattttgaaatttgttgaatttgtttattaattttattagtttttgtgtggattatttgggattttttttgtatatagttatgttatttgtaaatagaaatagttttatttttttttttataattggatatttttttttttatttttttatttaattgttttgtttaggaattttagtgtaatattgaatagtagtgatgaagtgagtatttggttggattttttatttttttttgagtttgttttggtagtttttgtgtttttagtaatttgtttattttatttagattatttaatttgttggtgtataaatgtagatagtattttttttatagtttttttaatttttttaaggttggtagtaatgtttttatttttatttttaattttagtaatataagtgttttataaattttattattttttatattttttagggatttggggagaaaaattaaggaggtgttgaagaataaaagttttttgtttatatttttgatgttagattttgattttgttagaagagagaggtattttagtggttattatatggtaatggaaaagtttatttatattatatacgttttttttttttattttttatttttttgttgtttttaatttgtagaagaatgttatgttttgtttatgaagggaaatatttttgggtattagttttttattgaattatagttagttttttttcgaagtggttaaggttaatttttataggtaaatgagaatagtataatgatatgatatttttatatttatatatgatatttgattttgatgttgtgatttgatttttttgagtttgattatttttttaagttatggtaaagttagaatttataggtataaggagttagaagttggttttagattttatttgattatgagatttagttatgttgtagagaagaaaatttgtttttttgttttgttttgttttttgagacggtattttgttttgttatttaggttggagtgtattggttcgattttggtttattgtaattttcgttttttgggtttaagtgattttcgtgttttagttttcggagtagttgggattataggtgtgtattattatgtttaacgaatttttgtatttttagtggaggtaggattttattatgttgtttagattggttttgaatttttggttttaagtgatttatatattttggttttttaaagtattgggattataggtatgagttattatatttgatttgtagagaagaaatttttgttttagttaaaagttatttttgtatttttattaggataggatgttagttagaatttttgggatatgtatataaaattaaaaataatttgagataaaaaatttgttagtaaagaagaatttaggtaatatattagagtggagaatgtggtatttttattttgtttttgtggtagtaaggattgggaagagggtagagatgggaagagaaaagtgtttttaggatagatatatatttattatttttttggagtttgagtatttattagaataatttttaatttttttttattgtttatttttattattgtttagttattattataaa

SEQ ID NO: 837 - DNA, 8254 bp, Artificial Sequence
  chemically treated genomic DNA (Homo sapiens)
agattttagtatagaaataaaagttatattatttttattttttaaaattttttgtgggttaatatatatgtgttatgtggattttgttgtggtcgtcgtttttgtttgtttttttatttgtgtgcgtgttggtttcgtggtagtttaagtttcgttgagttgtgtcgggtaggttgtcgtggagttcggtttggttagggatgttggttttgttgaataggatttttagatcgttttttagtttatgttggcggtgtgtcggcggtatttttacggtgtaggttagtttttattttggtttttttttgcgtttttttatagtcgttatttttgcggtgtcgttttcggggtatcgttatttttttagttcgtttattttggtttttttttgcgtttttttattgttgttattcgtgtagtgtcgttttcggggtattgttagttatttttttagtttatcggagagtttggaaagtaaagtttggcgttcgttgggtttcgttatttagggacgtttttgaggttagacgtttgttttttacgcgttatgtatttttataaaaagtattgggtttgtgggttgggtttggggttgtttgtttgttttttggtgtttttttatgcgggtattgtgggattcgtatattttggtagtagttagttttagagtttagagtcgtgtttggtcggtgataggggttcgagtttattgtttgcggttgtagtttcgtttttgttttttgttaaatggggttagcgtgtcgtttggttttgttgtgttattttcggaagtttttttgtttttagttttggggggatatttttgacgcgtgttttggaggtggagtcgggggtaggtttttcgtaggttttggtgtgcgcggtgtagttttttatagggtcgggtgtatacggtgttttttaggaagtttgagttaatttgttttttttttttgttagaggttgggatggttaggttttttaggtttagaattcggaggtcggggtggttaggtttttaggtttagaattcggaggtcggggtggttaggttttttacgtttagaattcggaggtcggggtggttaggttttttaggtttagaattcggaggtcggggtggttaggttttttacgtttagaattcggaggtcggggtggttaggtttttcgggtttagaattcggaggtcggggtggttaggtttttcgggtttagaattcggaggtcggggtggttaggtttttcgggtttagaattcggaggtcggggtggttaggtttttcgggtttagaattcggaggtcggggtggttaggtttttcgggtttagaattcggaggtcggggtggttaggtttttcgggtttagaattcggaggtcggggtggttaggtttttcgggtttagaattcggaggtcggggtggttaggtttttcgggtttagaattcggaggtcggggtggttaggtttttcgggtttagaattcggaggtcggggtggttaggtttttcgggtttagaattcggaggtcggggtggttaggtttttcgggtttagaattcggaggtcggggtggttaggtttttcgggtttagaattcggaggtcggggtggttaggtttttcgggtttagaattcggaggtcggggtggttaggttttttacgtttagaattcggaggtcggggtggttaggttttcgggtttagaattcggaggttgggatggttaggttttcgggtttagaatttagaggttgggatggttaggtttttcggtttagaattcggaggtcggggtggttaggttttcgggtttagaattttgttgaggttacggagaggtttaggtcgtttttgcgttttttattttatttgtgttggttttcgtttttagggatggttttgttttttgtttttgggtttttttagttgttttttttgtttttgcgttgaggaaggtttttgttttttagtggggtagtatgggttttttttgttgtcggtatcgttatttttttttagtttttgatgggttttttgggttgtgtttcggggcggggtaggcgggtgtgattgtattgcgttcgtttagttttttattcgtattttttgtttttttcgagtttttttttttgttatttttttttttggagttttttacgtatagggttttgttttaagtggtcgttatacgtcgttttaagagaaatttgagcgttggggtgagcgtcggatttgggggaggggggtcgggtaggggtcgagtttaggtacgtgggtggcgtttttatttattttgtttttttaggaagtaggttttggggattaaggtggacgcggagcgtgacggcgtgaaggtgtttattacgttggtcgagtattgcgtgaagattaaggcgtcggcgttcgacgagggtttagattttttttacgacgattattacgaggacggcgaggtggaggaggaggtcgatagttgtttcggggacgatgaggatgattttggtacggaggagttttgatattattagaataaatttgtcgagtttattttattagggtcggattcgtggttttttagacgatagattattttacggaggttttgtgttggttttcgttttttttggttgtttcgttttggttttttttttttttttatgtttgttttgggtttttacgtgttttagagaagaggggttgttttatcgttatttacgttattcggggttcggtggacgggtttagggtgggagcggtcggtttatttgttttttcgggaggggagttgagttcgatttttatcggggttttttagttttcggattggtcgtatttcggaggagttacgggggcgttgttgggaacgtgggcggggggtcgttttttgatattattagtttgggaggtttaggtgtagcggttcgaggggttcggttttgtttgttagttttaggttttggagttacgtttagtatagagtggacggatttatcgtggtcgatttttttttttgttttggtttgtttgaaatttaaataaaattattttatgagaggttagagaagttgtgtttgggagggagaggtagtttttacgtttatgagtgattgtatacggttagttttattgggattttggttacgttaggtgtggatttgggaggtttgttttgggaggtacggggagtagtcgggtttcgcggtttgtacgtttttatgatttgggttagataggtttgggtagtattttttagtttgcgggataggggcggttagaaagtttttagagttttttttttttgtgattaggtgtatttagtgggacgggagttgtttttgtaggtatttagtaaagtttcgtcgcgggtttatagtcgtttgggcgttgattttagcgttttagggtttttaggattatagatgttttcgattagtatttcggcggttttagtttcgtttaggtatattttcggggtggggagtcgtggttttgggtatatagggtaggtattttacgttttggtgttaggaagtttttagtatcgttttattatatgttatggaggaaagttcggagtttttatgttttttcggggtatcgttttttaggaatttgtttgcgtttcgtttttgggtattcggaaagtcgtttagtggttgatttagggtcgaggagttgtgaggatgaggttttttattaagttgggatagaaaatggggttttggggttttagtaaattatggttttcgggattaaatttggcgttcgtttttattgtgagtgaagtgttattggtatagttatatttaggttttaggattatttatagttgtttggtttggtttggttttgtttttgagatatagttttgtgttgtttaggttggagtgtagtggtgcgatttcgttttttgggtttaagtgatttttttgttttagttttttgagtagttgggattataggtttttattattatgtttagttgatttttgtatttttagtagagatggggttttattatgttggttaggatggtttcgaatttttaattttaggtgatcgttcgtttcggttttttaaagtgttgggattataggcgtgagtcgtcgcgttcggtttaaatttatttatttttgagatagggttttgttttgttatttaggttgaagagtagtggtgtaattacggtttattgtagttttaatttgggtttaagcgatttttttgttttagttttttaaagtgttgggattataggtgtgagttatcgttttcggttagtgtttttatttatgaagattaaaaattagaatagcgtaaatattcgttcgttggtgaatgtataaatatagcgtggtttagttatataatgggatgtgatatagttataaaaaggagcgaggttttgatataggttatagtttggatgtattttgaggacgttatgttgggagagacgttaacgtaataggttttgtgtgattttatttttgggaggtttttagagattaatttagaggtaggaagtagtggtcgggcgcggtggtttatgtttgtaattttagtattgggaggtcgaggtgggtggattatttgaggtcgggagtttgagattagtttggttaatatggtgaaatttcgtttttattaagaatacgaaaattagtcgggcgtggtggtgggtatttgtagttttattattcgggaggttgaggtcggagtatggcgtgaattcgggaggcggagtttgtagtgagtcgagatcgtattatcgtattttagtttgggcgatagagcgagattttatttttgaaaaaaaaaaaaaaaaaaaagtgttattttgttaggtgtgatgatggtagtgtggttttatttcgagttttttttgagaaatattttttaaaatgtttaaggatggagggtggagggtgtgtagcggtgggcggggttgtgatcgttattttattttttttataggaagcgcgtgtggggaggttcggggtcggggttagtatttatattgggtttttatagcggtatggaggtttgcgtgtttttattgttggtgttggttttgggggttttgttagtaggtgagtgggagtcgggatgtaggggggatattgaggtttagcgttttcggtgggtttttggatgggaggggtgggcgcgggcgtcgatattttgggtgtaagagcggagatttatttttgtttggagggggattgaggtttggggtatttcgagttttttacgttttatttcgagtggatatttcgggatcgtgggagagtgtggtgtttatcggtttatttcgtttattttttcggtagtagttagaaggtaggggttacgtttatattcgaggtgtagagtaggagattgagatttggcgaaggagatgttgatttaggattgtttagttgggagggtagagttgggattcgattttcgttggttgtttgttattattaagggtttggttgggattaggtgtttagtagtgagggagaagggaggtgggtggcggtttttttgtattttagttggattgagtgataggggtttttgatgagttggggatttaagaagatggatagaggtaggaatttagtcgttagttattattatttttttttttatttttatttttttttatttatgggtttattattttttttttttttttttttttttttttttatttttttttttttttttttattcgttcgtttatttattatttttttttttatttttttatttatttatttattatttatttttttatttatgggtttattatttattttttttttttttttttcgttttttttttttttttttcgttagtttatttatttattatttttttttttttttatttttttatttattcgtttatttattatttatttttttttttaatttttttttttttttttattcgttatttttttttttttttttttatgtatttatttatttatttattatgttttttttttttttttttttttttttttttttttttttttatttatttattatttatttttttttttattttttttttttttttttcgtgtttttgtgtatttattcgtatttgtagggttcgtgttgttttaggtttgtttttttgtttgattggaagagataggttaggtatgagattgtgtagagcggaggaaatacggagggtaagagggcgggtggggggtcgttgtaggagacgagtataaattaagggaggaagtcggtgggggaaaggtacgtaggtagttaagtgagatagataaaggtttagggtgtaggtagtttgtaggtatagttagatttgtatttttgttatttaggttggagtgcgatggtgttatttcggtttattgtagttttcgttttttggttttaagcgatttttttgttttagtttttcgagtagttgggattataggcgtttgttattatgtcgggttaattttgtatttttagtagagatagggttttttcgtgttggttaggttggttttaaatttttaattttaggtgattcgtttgtttcggttttttaaagcgttgggattataggcgtgagttatcgcgttcggtttattttttttttttaagatggagttttgttatttttgtttaggttggagtgtaatggtacgatttcggtttattataatttttgtttttcgggtttaagcgatttttttgttttagttttttaagtagttgagattatagatgttcgttatttcgttcggttaattttttgtatttttagtagagacggggttttatcgtgttagttaggatggtttcgattttttgatttcgtgatttatttgtttcggttttttaaagtgttgggattataggcgtgagttatcgtattcggttttaatttttgtatttttagtatagacggggttttattatattggttaggttgatttttaatttttgattttaggttgtttgtttattttgattttttaaagtgttgggattataggcgtgagttattgtatcggttcgtaagcggggatttgatttttaaagtatgatggggatttagagaagattttgagttgatttacgttatattatgaaattaatttttttatatttatgattgatttaaaataatttttgtatagttttattaggaaattatgtattatataatttatttatttaaagattatattttttgttgggtatagtggtttacgtttgttattttagtattttgggaggttaaggagggtggattatttgaggttaggtgtttgaggttagtttggttaatacggcgaaattttgtcgttattaaaaatataaaaaaattagtcggacgtggtgatgcgtttttgtaattttagttattcgggaggttgaggtaggagaatcgtttgaatttaggaggtagaggttgtagtgagttgagattacggtattgtattttaggttgggtaatagagtgagattttattttaaaaaaaaaaaaaaaatggttaggtgtagtggtttatatttgtaattttagtattttgggaggttgagatgggtggattataaggttaggagttcgagattagtttggttaatatggtgaaattttatttgtattaaaaatataaaaattatttaggcgtggtggtaggtgtttgtagttttagttattcgggagattgagttaggagaatggtatgaatttaggaggcggagtttgtagtgagtcgagatcgtgttattgtattttagtttgggtgatagagcgagattttgttttaaaaaaaaagaaaaaaaaagttttttttaagagattgggttttgttgtgtcgtttaggttggtttcgaatttttggttttaagtgattttttttttttagtttttcgaagtgttgggattataggggtgagttatttatattcggtttgatgtgcgttttgaaggatttttgtggttgtggggtttagtggggtttggggaggttttggagaggggattgggaggtggtttggggggaatatgatgggggtgatgagagggggatgggagggatgaagggtagtttatacgtattagtttaaaagtttcggggaatattggggattttattaggatggtatatttgtttggggttttgggtttttgagttgggtaaggatagtcgtagtaggtagtaggggtatgtagttttaatttggttttttgttttttattttggtagg

SEQ ID NO: 838 - DNA, 8254 bp, Artificial Sequence
  chemically treated genomic DNA (Homo sapiens)
tttgttaggatgggggataaagagttaggttggggttatatgtttttgttgtttgttgcgattgtttttgtttagtttagaggtttaggattttaagtagatgtgttattttaatgaagtttttagtgtttttcgaaatttttaggttgatacgtgtgggttgttttttattttttttattttttttttattatttttattatgttttttttaggttattttttaattttttttttaggatttttttaggttttattgggttttatagttataggagttttttaaaacgtatattaggtcggatgtgggtggtttatttttgtgattttagtatttcgggaggttgaggagggaggattatttgaagttaggagttcgagattagtttgggcgatatagtaagatttagttttttaaaaaaaattttttttttttttttttttgagatagagtttcgttttgttatttaggttggagtgtaatggtacgatttcggtttattgtaagtttcgttttttgggtttatgttatttttttgatttagtttttcgagtagttgggattataggtatttgttattacgtttggataatttttgtatttttagtatagatggggttttattatgttagttaggttggtttcgaatttttgattttgtgatttatttattttagttttttaaagtgttgggattataggtatgagttattgtatttggttattttttttttttttttgagatggagttttattttgttatttagtttggaatgtagtgtcgtgattttagtttattgtaatttttgttttttgggtttaagcgatttttttgttttagtttttcgagtagttgggattatagaagcgtattattacgttcggttaatttttttgtatttttagtagcgatagggtttcgtcgtgttggttaggttggttttaaatatttaattttaggtgatttattttttttggttttttaaagtgttgggatgataggcgtgagttattgtgtttagtaagaaatgtagtttttaaataagtaaattgtatagtgtataattttttaataaagttgtataaaaattattttaaattaattataaatataaaaggattgattttataatgtaacgtaaattagtttaaaattttttttgaatttttattatgttttgaaaattaagttttcgtttgcgggtcggtgtagtggtttacgtttataattttagtattttgggaggttaaggtgggtagatagtttgaggttaggagttggagattagtttggttaatgtggtaaaatttcgtttgtattaaaaatatagaaattaaggtcgggtgcggtggtttacgtttgtaattttagtattttgggaggtcgaggtaggtggattacgaggttaggagatcgagattattttggttaatacggtgaaatttcgtttttattaaaaatataaaaaattagtcgggcgaggtggcgggtatttgtaattttagttatttgggaggttgagataggagaatcgtttgaattcgggaggtagaggttgtggtgagtcgagatcgtgttattgtattttagtttgggtaagaatagtagaattttattttaaaaaaaaaaaataggtcgggcgcggtggtttacgtttgtaattttagcgttttgggaggtcgaggtaggcggattatttgaggttgggagtttgagattagtttgattaatacggggaaattttgtttttattaaaaatataaaattagttcggtatggtggtaggcgtttgtaattttagttattcgggaggttgaggtaggagaatcgtttgaaattaggaggcggaggttgtagtgagtcgagatggtattatcgtattttagtttgggtgataagagtgtaagtttagttgtgtttgtaagttgtttgtattttgggtttttgtttgttttatttagttgtttgcgtattttttttttatcggtttttttttttggtttatgttcgttttttgtaacggttttttattcgtttttttgtttttcgtgtttttttcgttttgtatagttttatgtttggtttgttttttttagttagataggagggtaggtttagaatagtacgagttttgtaaatacggatggatatatagaagtacgggagaaaggaaggagggatggaaggaggaatggatgatggatggatgggagggaggagggaaggaggggggaaaggaagagagaggtatgatggatggatgggtggatatatggaaggagggagggaaggatgacgggtggagggaaggagggaggttgaaaggagggatggatgatggatggacgggtgggtggaagaatgggaggaaggaggaatgatgggtggatggattggcggagggaaggaagggggaacgaaaggagggagggagggatggatgatggatttatgggtagagggatggatgatggatgggtgggtggaagaatggaaggaggaatgatgggtggacggacgggtagagggaaggaaggggagatgagggagggagggagggagggagggagggatgatggatttatgggtggaaggaaataaaaatgggaggaaggatgatgatgattgacggttggatttttatttttgtttatttttttgggtttttaatttattaagagtttttgttatttagtttagttggaatgtaggggagtcgttatttatttttttttttttttattgttgggtatttagttttagttaagtttttggtggtggtaggtagttagcggggatcgagttttagttttgtttttttagttgggtagttttaggttagtatttttttcgttaagttttagttttttattttgtatttcgggtgtgagcgtgatttttgttttttggttgttgtcgggaggatgggcgaggtgagtcggtggatattatatttttttacggtttcgggatgtttattcggggtgaagcgtgaggagttcgggatgttttaggttttagtttttttttaaataaggatgaattttcgtttttatatttaggatgtcggcgttcgcgtttattttttttatttagggatttatcgagagcgttgggttttagtgttttttttgtatttcggtttttatttatttattgatagggtttttagggttagtattagtagtgaagatacgtaggtttttatgtcgttgtggagatttagtgtgggtgttggtttcggtttcgagtttttttatacgcgttttttgtgggggaggtgaggtgacggttatagtttcgtttatcgttgtatattttttattttttatttttgagtattttagaaagtgttttttaaagaggattcgagatgaagttatattattattattatatttgataaagtaatattttttttttttttttttttttagagatggagtttcgttttgtcgtttaggttggagtgcggtggtgcgatttcggtttattgtaagtttcgtttttcgggtttacgttatatttcggttttagtttttcgagtagtgggattataggtgtttattattacgttcggttaattttcgtatttttagtagagacgaggttttattatgttgattaggttggttttaaattttcgattttaggtgatttatttatttcggttttttagtgttgggattataggtatgagttatcgcgttcggttattattttttgtttttgaattggtttttagggattttttaggagtggaattatataggatttgttgcgttggcgttttttttagtatgacgtttttaaggtgtatttaggttgtggtttgtgttagagtttcgtttttttttgtggttgtgttatattttattgtgtggttggattacgttgtgtttatgtatttattagcggacggatatttgcgttgttttagtttttggtttttatgaataaagatattggtcgaaggcggtggtttatatttgtaattttagtattttgagagattggggtaggaggatcgtttgagtttaggttggggttgtagtgagtcgtaattgtattattgttttttagtttgggtgatagagtaagattttgttttaaaaataaataaatttaggtcgggcgcggcggtttacgtttgtaattttagtattttgggaggtcgaggcgggcgattatttgaggttgggagttcgagattattttggttaatatggtgaaattttatttttattaaaaatataaaaattagttgggtatggtggtgggagtttgtagttttagttatttaggaggttgaggtaggagaattatttgaatttaggaggcgagatcgtattattgtattttagtttgggtaatataagattgtgttttaaaaataaaattaaattaaattaagtagttatggatgattttgagatttgggtgtggttgtgttagtaatattttatttataataggggcggacgttaggtttggtttcgagggttatggtttgttgagattttagggttttattttttgttttaatttggtgggaaattttatttttatagtttttcgattttgaattagttattgagcgatttttcgggtgtttagaagcggaacgtaggtaggtttttggaaggcggtgtttcgggagggtatgggagtttcgagtttttttttatgatatgtaataaaacgatgttggggattttttgatattaggacgtgaggtgtttgttttgtgtgtttagggttacggttttttatttcgagggtgtgtttggacggagttggagtcgtcggagtgttgatcgggggtatttgtggttttgggagttttgagacgttgagattaacgtttaggcggttgtggattcgcgacgaagttttgttggatgtttgtagaggtagttttcgttttattagatgtatttggttatagggaggaggaattttgggggttttttggtcgtttttgtttcgtaggttgggggatgttgtttaggtttgtttgatttaagttatgggaacgtataggtcgcgggattcggttgtttttcgtgttttttaggataggttttttagatttatatttggcgtagttagggttttagtgggattggtcgtgtgtagttatttatggacgtggaggttgttttttttttttaagtatagtttttttggttttttataaagtagttttatttagattttaaataaattaaagtagggaaaagagtcggttacggtgaattcgtttattttgtgttggacgtggttttaggatttggagttgataggtaggatcgggtttttcggatcgttatatttgggttttttaggttggtagtgttaggaaacggtttttcgtttacgtttttagtagcgttttcgtggttttttcggggtgcggttagttcggaagttgggggatttcggtagaagtcgggtttagtttttttttcgaggggataggtgggtcggtcgtttttattttgggttcgtttatcgagtttcgagtgacgtgagtggcggtggggtagttttttttttttgaagtacgtgaaaatttagaatagatatggggagggagaaaaagttaaaacgaaataattagaggagacggggattagtataaaattttcgtgaggtagtttgtcgtttaaggagttacgggttcggttttagtgaggtaaattcggtaagtttattttggtggtgttaggattttttcgtgttagagttatttttatcgttttcgaagtagttgtcggtttttttttttatttcgtcgttttcgtagtagtcgtcgtagaagaggtttgagttttcgtcgggcgtcggcgttttggtttttacgtagtattcggttagcgtggtgggtatttttacgtcgttacgtttcgcgtttattttggtttttaggatttgttttttggggggatagggtgggtgagggcgttatttacgtgtttggattcggtttttgttcggttttttttttttaggttcgacgtttattttaacgtttaggttttttttaaaacggcgtgtggcgattatttaggataaagttttgtgcgtgaggaattttagggggagaaatgatagaggagggggttcgggaagggtaggaggtgcgggtgggaggttggacgggcgtagtgtagttatattcgtttgtttcgtttcgaagtataatttaagggatttattaggagttgggagaaaataacgatgtcggtaatagggagggtttatgttgttttattggggggtaaaagttttttttagcgtaggagtaaaggaagtagttgggagggtttaaggataggaggtaggattatttttggagacgggaattagtataggtgagatgggaaacgtaaaaacggtttgagttttttcgtggttttagtaggattttaaattcgggggtttggttatttcggttttcggattttaaatcggggggtttggttattttagtttttggattttaaattcgggggtttggttattttagttttcggattttaaattcgggggtttggttatttcggttttcggattttaaacgtggggggtttggttatttcggttttcggattttaaattcggggggtttggttatttcggttttcggattttaaattcggggggtttggttatttcggttttcggattttaaattcggggggtttggttatttcggttttcggattttaaattcggggggtttggttatttcggttttcggattttaaattcggggggtttggttatttcggttttcggattttaaattcggggggtttggttatttcggttttcggattttaaattcggggggtttggttatttcggttttcggattttaaattcggggggtttggttatttcggttttcggattttaaattcggggggtttggttatttcggttttcggattttaaattcggggggtttggttatttcggttttcggattttaaattcggggggtttggttatttcggttttcggattttaaattcggggggtttggttatttcggttttcggattttaaattcggggggtttggttatttcggttttcggattttaaacgtggggggtttggttatttcggttttcggattttaaatttggggggtttggttatttcggttttcggattttaaacgtggggggtttggttatttcggttttcggattttaaatttgggggtttggttatttcggttttcggattttaaatttggggggtttggttattttagtttttggtaggaagggaggataagttagtttaaattttttggagggtatcgtgtatattcggttttatgaggggttgtatcgcgtatattaggatttacgaggaatttgttttcggttttatttttaggatacgcgttaagaatgtttttttaggattggaagtaaaggggttttcgggggtggtatagtagggttaggcggtacgttgattttatttgatagaaaataggaacgaggttgtagtcgtaggtaatgggttcgagtttttattatcgattaggtacggttttgggttttggggttggttgttattagggtgtgcgggttttatagtgttcgtatgggagggtattagggagtagatagatagttttaagtttagtttataagtttagtgttttttatggggatgtatgacgcgtggagggtaggcgtttggttttagggacgtttttgggtggcgggatttagcggacgttaagttttgttttttaagtttttcgatgggttgggggggtgattgatagtgtttcggggacggtattgtacgggtggtagtagtggggagacgtaggggagggttagggtggacgggttgggggggtgacggtgtttcggggacggtatcgtagaggtggcggttgtggggagacgtaggggagggttagggtgggaattgatttgtatcgtggaggtgtcgtcggtatatcgttagtatgagttggaggacggtttggaggttttgtttagtaagattaatatttttgattaagtcgggttttacggtagtttgttcgatatagtttagcgggatttgggttgttacgaggttaatacgtatatagatgaaaaaataggtagaaacggcgattatagtagagtttatatggtatatgtgtgttggtttatagggagttttgagggataaaaatagtgtggtttttatttttgtgttgggattt

SEQ ID NO: 839 - DNA, 6219 bp, Artificial Sequence
  chemically treated genomic DNA (Homo sapiens)
gatttattatggaggagataaaatgatttaaattatgaaaaaagattggtggggtgattgttataaaattgttaaaatagtttataattaatgtttggtttgttaaatttataattgtggtaagataataaaaattttaggtgatatattttttgaatatttataaatggtttttatttaatttttattttaaatgtatgttttttggttgtatagaagatttttaatgtaggaaggttaatgatataataatagttaaaaggttattggaaaatatgttttttttatggggtattgtcggagaaatttttagtaatagagaggtatgtattttattggatacgttgtaaaatagttaaataggtattataaatataatagtttaggaaaagttaattgaattgattggattgttttggttaaaggtattattgattgatggtaataagatttatttttattgtaaaatataaattgattttttataaaatagttattggaaggtttatgtttttaataataaagttttatgtattttttttttttataaattttgatatgatttaatagtgtaagttttgaatgtattttgttaaagtatatttttattaagtgaaagaagttttttatgatttattaattgatgataattaagtgttttataatatagaatttggaggtgggggttttttggaaataattttagagaaagatattatttgaattcggttgaaagggattatattaagtttttttttgtagtaaattttaaggttttgaattttggatttgtattttttaatataaaagaggttttgtagatttttggaattataaatttgttggagattttgaaataaagttgattagggaagtttttttttagaagtatatggtattttatatgtagatagtttttttaatattgtagattaagagttttttgttattatgaaagttttttttttttttttttttttttttattttttgtaatattaattttttttttttttttaggaaaattttaaataatgttagatttttttgaattatatatgtaaggatatgttattaatatgtattttagaatttgtaagaaattaatagaaatttaatagttttggtataaggttattaatcgtaattttagttgttattttaaaatgttgtatgtaatagaaataattgaatttttttgttaatttgggatgatattttgtggatggttttggtaaagttttatggtttttaagaaattagagtaattgttgggtttatgagttaatgcgtaaaaatttggaaataattttattaacgttaatgtttgtgtttttaatgagagttattttgtaattttaaggaaagagaggaaggttatttttgatatgttatatattattgttatttgtttttttatatttgttgaaaatagtattttgatttttttagttaataattaaattgttattaaatataaaaaatttggatagaggggattggttaatgggtgtaaagttatagttagataggaagaataaaagttgttattttattatatagtagaatgattatagttaataataatgtattgtatattttaagatagttagaagagatgattttgaatgttatttttaaaaagaaatgataaatgtttaaagtgatatattatttaataattattttgatttgattattgtttaatatatatatgtattgagatattatattgtattttataaatatgtataattattatttgttaattgtatataaaagtaaaaaaaaaaaattattagaatgatgtttgtaaaaggtattttgtgttttcgggtattgtatatttaagacgttggggattatttatgtgggtataaataattgtttgtgtgattttattggattaaatttagtaaagtttttttattagatttagtggtttgtatttttataatatgttatatagggattatagaagagtaagtttattattggattttatttaggagttatgttaatttgtgggtggataaatttaattgatttcggtttaaatattattaagtggttttttttttaagtttttaagggtttatattgggttggtggataatttgatttgttttttttgttgtttttttattggtttagattttgttatttggtttggttcgtttttatattttaatagttttttttgaaagtttttataatattttttataattagaggttaaagtagttaataattaaagtaagtattaatttaaaaataaatgaagataagttagtttttattgaggaaaggttttaatggaggtgttggaatttatttttggtattagtagggtgtttgttgtatggaatttgaaattaatttataaattggggaaaattttgaatttgtagttagttagattttttaggggtttatatggtagaagttatttaaatatttttagtggattaaaatatttgtgtttaataaatatattttatggaatattatataattttggattttttttttgtttatgttgggggtttttgtatggtgttgaataaaattgaatgttgtatttattttttttttaattttattattatagaaaatttaatttaaaaggtggtagatattgttgtttttttaaatattgttattgaatatattaaggaaattttttaggggaaaggaatatatgatatatttatgggagtagttaatggttggtttgtaggtattttgagtagtgaaaggtaagttaggttattttaaatttttttaatttttatgtttttttagtggttttttaggttattataatttgtgttattaggttaattataaaaatggatatttttttaaattaggttataaggttgaattaggttatttagtgaattatggtttttgtaaaaagtaaagtagaggtttttttttaaagatttttttttttatttgattaggaataaatagtaattttttttagaagtaaaatttatttaaagatttgttaatatttttaaatatttgttagttgtaataaagaaattaatgtattttatgtttttagtttttataatttagtttaaatatttgttttggtatgtttatattggtttaagtgggtattaggttatagtttgttttttttttttatttagaggtgtttttttttttttagtattttataagttatttttttttttttttgtttttttttgtttttgttttttttaagaatttttaagttgttagttaattaagataaatatagaatgtgaagtttcgttttagttaatggaaattagttataatagtaaggtggacgggttaggttataaatgattttgttttttttgttcggtgtatttttgtgggaaaattgttggcgagtgtatttttttcgtagaaagtaaaaatggttttgttaaagaaattaattttatgtttaagtgttatttttttacggtattaagaaataagtatttttagtagtttttaatcgttataatgttttaaattagattatgattaattggatttaaatattttgaattatttttattgtttgaattttgaattgtttaattttgattagtttagtttgtggagatttttgttaaggtgtgtattttagtttattgttatattttttttcgtggttataatagtttttttgatgtgttgttgttttttcgagagtttttaatgtttttatgtagttattttttgtatattaaatggtgttattatagttagaataataatatgaagaaagtataattatttaattaatttgatattgtgatttttatattgagataaaataaggttttggttaatttcgtaaaattgagaggttgatttaaaggaggaaattgttattaaattaaatttggtttaaagttgtttttttatttagtaaagtataattaaatttaatatgtaaataaattgtaatgtaatttgagagtacgtttttttaataagtggttaagttttggttaattatcgtagcggagtttttagtttattataggttgtaaaaaatattgtttataaacgcggtttgtttattgttaggggttggagttttttgaatttttattggtttaggatattatatgatttatgttttttttgtttagataaattttgttaaatttgtttgaagtttttttgttaataatatttaaatataaagtaaataaattaataagaattttatattattaagttatagtaattagaaagtatttatttgagtgagaagattggttaagttgttatttagttttttattatttgataagatattttttttttatgttttttaatagtattcgttattttagaaaggttgttttatgattttaaatcgtttatatgtttattgtattgatagacgtttaacgttaagatgggtaattaaaggttaattttttttttattttttttgagtttgatttttgtattgtaatttatggttattagatatttgttttgggtgttcgtagtttatatttattttttttttaggggaaataattattgtttacgggattaaaataatttcgagttgattatttggtgatattaattaacggtgtatattttgggtttattattaatatagttaagtagtatatatttttttagagtttagatatgtatatgttattaaaggatagtattttatagagttaatattatttattttatagaataaggggttagtggttttttagaagaagggtttgttttcggttttatattagaacgttagtcgttaggtttcgttgtttagtaggttttaagttcgcgtttattcgggtttcggttgttgatagttgcgagttcgcgcgtgtatattcgtttaacgttgggacgttatagttagggttaatgggtagagcgggattcgaggtttcgttttcgttttgtggcgttacggggacgtcgggggcgcgcgggttgtagggtcgcgtaggttttcgtttttagagtttggtttttcgcggttgttcgtttcgcgcgttttttttgttcgggttttttcgttgtcgtcgtcgttgttatattatggttttcgttattaggtagtttatgcgtttcgtgtttttttcgtttatcgtttcggtttcggttaagaagataatcgttaagtacgtgacggttatcggcggcgggttgatgggcgtcggtattgtttaggtgagcggttttttttgtacggtgtttacgcgtttggttcgttattttgaggtggaagttttggcgcgatcggtcgcgaggggttgtattcgttcgatattagggagtttttatttcgcgtttttcgggtgtagttgaaatatttcgcgtttgggtttgtgagggtttaagttttattttttttaaaatttagggttttgggtcgatttttagttttttcgtttggaaaattttggttgtttttagggttcgttgaaggttttatggagagtggcggtgaatgtattttggaagcgggtcgtgtaagagaagaaagaattgtatgtgtataaggtttaggtataacgcgtttgtttttgttcggtttaaacgggagtttgttgttaaagatatgaattgcgattagttttaattttattagttatttttgatttttattttgtaattgtgtagtttttgttaaagtagtttttttttttaaacggtttttcggtttttttcggtttttttttcgtttgttaggttgtaaagaatagtagtagttatgatttttgtagtattttgtaaagttatttaatggaagattgttgaggttttggttttgatttttgaaatagtgtcgtttgtgtagagttttgagtttgcgattttggcgttgtagcggaataagttttttttttttttttttttttttttttttggagtcggagtttttttgatttaggttggagtggagtgtaatggcgcgatttcggtttattgtaattttcgtttttcgggtttaagcgatttttttgttttagtttttcgagtagttgggattataggcgtttcgttcggttaattttatatttttagtagagatagggttttattttgtgggttaggttgatttcgaatttttgattaaaggtgattcgttcgtttggtttttcgaagtgttgggattataggcgttagttattgtatttagtcggaataagttttttatttattgtat

SEQ ID NO: 840 - DNA, 6219 bp, Artificial Sequence
  chemically treated genomic DNA (Homo sapiens)
gtataatggataaaagatttgtttcggttgggtgtagtggttaacgtttgtaattttagtatttcgggaggttaggcgggcggattatttttggttaggagttcgagattagtttgatttataaggtgaaattttgtttttattaaaaatataaaattagtcgggcggggcgtttgtaattttagttattcgggaggttgaggtaggagaatcgtttgaattcgggaggcggaggttgtagtgaatcgagatcgcgttattgtattttattttagtttgggttaaagagatttcgattttaaaaaaaaaaaaaaaaaaaaaagagagagatttatttcgttgtagcgttaaaatcgtaagtttagaattttgtatagacggtattattttaaaggttaaaattaggattttagtaattttttattaggtgattttataaagtgttataaaagttatgattattattattttttataatttagtaagcggagggaagatcggggagagtcgggaggtcgtttaggagaggaaattattttgataaaggttgtataattatagaataaaaattaaaaataattgatagaattaaaattgatcgtagtttatgtttttggtagtaaattttcgtttgagtcgagtaggaataaacgcgttatgtttgaattttgtgtatatataattttttttttttttgtacggttcgtttttaaaatgtatttatcgttattttttatggaatttttagcgggttttgggggtagttagaattttttaaacgaggaagttgaggatcggtttagaattttgaattttgaggggagtgagatttgggtttttataggtttagacgcgagatattttaattatattcgggaggcgcggggtgaaaattttttggtgtcgggcgggtgtagtttttcgcggtcggtcgcgttagagtttttattttagggtggcgggttaagcgcgtgggtatcgtgtagggagggtcgtttatttgggtaatgtcggcgtttattagttcgtcgtcgatgatcgttacgtgtttgacgattatttttttggtcgaggtcgaggcggtggacgaggaggatacggaacgtatgaattgtttggtgacgaaggttatggtgtggtagcggcggcgatagcgaggagattcgggtagggaagacgcgcgaggcgggtagtcgcggaaagttagattttgggggcggggatttacgcggttttgtagttcgcgcgttttcggcgttttcgtgacgttataaggcgggggcggggtttcgagtttcgttttgtttattggttttggttgtaacgttttagcgttgagcgggtatatacgcgcgggttcgtagttgttagtagtcggagttcgagtgagcgcgggtttgagatttgttgagtagcgggatttggcggttggcgttttggtgtggggtcgagaatagattttttttttgaaaagttattggttttttgttttatgaagtgagtggtgttgattttgtaaaatgttattttttgatgatatgtgtatatttaggttttgaagaaatatgtgttgtttggttgtgttggtaatggatttaaaatgtgtatcgttggttgatgttattaaataattaattcgggattattttaatttcgtggatagtgattgttttttttaaaagggaaataaatgtagattgcgaatatttaaaataaatgtttagtgattatgagttataatgtaaaaattaggtttagggaaggtaaagagagagttgatttttagttatttattttgacgttggacgtttattagtgtagtgaatatgtggacggtttaaggttatagagtaatttttttggaataacgaatattattagaaagtataggaaagaaatgttttgttaaataatggaagattggatagtagtttggttaatttttttatttaggtgaatattttttaattattgtaatttagtgatataggatttttattaatttatttgttttatgtttaaatattgttaataaaaaaattttaaataagtttagtagagtttatttgagtaaagaaagtatgaattatgtagtattttgagttagtaaaggtttagagagttttagtttttaatagtgggtaagtcgcgtttatagataatattttttgtagtttgtaatgggttaaaagtttcgttgcggtgattggttaagatttggttatttgttaggagaacgtatttttaaattatattgtagtttatttatatattaggtttgattatgttttgttaggtagggaggtaattttaggttagatttaatttaataatagtttttttttttgggttagttttttagttttacgagattgattagaattttgttttgttttagtatggaagttataatgttaaattagttgagtgattatattttttttatgttgttattttaattgtaataatattatttggtgtataaaggatggttgtatagagatattgaagattttcgaggggataataatatattagggagattattatggttacgagaaggagtatagtaataaattgaggtatatattttaataggagtttttataaattgaattgattaaaattaaataatttaaagtttaggtaataaagatagtttaaagtatttgagtttaattggttatggtttaatttagggtattatggcggttaaggattgttagaaatgtttattttttggtgtcgtaaagaaatagtatttgaatataaaattaatttttttagtaaggttatttttattttttgcggaaagagtatattcgttagtagtttttttataagagtatatcgaataaaggaggtagggttatttataatttgattcgtttattttattgttgtgattggtttttattggttagaacgggattttatattttgtatttgttttgattggttagtaatttagaaatttttaaaagaggtaaaggtagaggagaataaaggaaggaggaagtaatttgtggaatgttgagaagggaaaaatatttttaaataaggaagaggaataggttatgatttaatgtttatttggattagtataagtatgttagggtaaatatttaggttaaattgtgggagttaagaatataaagtatattgatttttttattatagttagtagatatttaagaatgttaataggtttttgaataaattttgtttttaagagaggttattatttatttttaattagatgaggaggaaagtttttgaaaaggaatttttattttattttttataaggattatagtttattgaatgatttgatttagttttatggtttgatttaaagaggtatttatttttgtaattagtttggtaatataagttataataatttggagagttattaaagaagtataaagattagaaaagtttggaatagtttagtttgttttttattatttaggatgtttataaattaattattagttgtttttataaatgtattatgtgttttttttttttgagaagtttttttaatatatttagtggtagtgtttagagaaatagtagtatttgttattttttaaattaagttttttatagtagtaaaattagaggaaaaataagtgtaatatttagttttatttagtattatgtaagagtttttagtatgagtaaagaggagatttaaagttgtgtaatgttttatgaagtgtgtttgttgaatataaatgttttgatttattgagaatatttgagtagtttttattatgtgaatttttaggaggtttgattggttataaatttaagattttttttaatttatagattagttttaaattttatataataggtattttgttaatgttaagagtgagttttagtatttttattggaatttttttttagtagaaattaatttgtttttatttatttttaggttggtgtttattttggttattgattgttttaatttttgattatgaaaggtattatgggaatttttagggaaggttattgggatgtaggagcgagttaggttaaatagtaagatttgaattagtgaggaaataatagagaaggtaggttagattatttattaatttaatgtaggtttttgggggtttgaaaagagggttatttagtggtgtttgagtcgaggttagttaaatttgtttatttataagttggtatagtttttgaataaaatttagtggtgaatttatttttttgtggtttttatatagtatgttgtaagggtgtaaattattggatttagtaaaaagattttgttagatttaatttagtgaaattatataagtaattatttgtatttatataggtagtttttaacgttttaagtatgtaatgttcggaagtataagatattttttgtaggtattattttgatagttttttttttttatttttatgtataattgataaataataattgtatatatttatggggtatagtgtgatgttttaatgtatgtatatgttgaataatgattaaattaggataattattaaataatatgttattttaagtatttattatttttttttggggataatatttaaaattattttttttagttattttgaaatatataatatattattattagttgtagttattttattgtgtaatagaatagtagtttttattttttttgtttaattgtaattttgtatttattgattaattttttttatttagattttttatatttggtaatagtttggttattaattggaaagattaagatattatttttagtaagtataggaaggtaggtagtagtgatgtgtagtatattaaagataatttttttttttttttttggggttgtagggtgatttttattaggaatataggtattagcgttaatgaaattgtttttagatttttgcgtattagtttataaatttaatagttattttggttttttggagattataagattttgttaaagttatttatagagtattattttaaattgataaggaaatttagttatttttgttgtatataatattttgagataataattagaattacgattaatagttttatattaggattattagatttttattaattttttataagttttgaaatatatattaataatatatttttatatatataatttaaaaaagtttggtattatttagggtttttttaaagaaagggaaggaattagtattgtaggaaatagagaaaaaaggaaaaaaagagaaggtttttatgatagtaaagaatttttgatttgtaatattaggaaagttgtttatatataggatgttatatgtttttagggaaaaatttttttgattagttttattttaaggtttttaataagtttatagttttagaagtttataggattttttttgtgttgagaaatgtagatttaagatttaaggttttgaagtttgttgtagagaagaatttggtatggttttttttaatcgagtttaagtaatgtttttttttggagttatttttaaaagatttttatttttaggttttatattatgaaatatttggttgttattagttggtgggttatgaaggattttttttatttggtaaaaatatgttttggtagaatgtatttaaggtttgtattattaagttatgttagggtttataagaggggaagatatatgagattttattattaggggtataagttttttagtaattattttatgaggggttaatttatgttttatagtgggaatggattttattgttattaattagtaatatttttgattaaggtaatttaattaatttagttagttttttttaagttattgtgtttataatatttgtttaattgttttatagcgtgtttagtgaaatgtatatttttttgttgttagaaattttttcggtaatgttttataagggaaatatattttttaataattttttagttattgttatattattggtttttttgtattggaaattttttatataattagaaaatatgtatttaaagtggaaattgaatgaaagttatttgtaggtgtttaggaaatgtattatttgaagtttttattgttttattataattatgggtttgataaattagatattggttataaattattttagtaattttataatagttattttattaatttttttttataatttgaattattttattttttttataatgagtt

SEQ ID NO: 841 - DNA, 5642 bp, Artificial Sequence
  chemically treated genomic DNA (Homo sapiens)
ttcggttaataaatggtttttaattaaaggattgtgatatttaatagtcgttgtttgtttttgttttgtttttttttttttcgaaatttgttaagaaataatttaatattttggtttttttattttaaatgttatattgattagttcgtgtatgttagtttcgattttatcgttttttttaatcggtttaattttttttggcgttttagttaagataatattttttttttttaaggttatgattttagaaatatagttgatgatgtaggggatggaaaaaattatggaggatgttttatttttttgtttgagttcgtcgttgattttgagttagagttttagtttgtgagggttagggattttttttttgggtacgaacgcgttgatcgggtaggacgtcgtgaagtttttcgttagagtttagggtagttttttttttttgtattcgttttgtacgtttcgggcggttatatttaggtatagggtatagtcgtttacgtagtttatggtcgtagtttcggggattgcgcggtagcgtttgtttattattacgtttagttttagttcgtggtgtaggttgcgagtgtacgcgggtatgaggatgggcgagttttcgggcgcgtaggtcgtggacggttttaggaatagtacgggttcgtttaatatcgcgttgcgtatttttttgacgtggttcgcgtagtttttttttacgtagacgatgttttttttttatttttagaagcgggataatggtttggatgttgttatgatttttattaagtgtttttgtagttacgtgggttgggtcggttagttgatgtttacggtatttcggagaggattaattgtttcggaacgttgtttttcgtagcgacggttcgttttatttcgcgatttgtcgggtattcgggcggcgtggcgttcggtttttagggatttattgtgcggtgttaaaaaagaggcggaggttcgcggtatagttttttcggcgtagttttcgggtcgtcgtcgtcgtttttaggttcgtttttcggttcgtggtagtcggggttcgcggataaaataagttgagcgcgagcgcgttgattggttggcggacggtgcgaggtggacgttgattggttgagggtagcgcgaggcgggcgttgattggttgcgacgcgtcgacgtcggtgttttgtagttttgggtagttcggtagtttagttcggttcgggttatggtggtgggtcgagggttgttcggtcgtcgtagtttcgtcgcgttgggagtcgtttgcgttcgtcgaggtttcggtgggtgcggcggggcggtgcgggtcgggggacgcgggtttgtgggggcgggtagcgggcggcgtcgggtcgtcgtttggcgatcgttgacgcggtgtttgttgcgtaggtgtttaaggtcgcgttgtcgggttcgagcggagcggcgtaggcgttgaggttggcgcggagcgggcgcggggtcgcgggtgcggaaagcgttaggtaagtagggttaggtttgcgttcgtcgcggtttttacgttcgggttgggtcggtcgcgtttttgacgtttttagggtatcgcgttttgttcgggtcggcgtcgaggagagtttggggcgcggttttgaggcgtagcgggtagggtttcgggacgtttggtttatttcgtatttgttgtttcgttgtaaggatcgcggtttcgcggcgtcgtttgcggtggtggagttgttcgttcggcgtcggagttttcgtttggggattcggcgtgttattcgttcgaggtggtcgcgcggtcgggttaggttagcgtttcgggcgggtgcgtagcgtagggtattgggcgggcggaggcgtagatagggaggcgtttttggcggtttttagatttcgtcgaaagttgttaaggttttgtagggggtagaatgtcgttattgttaaggaaaggatatggattttgaggtttttagaattatagttttagggatatttataagggtttaggtagagagttttagcgggattgtgtgtatcggtagggcgtgcgtattttattttaagggaggttttagttttcgtatttggtgtcgtttagtttaagggaagtaagatgttgtgaaattttttgatttaaaaaagaagtgtagtgacgtacgtttgttattttagtattttgggaggtcgaggcgggaggatcgtttgagtttaggagttttagattagtttggtaatatgttgagattttatcgttataaaaattaaataaaattagtcgggcgtggtggtatataattgtagttttagttattttggaggttgaggtgggaggatcgtttgagtttaggaggtcgaggttgtagtgatttttgatcgtattattgtattgtagtttaggggatagagtgagattatattttaatttttttttgtttttggggttaaatcgaatatgtttttggatttggtttaggttttaggttgtaggtttttgatttgtttgtataaagtattatagttataaaatagtaagtcgggaatatttgttaggtagtgttgggttgagtgatatggaaagggaatacggtttttgttggtgttggtattagttgcgtttttttttagaaataaaggtatttttttgggttgttagtttttttaggaggttgtgatggtttttaggggaggttgagtattagttgtaaatgatatttttttcgtttgggtagtgtagtggttaatttcggtttattgtaatttttgtttttcgggtttaagcgagttttttgttttagttttttgagtagttgggattataggtgttcgttattacgtttagttaatttttgtattttttattagagataggttttattatattggttaggttggtttcgaatttttgatttcgcgattcgttcgtttcggttttttaaagtgttgggatgataggtatgagttatcgtacgtgggtagtatttttgtttgtaatgttttgttttttgtttgtaatggagtttttttttaggaggacgttcggtattcggaattttgttataatttttttgtattttatttgtagtttttagtatttatattttgtttggtgtgttttttgggttggggtggtgttgaggttaaggggaaggggaataatataggaagttgtttatatagaaattttggtattattgtttttgaggagaatgatttggaaaatgtttagttggttgttaggcgggtaataggatatttttgtgtagtgattgaaattatagtttgggtagttttttcggttgtggaaataaggtcggatttcgtatttcggtgggttttggagacgcgtgtgtttgttagttggtggttgttgtttatttttggattttttttgggagaagtttttgtcgtggtatttattttaggattgtattgttttttgttattttttgtggtttttttttcgtgtagagcggaattgaaggtattgtcggggtttttaggtatttttagatttagtaggagttttattgttgaaaatatttttgtattggtcgattgggtggtagatatttttgttttttggttatttattttttttagtttttgggttttttgggtttttgtggtagagttttttgggttagttggatggtggttttgtgttttttatatttgaatttgggggtagttgtggttaatttttcgttttaaaggaattgttgatttttgtgtatattttagattcgtgttgtttaagagtaagtattgtttgtttgtttgtttttttttttgagattgttttattttgttgtttaggttggagtgtagtagggcgattttggtttattgaaatttttatttttcggatttaagtaatttttttgttttagtttgtcgttaagtattggttttttttggttagaggttgagaagggttgtaattgtatggaacgtaggttcgtttagttagtggtggtagtatagtttgttggagggtagatggttaggcgggggtatttttagtttgtgtttttttttttatattttgtttttgagttcggggtgtgaataatttagtattggtagtggttcgttttataattataagttggtttttttgtttttttagagtttttaaaaaagaaaatagagatcgtaagtttgaaataattgatttttatgaatgtgagtatgagttagtttttgtgttttttttagggatatatgaagatattttttttttttttttttttttttttttttttaaggaataggttattgttttgttatttaggttggagtgtagtggtatagttatagtttattgtagttttaaatttttgggtttaagtgatttttttgttttagttttcggagtagttgggattataggtatgtattattatgtttggttaatttttaaatttgtaaagataaggttttggttggtcgcggtggtttatatttgttattttagtattttgggaggtcgaggtgggcggattataaggttaggagatcgagattattttggttaatattatgaaattcgtttttattaaaaaatataaaaaattagtcgggtatggtggcgggcgtttgtagttttagttatttaggaggttgagataggagaacggcgtgaatttgggaggtggagtttgtagtgagtcgagatcgcgttattgtattttagtttgggcgatagagcgagatttcgttttaaaaaaaaaaaagaaaaaaaaaaagataaggttttgttatgttgtttaggttggttttaaatttttgtttttaagtagtttttttattttagttttttaaagcgttgggattttcggtaagaattattatatttggttagaatatttttttttaaaggaatttagaaaggttgggaagtattgtagtttgcgcgttttgttttggagggtttggcgcggttgttcgttgagttgtgttttgtgtttgtaggtttagttttgttgggagttttttgttatatagatttgcggaagaatttgatcgtggacgagggtattatgaaggtagaggtgttgtttgttttgatcgataattatatgtatttggttattgatgatgagattaaggaggttgttattgtggattcggtgtagttttagaaggtgcgtatggttgtgtttggttttttttgttttggttatttagttcggagtttttattttcgatgggttttttaatcgtagtgtttttgtaattttgtttaagttaaatggaaattagttttcggttattttgttaatagggttttaagaagggtggaggcgagaggtagtgatatagaaagcgttgtgtagtataattttgggtatttgagtttttttgggggttttttgtttttgtatgttgtttttgggggtggtgtttttagagttggaggggtttggagcggtcgtaggtggttgtaagagtgttaggttgagtaggaaggagaaggtgtttttattggtttttttggagtagggtaagttggtagggttaggacgggttacgttagcggttttttatggcgtgttttgggttttgttgggtattttattatataggttagtaagttaggtttaggagtgtgataggtttttgttttttttcggggttattgtagg

SEQ ID NO: 842 - DNA, 5642 bp, Artificial Sequence
  chemically treated genomic DNA (Homo sapiens)
tttgtagtggtttcggggaaggataaaggtttgttatatttttaggtttggtttgttggtttatatggtagggtgtttagtagaatttaggatacgttatgaggggtcgttgacgtggttcgttttgattttgttagtttgttttgttttaggagagttagtgaaagtatttttttttttttgtttagtttgatatttttgtaattatttacgatcgttttaagtttttttagttttgagggtattatttttagaggtagtatgtaggggtagaaagtttttaagaagatttaagtgtttaggattgtattgtatagcgttttttgtgttattgtttttcgtttttattttttttggggttttgttaatagagtggtcggagattaatttttatttagtttaggtaaagttgtaaggatattgcggttaggaaatttatcgggggtgaggatttcgagttgggtgattagggtagggagagttaggtatagttatgcgtattttttggggttgtatcggatttataatggtagtttttttggttttattattaatgattaggtatatgtagttgtcggttagggtaggtagtatttttatttttatggtgttttcgtttacggttaggttttttcgtaaatttgtgtggtagaaaatttttagtagggttggatttgtagatatagagtataatttagcgggtagtcgcgttaggttttttaagataggacgcgtaagttgtagtgttttttagtttttttaggtttttttgaaaaggaatattttggttaggtatggtggtttttgtcgggaattttagcgttttaagagattgagatgggaggattgtttgagggtaggagtttgagattagtttgggtaatatagtaagattttgttttttttttttttttttttttttttgagacggagtttcgttttgtcgtttaggttggagtgtagtggcgcgatttcggtttattgtaagttttattttttaggtttacgtcgtttttttgttttagttttttgagtagttgggattatagacgttcgttattatattcggttaattttttgtattttttagtagagacgggttttatggtgttagttaggatggtttcgattttttgattttgtgattcgtttatttcggttttttaaagtgttgggatgataggtgtgagttatcgcgattagttaagattttgtttttgtaaatttaaaaattagttaggtatggtggtgtatgtttgtggttttagttatttcggaggttgaggtaggaggattatttgagtttaggagtttgaggttgtagtgagttatgattgtgttattgtattttagtttgggtgataagataataatttgttttttaaaaaaaaaaaaaaaaaaaaaaaaaaaaggaatatttttatatatttttgaggagaatataggaattaatttatgtttatatttatggaaattaattgttttagatttacgatttttatttttttttttgagaattttaaaaggataggaaggttagtttgtgattgtgaggcgaattattgttagtgttggattatttatatttcggatttagggatagaatgtgaagaagggaatatagattaggggtgttttcgtttggttatttgttttttagtaagttgtgttgttattattgattaagcgagtttgcgttttatgtagttatagttttttttagtttttagttagaaagaattaatatttgacggtaggttgaggtaggagaattgtttgaattcgggaggtgaaagttttagtgagttaagatcgttttattgtattttagtttgggtaatagagtgagatagttttaaaaaaaaaaataaataaataaataatatttgtttttgaatagtacgaatttgagatatgtataaaaattagtagtttttttgagacggaaagttggttataattgtttttagatttaagtgtggaggatataaaattattatttaattgatttaaaggattttgttataggggtttagaaggtttaagagttgggaggagtgggtgattaagggataaaagtgtttgttatttagtcgattaatgtaaaaatatttttagtaatgaaatttttattaaatttaaaaatatttgggggtttcgataatatttttagtttcgttttatacggggaagaaattatagaaggtggtagaggatagtgtagttttggggtaggtgttacggtaggggttttttttaaaagggatttagaaatgggtagtagttattaattgatagatatacgcgtttttagggtttatcgaaatgcggaattcgattttatttttatagtcggggaaattgtttaaattatagttttaattattgtataaagatattttattattcgtttgataattagttgggtattttttagattattttttttaggaataataatattaagatttttatatgagtagttttttgtgttattttttttttttttagttttagtattattttagtttaaggagtatattaagtagagtgtgggtgttgggggttgtaggtggggtgtagaagggttgtgataggatttcgagtgtcgggcgtttttttggaaaggagttttattataaataaggagtagaatattataaataaaaatattgtttacgtgcggtggtttatgtttgttattttagtattttgggaggtcgaggcgggcggatcgcggggttaggagttcgagattagtttgattaatatggtgaaatttgtttttaataaaaaatataaaaattagttgggcgtggtggcgagtatttgtagttttagttatttaggaggttgaggtaggagattcgtttgagttcgggaggtagaggttgtagtgagtcgagattggttattgtattgtttaggcgaagaaaatgttatttataattggtgtttagttttttttggagattattatagttttttgaagaagttgataatttagggaggtgtttttatttttgaggaaagacgtagttggtgttaatattagtagaaatcgtattttttttttatattatttagtttagtattgtttggtaaatgttttcggtttgttgttttgtaattgtaatattttgtataaataggttaaggatttgtagtttggggtttggattaagtttagaaatatgttcggtttggttttaaaaataaaaaaaaattgagatatggttttattttgttttttaggttatagtgtagtggtgcgattaagggttattgtagtttcgattttttggatttaagcgatttttttattttagtttttaaagtgattgagattatagttgtgtgttattacgttcggttgattttgtttagtttttgtagcgatgaggttttaatatgttgttaggttggtttggaatttttggatttaagcgattttttcgtttcggttttttaaagtgttgggatgataggcgtgcgttattgtattttttttttaaattaggaagttttatagtattttgttttttttgaattgggcggtattaaatacgggggttggggttttttttagaatggggtacgtacgttttgtcgatgtatatagtttcgttggaattttttgtttggatttttatgaatgtttttaaaattgtaattttgaggattttaaaatttatgttttttttttagtaatggcgatattttattttttgtagagttttgatagttttcggcgagatttggaaatcgttagggacgtttttttgtttgcgttttcgttcgtttagtgttttgcgttgcgtattcgttcggggcgttggtttggttcggtcgcgcgattatttcgggcgaatgatacgtcgggtttttagacgggggtttcggcgtcgggcgggtagttttattatcgtaggcggcgtcgcgagatcgcggtttttgtagcggggtagtaggtgcggggtgggttaggcgtttcggggttttgttcgttgcgttttagagtcgcgttttaggtttttttcggcgtcggttcgggtaggacgcgatgttttggaggcgttaggggcgcggtcggtttagttcgagcgtggaggtcgcggcggacgtaggtttggttttgtttatttagcgtttttcgtattcgcggtttcgcgttcgtttcgcgttagttttagcgtttgcgtcgtttcgttcgagttcggtagcgcggttttaggtatttgcgtaatagatatcgcgttagcggtcgttaaacgacggttcggcgtcgttcgttgttcgtttttataggttcgcgtttttcggttcgtatcgtttcgtcgtatttatcgaggtttcggcgggcgtaggcggtttttagcgcggcgaggttgcggcggtcgagtagttttcggtttattattatgattcgggtcgggttggattgtcgagttgtttaggattgtaaaatatcggcgtcggcgcgtcgtagttaattagcgttcgtttcgcgttgtttttagttaattagcgtttatttcgtatcgttcgttaattaattaacgcgttcgcgtttaatttgttttgttcgcgagtttcgattgttacgggtcgggagacgggtttgggagcggcggcggcggttcgagagttgcgtcgggagagttgtgtcgcgagttttcgttttttttttggtatcgtatagtggatttttggaggtcgagcgttacgtcgttcgggtattcggtagatcgcgaggtggaacgggtcgtcgttgcgggggatagcgtttcgaggtagttggtttttttcgggatgtcgtaggtattagttgatcggtttagtttacgtgattataggggtatttgatgggaattatggtagtatttaggttattgtttcgtttttgggagtggggaaagaatatcgtttgcgtggggaggaattacgcggattacgttagggagatgcgtagcgcggtgttgagcgagttcgtgttgtttttgaagtcgtttacggtttacgcgttcgagggttcgtttatttttatgttcgcgtatattcgtaatttgtattacgagttggagttgggcgtggtgatgggtaagcgttgtcgcgtagttttcgaggttgcggttatggattacgtgggcggttatgttttgtgtttggatatgatcgttcgggacgtgtaggacgagtgtaagaagaaggggttgttttggattttggcgaagagttttacggcgttttgttcggttagcgcgttcgtgtttaaggagaagatttttgatttttataagttgaagttttggtttaaggttaacggcgaatttagataggagggtgagatattttttatgattttttttattttttatattattagttatgtttttaagattataattttggaagaaggagatattattttgattgggacgttaaagggagttggatcggttaaagaaaacgatgagatcgaggttggtatatacgggttggttagtatgatatttaaagtggaaaagttagaatattgagttattttttaataagtttcgagagagaagggagtaagataagagtaagtaacggttattaaatgttataattttttaattagaaattatttattggtcgga

SEQ ID NO: 843 - DNA, 5303 bp, Artificial Sequence
  chemically treated genomic DNA (Homo sapiens)
ttggttgttatttttgttgatattttttaatttaattttgggtattgatttgtgtttttatttttttttttttttttttttttttttttttgaattttttttttttttttttttttttttttttttttttttttttttttgtttttttttcgtttttttttttttttaatttttttttttttggtagggattttgttgtttttgataaattttatgattaagttgttcgaatttattaagagtataaagtaagtatgtatttcgtgattgtaatgttggtggggaaagatttaaaagtggattaaagatttgcgtattgatgattttagagattttttttttttaaatggaattcgtaaagaaatataaaattttagtttataattaaaattgtttttttagttttggttttttattgttttgttggtgattttattgaaataaagttgagttatttttttttatagtggtatattttttgtaaattttaataaggtttaattttttgatttataaattaaaaaattttgaattagttttatattaatttttttttagtatgattataaaatatgttaaggtagtattttatttgatatatgatttaaatttattaatttgaatttgttgtagatttaaaaatttaatatggttaggattttgttttgttttttaaataattttaaatataagttcgggcgtagtggtttatgtttgtaattttagtattttgggaggttaaggcgggtgaattatttgaggttaggagtttgagattagtttggttaatatggtgaaatttcgtttttattaaaaatataaaaattagttgggcgtggaggtacgattgtaattttagttatttaggaggttgagggaggataagtattttaatttgggaggtaggggttgtagtgagtcgagatggcgttattgtattttagtttgggtaatggagattttgtttcgaaaaataaaaaattaaaaaaaaattttaaatatgaatgtttagttgtatttgtatattatttatttggtggatagtagatgaattttttattagaatgtgttaattttagtaggagtttttaattttttttttttggattttttcggtttatttagtgggtttgttttggttttttgtttattaggggttagatggttattttaagtattagttttttttattttttttatagtttgtttaaagataataaaataatttgaattaaataaaagataaatataataaagtatttttgttaatgtaacgtagtgttttagggtattttagtatatatagttgtattaggtagaattattagtgtattagttttattagttagaattaattagaattatagttgtgttagaattttttgattgtaagtaatagtaatttaagtgattagaagttaaaaagggaaaaggaagattattttaaggatgttaggtatggggagattattagaatttgggacggatagaaggggtttgatgtttaggattgtagtatcgttagtgtttttgttttttatttttgtttttttagtttacgttgtataggtcggttattttttagttttattgttataaatagttttgattatatggggaggttattataattttaaatttttagaggtgagattttaatttaggttgggtttatttttggttaaataaattgtgtaagaggaatggtgttttagagtataattgttggtatggggtgggggtggggagcggtgttttgattaaataattttttaaagtgttaatgtagtgattaaagttataataggagtgaatatttaaggtgggataggtatggaagagatatatttttgtttattttcggaattttgatttttttttggtttttattttttttagtagtttttgttttgttttgttttgagatagggttttattttgtcgtttaggttggagtgtagtggtatgattatagtttattgtagtattagtttttgggtttaagttatttttttattttagtttttggagtagttgagattataggtatgtattattatgtttggttaatttttgttttgtagagaaagagtttggttatgttgtttaggttggtttcgaatttttgggtttaagtaatttattcgtttcgttttgtttttttggttatttatttatgttgtagtgtgattttttttttaggttttgtttttttttgttttttttgttaagaatatagagaagggagtttagtttaaattattggtataagattatgttttaagattagattttagtaaatttatttatttaaatattgttttttaaggtttttgttttatgagtttataagataagttgtaagttaatgtcgtttttagttattatttagtgatattgaaagtgaattgtgataagggatgtttgaagggtggtatggaagggtgttgtgaagaaggtagagggcgttaaagataaatttaattttgtttgttggtttatttaggggttagttcggtgtagtttatatttttttagtttagttagtaagtatatgttaaatgtttttgtgttagatcggatatatatataattatggatgaatatagataagtaattttttagataatattaaagaagagttatgttaaggtattttagagaagggttatttaatttaattgaagaatttagggaatgttttttggagaagaaaaggtttaaataggtttaaggagtaagaaagatttagataggtaaaggaagttggaaagtgcgtttttggagaaagaataataaggaagattttgttttataatgcgtagggtttgagtttagaatttttaaattgttgggggtgatttatatggttgggaggtggtattatttggaagtttttttttttattagtttgatgtttgggttgaaattatttagaagttggtttcggtagtgatagttaattggagtatgtagtagtttgggttgttttgtagtatgaagatagttagattttttattagttatttttatatagttttatttattattagatagtaagttttatgaatgtagagcgtgtttgttatttattttatttttagtatttcgtatagagtttgttatataataggtgttgaaaaaatatttgttaaatgagttaaggaatgaatgggggggggtggggtagaaggttaaggtggtttatatgtgtagtttttagtttttttatagatgtaggaagtaaggtttttttttgagaattagaggtggatgtcgagaaggttttggtagaggggttaaagttttggaaagttattgtgggttggatggaataaaagggtaatattattaaattatgtgattataggattttttttattagtgttttttgtttgggtgaatagatatgatagttttttttaattttaaatagggttttgtttttatttaggttggagtatagtggtataattataatttattgtagtattgattgtttaggtttaagtaatttttttaagagatggttgttttttgtgatgattaaggggatgggtgttattttaagtgtagatataagtttagggatgtaaaggaattttagagtgtttaagaaagagtggtttagtgagcgattagggattagttttttaggatagtaagtgaggatgttggtgggaagtggagggatgaagagattgattggaggttaggtttaaggttggtagtgattagagtaaaagggtagttggaaggttgtggttagaaggtggaatattggaattttagattttttaagtgtgttaaatttaggtcgtgatagattttagggtgattttttaagtgtgttaaatttaggttatgataaattttagggtgtagttatggtgtgggtatttgaagagtaagttttaataaggtttaaggaagggtagttatttgtacgttttttgggaagttgttagtagatgagagggattttgggtatgagtataggtgttttttttgagtaattatgtttttttttttaatagaagtttgatttagtggaaatagattttttaggatttttttagtgtaataattaaatttttaaaaattggtttacgatgaaagtgttgtttagttaaaatagtatttgtatatttttgatgtcgtaattatgttatttagagttttttaatattaatggtaataaggcgggtgtagggagtagttatttgtggtgaagaagtttaattgggtgagggatatttatgtgttaagatgaaagagtatttatggaattttatagttttatgatttatatagaatatttataaagtattatagttatatggagtattggtgtttagatattagtaattatagatatttttataatatttttattatgttaggtgttgtgttgagggttttatatatatgaattgattttatttttttaatagttttttgatatatatattattattattattattatttttattttatagatgaggtaattgaggtttagagaagttaaattatttgtttataagttatatatttagtaaatggtagagttaggatttgattataggtaaattttgtatatattggaaggaggtagttagtttttaggttttttgataaggaaatatagggtaatatttatttaattaaggttaataagtagtagagttggatttttatttacggttgtttgagtttttaatttttaagttagagtggtttatttgtttagatgacgatttttagttgtgaaaatgatttttggtttttgtagttttttttggtggaaagaaagttttagaaaattttattggtgataggaagtagttgtttaatatatgtttgtggaataaataaatgagtgacgattgttatatttttagtgttatagttggtttatagaatacgttttatagttgagtaattttagataaagataggaatatggtgtttataagttgtttttaatggtagagaatatagatagaaacgagggaagagagagaaattggggattttgaagaaagggggttagtagtaggtaggtgttattagggataagaatagtattttttagggtgggagattttaggtttttttggtagtaggtttggatggaaagtggataggaggtttattcgtttgtattttttgtttttgtttttgttcggttataaaaattaaagggatagtaggtattttaataaatatttgtttaatgtatgaatgagtaaaggtgaaggagggggagtggtttgaaagtttatttttatttttttagt

SEQ ID NO: 844 - DNA, 5303 bp, Artificial Sequence
  chemically treated genomic DNA (Homo sapiens)
gttggaaggatgagaatagatttttaaattatttttttttttttatttttatttatttatgtattggataaatatttattgaggtatttgttgtttttttggtttttgtagtcgagtaggggtaggagtaggggatgtagacgggtgagttttttgtttattttttatttagatttgttgttagaaaggtttggggttttttattttgggaggtgttgtttttgtttttgatggtatttatttgttgttggttttttttttttagggtttttaattttttttttttttttcgtttttgtttgtgttttttgttattaagggtagtttataaatattatgtttttgtttttatttgagattatttaattgtaaaacgtgttttgtgggttaattgtgatattgggagtgtggtaatcgttatttatttgtttattttataaatatgtattgagtaattattttttgttattagtaaggttttttgaagttttttttttattagggaagattgtaaaggttagagattatttttataattaaaggtcgttatttgggtaaatgaattattttgatttggagattaggggtttagatagtcgtggatgagagtttagttttattatttattagttttgattaggtgagtattattttgtatttttttattagaaggtttaggggttaattgtttttttttagtatgtgtaggatttatttgtgattaaattttggttttgttatttgttaagtgtatgatttgtgggtaagtgatttgatttttttgggttttagttgttttatttgtaaaatgaagataatggtaatgatgatagtatatatgttaaagggttattgggaggatgaagttagtttatatatgtaaagtttttaatataatatttggtatagtggaaatattatagaagtgtttgtgattattagtatttggatattaatattttatgtaattataatgttttataaatgttttgtatgaattataaagttataaagttttataaatgtttttttattttggtatatggatattttttatttaattaagtttttttattatagataattgttttttgtattcgttttattattattggtattaaggaattttggatagtatgattacggtattaaagatatgtagatgttattttgattaagtagtatttttatcgtaagttaatttttagagatttgattattgtattagaaaaattttgaaaagtttgtttttattaaattagatttttgttgggaagagagatatggttgtttaagaaaaatatttatatttatatttagagttttttttatttgttgatagttttttaggaagcgtataaatagttatttttttttgagttttattgaaatttgttttttagatatttatattatgattgtattttggaatttgttatgatttgaatttgatatatttaagaaattattttggaatttgttacgatttgaatttgatatatttaagaaatttgaaattttaatattttattttttgattataattttttagttgtttttttattttagttattgttagttttggatttgatttttagttagtttttttatttttttattttttattagtatttttatttattattttaggaagttggtttttagtcgtttattggattatttttttttaagtattttgagatttttttgtatttttaaatttatgtttatatttggaataatatttatttttttagttattataaaaaatagttattttttggaaggattgtttaagtttaggtagttaatgttgtaatgagttatgattatattattgtattttagtttgggtgagagtaagattttgtttaaaattaaaagaaattgttatatttgtttatttaggtagaagatattgatagagaaagttttgtgattatatagtttgatggtattgtttttttattttatttagtttatagtgattttttaaaattttgatttttttgttaggattttttcgatatttatttttaatttttagaaggagattttattttttatatttgtgagaaaattgaggattgtatatgtgaattattttaattttttgttttatttttttttatttattttttgatttatttaataaatatttttttaatatttgttatgtaataagttttatgcgaggtgttggggatgaaataaataataaatacgttttatatttatgaggtttattgtttggtgatggataaagttgtataaagatgattaataagaggtttaattatttttatgttgtaaaataatttaaattattgtatgttttagttgattgttattgtcgagattagtttttgagtaattttagtttaggtattagattagtgagggaaggagtttttaggtgatattattttttagttatgtaagttatttttagtagtttgaggattttaaatttaggttttacgtattgtggagtagagttttttttgttattttttttttagaaacgtattttttaattttttttgtttgtttagattttttttattttttaagtttgtttaggtttttttttttttaggaagtattttttaaattttttagttgggttaagtggtttttttttgggatgttttagtatagtttttttttagtattatttaggaaattatttgtttgtgtttatttataattatgtatatattcgatttggtataaagatatttagtatatgtttattagttgaattgaagaaatgtgaattgtatcgagttggtttttaggtaaattagtaagtaggattaagtttgtttttagcgttttttattttttttatagtatttttttatgttattttttaagtattttttgttataatttatttttagtattattaagtgataattaaaaacgatattaatttatagtttgttttgtaagtttatagggtagaagttttaaagagtagtatttgggtaaatggatttgttaaagtttaattttagaatatgattttatgttagtgatttgagttgaatttttttttttgtatttttggtaaggaaggtaagggagagtagagtttggagaaagaattatattgtagtatagataagtgattaagaggatagaacgaggcgggtggattgtttgagtttaggagttcgagattagtttgggtaatatggttaaattttttttttataaaataaaaattagttagatatggtggtgtatgtttgtagttttagttattttagaggttgaggtgggaggatggtttgaatttagaggttgatgttgtagtgagttatggttatgttattgtattttagtttgggcgatagagtgagattttgttttaaaataaaataaaataaaaattgttagggagagtgagagttagggaaaagttaggatttcgggaataggtaggaatatgttttttttatatttgttttattttgggtgtttatttttattgtaattttagttattgtattagtattttgaggggttatttggttaggatatcgttttttatttttattttatgttaataattatattttaagatattattttttttatataatttatttgattagaggtggatttaatttgggttagagttttatttttgggaatttggaattgtgatagtttttttatgtggttagagttatttgtaatagtaaagttggagagtggtcggtttgtataacgtggattagagaggtagaggtgagggataggagtattgacggtgttgtagttttgggtattagattttttttgttcgttttaggttttgataatttttttatatttagtatttttaaaataattttttttttttttttttgatttttggttatttggattgttgttatttgtaattaaagaattttaatatagttatggttttaattaattttaattaatagagttaatatattaataattttatttagtatagttatgtgtgttgagatgttttggggtattacgttgtattggtaggggtgttttgttatgtttgttttttatttggtttaagttattttgttgtttttgaatagattgtgagagggatgggaaagattggtgtttggggtggttatttgatttttgatggataggagattaggataagtttattggatgagtcggaggggtttaggaggagggagttgagagtttttgttagggttgatatattttggtaaggagtttatttgttgtttattaggtaggtggtgtgtaaatataattaagtatttatgtttaaggtttttttttaattttttatttttcgaggtagagtttttattgtttaggttggagtgtaatggcgttatttcggtttattataatttttgttttttagattaaagtgtttatttttttttagttttttgagtagttggaattatagtcgtgtttttacgtttagttaatttttgtatttttagtagagacggggttttattatgttggttaggttggttttaaatttttgattttaggtgatttattcgttttggttttttaaagtgttgggattataggtatgaattattgcgttcggatttatgtttaaggttatttaaaaagtaaagtaaaattttaattatgttgaatttttgaatttgtagtagatttaaattaatgaatttaaattatatattaggtaaaatattattttgatatattttgtgattatattgagagaaaattaatataaagttaatttaaaattttttaatttgtaaattaaaagattaaattttgttaaaatttataaagaatatgttattataagaagaagtagtttaattttattttagtaaaattattaataaaataataaaaagttaaaattaaaaagatagttttaattgtgagttgaagttttatatttttttacgaattttatttaaaaaagagaaatttttaaaattattaatacgtaggtttttaatttatttttaagtttttttttattagtattgtagttacgggatgtatgtttgttttgtgtttttggtaggttcggatagtttgattatgggatttgttaaaggtagtaagatttttgttaaaaaagaaaaaattgaaaagaaagaaaggcgagaaggagatagaggaggagaaagggagggagagaagaaagaaaggagggaaggggtttagaggaaaggaaaaaggaaggagaaagagaataagaatataagttaatatttaagattaaattaaaggatgttagtaggggtgatagttag

SEQ ID NO: 845 - DNA, 5250 bp, Artificial Sequence
  chemically treated genomic DNA (Homo sapiens)
cggtagtttggagaatttggttttacgttatttatattttttaattgtttttttgtttttgggggtttttttttttttttgttttgtttttgtttttgagataggtttttgttttgatatttcggttggagtgtagtggtatagttttggtttattgtagttttaattttttgggtttaagcgatttttttgtttttgtttttcgtgtagttgggattataggtatgggtcgttatttttggttaatttttgtatttttaatagagatatagttttattatgttgattaggttggttttaaatttttgattttaagtgatttgtttttttcggttttttaaagtgttgggatgataggcgtgagttattatatttagttttcgtaattgtttatatggataattaatagttttttgttttaggtagagtttggtgtgaaagtagtttatgttttattttggaaaaattgtgtttttttttttatttaggaagttgtttgggtttgggttatatgtggatattttatgggtataagttgtttaggattttgtgtggaagtttaggataatgttagcgggaaggttattatgtggagagttggtttttgtttgggtaggattaagagacgtagggtagttttgggtaatttgtttatttttatttattttttttttttttttttgtgttaggtattttttggtaatttgttagttaatgattttgtattttaggtataagagtttttatttttttttattttttatttttgagtttatatagatttagaaataagttgtcgtggtgttgttttttgaggataaggttaatattaaggcggtttgggagaaagttggcgtttatattgttggttatgttacggaggttttggagaggtaagaatttttttttttttgtttatattttgggtttaacgtttattttagggttttattggttatttttaattatttttattttggatttagtttttagttttttattttttgtttttttttgaagtatgtttttgattttttttttatttggttttgagttatggtttagtttagattaagaaataatgtaagtaggtggtcgatacgttgattaatgtcgtggtttatttagatgatatgtttaatgatgtgtttgagttgaggaagttgtatgtttacgagttgtgggtggatttaggtaatattagggagagttttgggttgggaggaatttagggtgtgggggtagttggttttttttataggatagatttttttacgcgtttagggaggtggagtataggtggtagtagtatttgtattttttgattttttttttatagtttttgggtaaatgtttgttggtgatttaggtttgttatattttttttagtttatttatgtggtgtttttatggataaattatttgtttttgtgagtgttgtgttgatttaaaaatattattaagttagagtattggtggttatgttttttgtttgttgggttttttattaggttttttttttttttttgttttagtattttttgatttttgaatgaagttcgagtaggtagtagtttgtgtgtgtttgggttttttttgtttcggaatgtgttaatagtggaggtgtttatttgttttagattaaggatttttttgtagttgtatggggttggggagggagaattgtagggagtatgggaggggaagttgaggtgggtttgtttaagagaaggtgttgaattattttttgttttgagaggtgttaggtttgtaggtagtggtttagaagttggggaggagagaggtatttagggttttatttagggagttttagtatcgttatttttttttgaaatttttttggttgaatttagttaatatacgttttttattaaaataaaacgaaataaaataaattagtaaaataggttgtttttaatgtaagtgtaggtgttagaatattttttttatttttatttttttttgttagagggtaggtggttggagtgagggtgttggttttatttatattttttgtgttatggtgattttttgagagtagtttagttagtggggaaggaggaaggggttgggatgtttatagtcggtagtttatatttggggagattttttagtagagtattttgcggttttatttttgtacgttttttgtagtttgtaaggtgtatttagaatttattgtgtgtttagttttgagtttttagttaattgttttatttagggtttttgggattttttggtgtttttgttttttgtgttgttagtaatttttggaaacgtttttgttttcggtgttgaagttttggaatttatgttgggaagttgtatagtttatttggtttttagttagtttaggaatacgagtagtatttttagtttagtttttgttttatagtaagtttttttttttatatttatagtattgaattgagttttgggtagggtggagaggattttgttatcgttttttttttggatatggatttttttgaattgttggggagttttttttttttttttattatttattttttttgtgttttatagtttagagtattgttattttaatagaaatattttaaaaaataaattaaaattcgataggtacggtggtttatatttgtaattttagtattttgggaggttgaggcgagaggattatttgaggtcgggagtttgagattagtttgattaatatggagaaattttagttatattaaaaatataaaattagttgggtgtggtggcgtatgtttgtaattttagttattaggaaggttgaggtaggagaatcgtttgaattcgggaggtggaggttgaggtgagttgagattacgttattgtattttagtttgggtaataagagtaaaatttcgttttaaaaaataaataaataaataaataaataaattaaaatttatttatgtttttatatatatatatatatatatatatatatatatttttttttgtgttatttaaagtaggagagtgttttttttttttgtttttttatatttatttttagaagagattaaaatgaagggtttggaatttagtttatgggttttattttatgttgagggaatatagttatatttataattattgttataggttttttttttggataaaaatattattatattgtagatatttgtgtataattttttatttttagtgaagtgttttttttgtattttttttagttagtttatttagttttgcgttattttatagttttattgattattattatgtttttattatgatttttttaaaaaattatgattttatttttttatttttattattattattattattttttttttttttgtgacggagtttcgttttgttatttaggttggagtgtagtggtataatttcggtttattgtaagttttatttcgtaggtttacgttattttttttttttagtttttcgagtagttgagtagttgggattataggcgttttttattacgtttggttaattttttttatttttaatagagatagagttttattgtattagcgaggatggtttcgattttttgatttcgtatttgttcgttttagttttttaatgtgttgggattataggcgtgagttatcgcgttcggttttatgtatttatttttttgagatagagtttcgttgtgtcgttaggttagagtgttgtggtacgatttcggtttattgtaatttttaattttttggtttaaaggattttttagtttttatttttcgagtagttgggattataggcgtgtattattatatttagttaatttttgtatttttagtagagacggggtttttttatgttggttagtttggtttcgaattttcgattttagttgatttattcgttttggttttttaaagtgttgggattataggcgtgagttatcgagtttggttaaattattattttttatgagtagggatgtatttattggtatttttgtattttttattttttttttcgttaagtttattttttttttttttattttatatttttttatttatattttgtaattataggggtttttttttttttgttttttttttatttagagttaagtttgtttatttgtttataattagtatttatttagtaagttttttattagatagtatttggagagttgggggtgttatagtgaattacgatttttaggttagtgggagagttagttatataaattgtgagtttatgatttggggtttagttagtatttattattttacgcgttattttataatttcgggtagaggagtttgaatttggagtcgtttttagtttagtttcgtgttttttgcgttttggtgtttgttttttttcggtgtttgttatttaagtatattagtgattatcgttagagggaaagggagttgtaggaagcgaggttggagagtaggaggggttttgcgtagaaatttttttgagtttttatgggttagggcgttcgggtgcgcgtattttttttcgttttaggattgggcgaagtttttcggttcgtattcgttcgttcgtgtgtttttcgatttcgttggagtcgatgcgcgtttagcgcgtgttaggtcggggcgggggtgcgggttgattttttttttcgttagggacgtttcggcgttcgaaaggaaagggtggcgttgcgtttcggggtgtacgagtcgatagcgttcgattttaacgggtcggtttcgttagcgtcgttatcgttttgttttcgggcgagcgggatgggcgggagtggagtggcgggtggagggtggagacgttttggttttcgtttcgcgtgtatttttaggggaggtcgagttcgtcgttcggtttcgcgtaggtttcgttcgggatttttttgcggtttaggtcgcgtttcgggtttcgcgttagttaatgagcgtcgttcggtcgggcgtgttttcgcgttttaagtataaattttggcgcgttcgcggttcggtatttttttggtttttatagatttagagagaatttattatggtgttgttttttgtcgataagattaacgttaaggtcgtttggggtaaggtcggcgcgtacgttggcgagtatggtgcggaggttttggagaggtgaggtttttttttttgtttcgattcgggtttttcgttcgttcggatttataggttatttttaatcgttttggtttcggatttaaattttattttttattttgttttttttcgtagg

SEQ ID NO: 846 - DNA, 5250 bp, Artificial Sequence
  chemically treated genomic DNA (Homo sapiens)
tttgcggggagaagtagagtgaggggtggggtttgggttcggggttaggacggttgagggtggtttgtgggttcgggcgggcgaggagttcgggtcggagtaggggagggagttttatttttttagggttttcgtattatattcgttagcgtgcgcgtcgattttattttaggcggttttgacgttggttttgtcggtaggagatagtattatggtgggttttttttgagtttgtggggattagaagagtgtcgggtcgcgagcgcgttagggtttatgtttggggcgcgggggtacgttcggtcgggcggcgtttattggttggcgcggagttcggggcgcggtttggatcgtaggggagtttcgggcggggtttgcgcggggtcgggcggcgggttcggttttttttgggggtgtacgcggggcgggggttaggacgtttttattttttattcgttattttattttcgtttatttcgttcgttcgggagtagggcggtagcggcgttggcggggtcggttcgttggggtcgggcgttgtcggttcgtgtatttcggagcgtagcgttatttttttttttcgggcgtcggagcgtttttagcgagggagaaagttagttcgtattttcgtttcggtttggtacgcgttggacgcgtatcgattttagcgggatcggggaatatacgggcgagcgagtgcgagtcgggaggtttcgtttaattttggggcggagaggaatgcgcgtattcggacgttttggtttataggaatttaaaagaatttttgcgtagagttttttttgttttttagtttcgttttttgtagttttttttttttttggcgatagttattagtgtgtttgagtgataggtatcgggaaggaataaatattaggacgtaaaaagtacggggttgggttgggggcggttttagatttagatttttttattcggggttgtggggtggcgcgtggggtggtgggtgttggttaagttttaagttatggatttatagtttgtgtgattgatttttttattggtttagaggtcgtggtttattgtgatatttttagttttttaaatgttatttgatggaagatttgttaggtaaatattggttgtaaatagataaataaatttggttttgggtagggaaaggataggggagagaaggtttttgtggttgtagaatgtaggtgaggggatgtggggtgaggaaggaaggggtggatttggcgagggggagggtgggaggtgtaggagtgttagtgggtgtatttttgtttatgaaaagtgatggtttggttaggttcggtggtttacgtttgtaattttagtattttgggaggttaaggcgggtggattagttgaggtcgggagttcgagattaggttgattaatatggagaaatttcgtttttattaaaaatataaaaattagttgggtgtggtggtgtacgtttgtaattttagttattcgggaggtggaggttggagaattttttgaattagggagttggaggttgtagtgagtcgagatcgtgttatagtattttagtttgacgatatagcgagattttgttttaaaaaaataaatatataaggtcgggcgcggtggtttacgtttgtaattttagtatattgggaggttgaggcgggtagatgcgaggttaggagatcgagattattttcgttaatgtagtgaaattttgtttttattaaaaatagaaaaaattagttaggcgtagtggggggcgtttgtagttttagttatttagttattcgggaggttgagggaggagaatggcgtgaatttgcgaggtggagtttgtagtgagtcgagattgtgttattgtattttagtttgggtgatagagcgagatttcgttataaaaaaaaaaaaaataataataataataataaaaataaaaaaataaagttatgattttttggggggattatgatggaaatatagtaataattagtgagattgtggaatggcgtagagttgaatgaattggttgaaagggatgtaggggagatattttattgagaataggaagttgtatataggtatttatagtatgatggtatttttgtttaaaaagagagtttgtggtagtagttgtagatgtagttgtgtttttttagtatgggatggggtttatgggttgagttttaaattttttattttggttttttttgggggtgggtgtgaggagataggaaagagagatatttttttattttaagtaatataaaaaagggtgtgtgtgtgtgtgtgtgtgtgtgtgtgtgtgaaagtatggatagattttagtttatttatttatttatttatttattttttgagacggagttttgtttttgttgtttaggttggagtgtaatggcgtgattttagtttattttaatttttatttttcgggtttaagcgatttttttgttttagtttttttagtagttaggattataggtatgcgttattatatttagttaattttgtatttttagtataattggggtttttttatattggttaggttggttttaaattttcgattttaggtgattttttcgttttagttttttaaagtattgggattataggtgtgagttatcgtgtttgtcggattttagtttattttttaaagtgtttttgttgaaataataatgttttgggttgtgaggtataggaagagtgggtggtggagagggggagggaattttttaataatttagagaggtttatgtttagaagaaaagcggtgatagggttttttttattttatttaaagtttaatttagtattgtgagtgtggagggggaggtttgttgtggggtaggggttgggttggaagtgttgttcgtgtttttaggttggttgagagttagatgggttgtgtaattttttagtatggattttaggattttagtatcggggatagggacgtttttagaagttgttggtagtataggaagtagaagtattaggaggttttagaggttttgggtggggtaattagttgggagtttagggttgggtatatagtgagttttgaatgtattttataaattgtaggagacgtgtaggagtaaggtcgtaaggtgttttgttgaagagtttttttaggtgtgggttgtcggttgtgagtattttagtttttttttttttttttattgattgggttgtttttagagggttattatgatataggaagtgtgagtagggttagtatttttattttagttatttattttttggtaggaaggggtgagaatgagagaaatgttttggtatttgtatttgtattggggatagtttattttgttagtttgttttgtttcgttttgttttgatggagagcgtatgttaattgggtttaattagggagattttaaaggagggtggcgatgttgggattttttgagtagaattttggatgttttttttttttttagtttttgagttattgtttgtaggtttggtattttttaggataggggatggtttagtatttttttttgagtaggtttattttagtttttttttttatattttttgtagttttttttttttagttttatgtagttgtagagaggtttttggtttgagataggtaaatatttttattgttggtatatttcgggatagagagaatttaggtatatataggttgttgtttattcggattttatttaaagattaggaagtgttggggtagggaggggaggagggtttggtgggaggtttagtaggtagggggtatgattattaatgttttagtttaatggtgtttttaggttaatatagtatttataaaagtaaataatttgtttatggaggtattatatgggtaaattgggaagggtgtggtaggtttaggttattagtaggtatttatttaggaattgtggagagagagttaggggatgtagatattattgttatttgtgttttatttttttgaacgcgtgggagggtttgttttatgaggaaggttagttgtttttatattttagattttttttagtttaaagttttttttgatgttgtttgggtttatttatagttcgtggatatgtagtttttttagtttagatatattattgggtatgttatttaagtggattacggtattggttagcgtgtcggttatttatttgtattgttttttgatttgggttgagttataatttagggttaagtgagaggaaggttaggaatatgttttagggggaagtaaagagtgaggggttgggggttgggtttagggtaagaatagttaggggtggttagtggagttttggagtgggcgttggatttaaggtgtgagtagggagaggagggtttttgtttttttagggttttcgtggtatagttagtagtgtgggcgttaatttttttttagatcgttttggtgttagttttgtttttaggagatagtattacggtagtttatttttgagtttgtgtaagtttaaaagtgaaaggtgggggagagtaggagtttttatgtttgggatgtagggttattggttggtaagttgttaggaggtgtttggtataggaaaggggaggaggagtgagtgagagtggataggttgtttaaggttgttttgcgttttttagttttgtttaaatagagattagttttttatatggtagttttttcgttggtattgttttgagtttttatatagggttttgagtagtttatatttataaggtatttatatatggtttagatttaggtagttttttggatggggagaagagtatagtttttttaaagtgaaatataagttgtttttatattaaattttgtttgggataaaaagttgttaattatttatgtaaatagttgcgggggttgggtgtggtggtttacgtttgttattttagtattttgggagatcgaggagggtagattatttgaggttaggagtttgagattagtttgattaatatggtgaaattgtgtttttattaaaaatataaaaattagttaggaatggcggtttatgtttgtaattttagttatacgggagatagaggtaggagaatcgtttgaatttaggaggttgaggttgtagtgagttaaaattgtgttattgtattttagtcggggtgttagagtaagggtttattttaaaaataaaaataaagtaaaaaaaaaaaaagatttttaaaaataaaaaaatagttgggggatgtagataacgtggggttaagttttttaaattatcg

SEQ ID NO: 847 - DNA, 5273 bp, Artificial Sequence
  chemically treated genomic DNA (Homo sapiens)
tgaatgaatgaacgaatgagtaaatgagtaaatgaaggaatgattattttttgttttagaatttttggaattagaggataatattaataatattatcgtatagtgtttttttgttgttaatgttataatatataaagaggaagtatgtagtaaataatcgaatagttattttttttttgattataggagtaatatttttttttttgagtatatttttgttataggtaaaattagaaggatttttagaatttttttagttgtatatatttttaaaaatttgtattatatgtatgttgattaattttaaatttatttgaatatttaaatagaatttgttgtttttttgtgtttgaaagtgtttttatagtaattttgtttgtattgttagaatatattgataatgtgttatagttaattgttttgattataatattttgaattgattggtagtagaagttttttttatatttatgtgttttttttaagttattatatatagtaggtatgagattttttatattgaataagatatttaggaattattggtttatatattagaagtagagttatttagggtattttggggaagattatttttatatttttgagtatagggaagtttttataagagtaagatattaaaaggagatatttgtgtggtattcgaaagatagtaagagagattgtagattttatgattttgatagggaaaataaattatatttttttttttaaaagttaaaaaaaaagagtaaatatagtttattatattttttatttttatattattagaagtagttagtgagtttaggtaagatgttggttttaaaaatttaaatattagagaatttatgagaatattatttggatgggatatgtgtcgagtaatataattattatatgttaggtattgttatttttatattgaagatgaggaggttaagagatgaaaaaagatttggtattttgttgttatattaaaattatttgttagagtagagtttttgtaagagtttaggagtgtgggagttaaatgatgatatatatggatataaagaatagattaatagatatttaggtttatttgagggttgagggtgggaagagggagacgatgaaaaagaatttattgggtattaagtttattattgagtgatgaaataatttgtatattaagatttagtgatatgtaatttatttatataatttgtatatgtatttttaaatttaaaataaagttaaaataaagtataggaatggaattaattttttaagatttggttttaattttatttgataatttattaaatggttgtttttttttttttattatggcgttgttttataaattatgtttagtatgtttgaatgaaagggtgtgtgtgtgtgtgaaagagagggagagaggaagggaagagaggacgtaataatgtgaatttgagtttatgaaaattttttaataaaataatttaatgttaggagaattaagtttaatagttttttaaattatttattttttgagttttagagtagttttttgaattaatgtttatatgtttgtaaagggtgtttagattgaagttaagattttatttttaaagagatgtaattttaaatttatttgaagattgtatttttgttttttataaattgatattatggtttatttaatgaggttaaaaaaaagttaattttgaatgaaaatttgagtttagtggaggaaatattaatgaataaggtgtagattgaaatataaattttttgtaataattatgtatatattttagtaaagttttgtttatgttgattttattgtttttggtaagaaatataattttttaaagtgaattaaattattttatttttaaattattttgtgtgtgtgcggtttgtttttatgggttttggtttttttggagtatttttattttattttaattaattaattttgagagttgttgagttgtgtttattgagagattgtgtatttgcgagagaagtttgtagtaagtagttagattgtgtttgatttaggaatatatatagtagattgttaaaatgttttatttggggaattttagattaaatagtagagtatgtataaaaatattttagttaagtgttgtttttgaaataaatgataaaattatatttttatagatgagtgttatgatttttatggaggaagttaatatttattttttaagtatatttagattagggttattttgatataaaatattaggatttaagaaagattaatagattggagtaaaggaaatggatttttgtttttttcgttgttttttttttgaggatttgtgtgtgtgtgtgtgtgtgtgtgtgtgtgtgttgtggttagtggggttggaataaaagtagaatagatttgtatttgttgtggtatttatttatagagtagaagtaagtttataatagtgaagatgttagtaagtttgaatagttttttaggaattttgaatgttgatttagatttgaaattgaggttttgattataattaaatttgtattatttattgttttttgaaatttatttgtttggtatgtttgggtttttgatggttttagtatagtttgtagttttgtttttgtagggtattatgggtaatagaaagaaaagtttgcgttatattttagttatattaagtaattattattggaaaagtaatttttgttttgaagttaggatgatggtatttgtagtagttgttaatataagagaaggatttatagtttattatttaaaaaagaaaataaaatagaaaaaggaaaattatttttgagtataagaagttgtagggtaagtttttaagaaggtgataatttttgttaattaggattttaaagtttttgttttgataattttggttttttagaatattataaatataatttatattataattttataaagtttgtgtattttttttgatttaggatatttgtaaaagatatatttaaattttcgtagaatattttattttatatatatatgttttttatattagggatgtgaaatagggttttgaaaattgtttaaatttaaaataatgttaatgtaggtttaaatttaataaaataaaatttaaaatttaatagttaagttaaatttgtatgttttaatatttaaaatattttaaagacgtttttttttaggatttaatatgtgaaatttttttttagggatatacgtgtgtttagatttttattgttttagttttttatagaggaatgaatataaaaagaaaatatttaaattttattttttttatttttataattatatataggtataattttttaatttaggttttagatagttatagaagaattaaatattttttgcgtgtgtgagaataattagagtgagatttttttataagtatttgatgagggttgagataggtagaaaaagtgagagatttttatttatttagtaataatagagaaagtatttaagagaataaagtaatggaaataagaaatttgtaaatttttttttgataattagaaatagaggatttagttttttttggttaatttaaattttattttattttattgttttattttattttattttattttattttgtgtaatcgtagttttagagtgttagagttgaaaggaagaagtaggagaaatatgtaaagtaaaagtataatattttttttattaaatcgattgggtttttaggtaggggtaggatttaggatgattgatagggtttttagggaatattgagattttacgttgattttataaatgtttgttatttttgttgttttaattatattttttaatagtaggaagtagaattttgtattttaaaagtttttttttatttgaggagttaatttagtataaggggaaaaagtatagggggatgggagaaaggcgattacgttgggaagttatagagaaagaagagtaaattttagtaaaggaggtttaaataaataaaatataaagagaaataggaatttgaattaaggaaatgattttaaaacgtagtatttttagtggattagaggaaaaaaataatttgagttaagtagaagattttttttttttttatttttattttttaagttatagaggttttttgtttttttagatatttttgtagattagtttaggtagaaatagttagatgtttttagttaattttttatttgatattattgattattttattgatagttatattttgggttgtaagtgattttttatttatttgtatttttgattgtattaagaggtttttagttttttattttttgttttttaaaatttaataagtaattaatgtatagagtatattgatttgtatttattttatttttagatataatttattagtatgtatgagtaaattaagaaaaataataataaatgaatgtatatatatgtatatgtatgtgtgtatatatatatatatatatatatattttttttttttttttattagaaggttttaatttaaataaggagaagatatgtttagaattgaggtagagtttttatttattttgttttgtaagtattttgtatattttggagacgtaggaagagatttatttatatattttaaagttgaattatggtagataaagtttttttatttttagtgtattaattttttatttgtgtaataagaaaattgggaaaacgatttttaatatgtttattaagttgtgattttaaatattacgtaaatatatttgtaaaggaggatgtttttagtagtaatttgtattgatggtatggggttaagagatatattttagagggagggttgagggtttgaagtttaatttttaagttagtgttagaagagttaaggataggtacggttgttattatttagattttattttgtggagttatattttagggttggttaatttatttttaggagtagggagggtaggagttagggttgggtataaaagttagggtagagttatttattgtttatatttgtttttgatataattgtgtttattagtaattttaaatagatattatggtgtatttgatttttgaggagaagtttgtcgttattgttttgtggggtaaggtgaacgtggatgaagttggtggtgaggttttgggtaggttggtattaaggttataagataggtttaaggagattaatagaaattgggtatgtggagatagagaagatttttgggtttttgataggtattgattttttttgtttattggtttatttttttatttttagg

SEQ ID NO: 848 - DNA, 5273 bp, Artificial Sequence
  chemically treated genomic DNA (Homo sapiens)
tttaagggtgggaaaatagattaataggtagagagagttagtgtttattagaaatttaagagttttttttgtttttatatgtttagtttttattggtttttttaaatttgttttgtaattttgatattaatttgtttagggttttattattaattttatttacgtttattttgttttatagggtagtaacggtagatttttttttaggagttaggtgtattatggtgtttgtttgaggttgttagtgaatatagttgtgttagaagtaaatgtaagtaatagatggttttgttttgatttttatgtttagttttggtttttgttttttttgtttttgggagtagattggttaattttagggtgtggttttatagggtgaggtttaagtgatgatagtcgtatttgtttttggtttttttggtattggtttaggagttggattttaaatttttagttttttttttaagatatattttttggttttatattattagtataaattgttattaaaaatatttttttttgtaagtgtatttacgtaatatttggaattatagtttggtaagtatattgaagatcgtttttttaatttttttattatataaataagaaattgatgtattaaaagtggaagagttttgtttattataatttagttttgggatatgtagatggatttttttttgcgtttttagaatatgtaaaatatttataggatagaatggatgaaaattttattttagttttaagtatattttttttttatttggattaaaattttttggtaagaaaagaaaaaaaatatatatatatatgtgtatatatatatatatatatatatatatatatgtatttatttgttgttgttttttttaatttgtttatgtatgttaataaattatgtttaaaaatagaataaatataaattaatgtgttttgtgtattagttatttattaggttttgggaaataagagataaaaaattagagattttttaatgtagttaaaaatataaataaataaaaagttatttataatttaaagtgtgattattaatggggtaattagtggtgttaaataggaggttaattggggatatttaattgtttttgtttggattaatttgtaagagtgtttgggggaataaaaagtttttgtgatttagaaagtaggggtaggaggggaaaaggttttttatttggtttagattattttttttttttagtttattaagaatattgcgttttaaaattatttttttgatttaagtttttatttttttttatattttgtttgtttaaattttttttattaaaatttatttttttttttttatagttttttaacgtgatcgttttttttttatttttttgtattttttttttttgtattaaattaattttttaggtgaggaaaaatttttgaagtgtagagttttgttttttgttattaaaagatgtaattaaaatagtaaaggtagtaagtatttatgaggttagcgtagggttttagtgttttttaagggttttgttagttattttgaattttgtttttatttggaaatttagtcggtttagtaaggaaagtgttatatttttattttgtatgttttttttattttttttttttagttttaatattttgaaattacgattatataaaataaaataaaataaaataaaataaaataataaaatgaaataaaatttaggttaattaaaagaaattggattttttatttttagttattagaaggaaatttataaattttttatttttattgttttatttttttaaatgttttttttattattgttaaataaatagagattttttattttttttatttgttttaatttttattaggtatttgtgaaaaaattttattttgattatttttatatacgtagaaagtgtttggtttttttatggttatttggagtttaggttaaaaaattatgtttatgtatgattatagaggtaagagggataaaatttaagtattttttttttatatttatttttttgtaaaaaattaaagtaatgaggatttaggtatacgtgtatttttgagaaaagattttatatgttgaattttgggaaaagacgtttttaaaatattttaaatgttaaaatatatagatttgatttggttgttagattttggattttattttattaaatttaaatttgtattagtattgttttagatttagatagtttttaagattttgttttatatttttgatataagaggtatgtatatgtgaaataaagtgttttgcggaagtttgaatatgttttttgtaaatattttgggttaaagaaaatgtatagattttatgaaattataatataggttatatttatagtattttgaaagattaaaattgttaaagtaagagttttgaaattttgattggtagaaattgttatttttttaaagatttattttataattttttatgtttagaaatagtttttttttttttattttgtttttttttttaaatgatgaattatggattttttttttgtgttggtaattgttgtagatattattattttggttttaaggtaggggttgtttttttaatggtagttatttagtgtgattagagtgtaacgtagatttttttttttattatttataatattttgtagggataaggttgtaagttatattaagattattaaaagtttaggtatattaggtaaataagttttaagaagtaataaatagtgtaaatttggttatggttagagttttagttttaaatttaaattagtatttaaagtttttgaaaaattatttaagtttattgatatttttattattgtgagtttgtttttattttgtgaatggatgttatagtaggtgtaggtttattttatttttattttagttttattgattataatatatatatatatatatatatatatatatataagtttttaaaaaagagatagcgagagagatagaggtttattttttttattttagtttattaattttttttaagttttaatgttttatattagaatggttttagtttgggtatatttagaggatgaatattaattttttttatgaaaattatgatatttatttatgggagtgtggttttattatttgttttaaaagtagtatttgattagagtatttttatatatgttttattgtttagtttaaaattttttaagtgagatattttagtaatttattgtatatgtttttaggttaagtatagtttagttatttgttatagatttttttcgtagatatataattttttagtaaatataatttagtagtttttagaattaattaattaaaatgaaataaaaatgttttaagaaaattagaatttatagaaataaatcgtatatatataaaatagtttggaaataggatagtttagtttattttaaaaagttgtattttttattaaaagtaataaagttaatatagatagaattttgttaaagtatatgtataattattatagaaaatttatattttagtttgtattttgtttattaatattttttttattgggtttagatttttatttagaattagtttttttttaattttattaagtgggttatggtgttaatttatggagagtagaggtatagtttttagataaatttgagattgtatttttttagaggtagaattttggttttagtttgaatattttttataaatatgtaggtattaatttagaggattgttttgaagtttaagagatggatgatttaggagattattaggtttaatttttttgatattaaattattttattgaaaaatttttatgaatttaaatttatattattacgttttttttttttttttttttttttttttttttatatatatatatatttttttatttagatatattgaatatagtttataaagtaacgttatagtgagaaaagaaaaataattatttgataaattattaaataaaattaaagttaaattttgaggaattaattttatttttatattttgttttaattttattttaaatttgggggtatatgtataagttatataggtaaattgtatattattgggttttgatgtatagattattttattatttagtgatgaatttaatatttaataggtttttttttatcgtttttttttttttatttttaatttttaagtaggtttgggtgtttgttgatttattttttgtgtttatgtgtattattatttagtttttatatttttagatttttataaaagttttattttaataaataattttaatataataataaggtgttaagtttttttttattttttgatttttttatttttaatatgaagatagtaatgtttagtatatagtaattgtgttgttcggtatatgttttatttaggtgatgtttttatgaattttttggtatttggatttttagggttaatattttgtttagatttattgattatttttaatggtgtaggaatagaaggtatagtaagttatatttgttttttttttttgatttttggagaaaggaatgtagtttgttttttttattaagattataaggtttataattttttttattgtttttcgaatattatataagtatttttttttaatattttatttttatgagaatttttttatgtttaggaatgtgaaagtgattttttttaaaatgttttgagtagttttgtttttgatatgtaaattagtggtttttaaatattttatttagtataaagagttttatgtttattatgtataatgatttaaggaaaatatatggatataaaaagagtttttgttgttagttaatttaaaatgttgtgattaaaatagttaattataatatattgttagtatattttggtagtatagatagagttattgtgaaagtatttttaaatataaggaaataatagattttgtttaggtatttaagtaagtttaaaattaattaatatgtatataatatagatttttaaaaatgtatataattgagaaagttttaaaaatttttttaattttatttatggtaaaaatgtgtttaaggaaaaaaatattatttttatgattagaaaggaaataattgttcggttgtttattgtatgttttttttttgtatgttgtagtattaataataaagaaatattgtgcgatggtattattaatattgttttttaattttagaagttttaaagtaaggaataattatttttttatttatttatttatttattcgtttatttattta

SEQ ID NO: 849 - DNA, 5268 bp, Artificial Sequence
  chemically treated genomic DNA (Homo sapiens)
aggttaggggtcggcggttggttagggatgaagaataaaaggaagtattttttagtagttttatatattcgtttttggaacgtttgaggttattaataagtttttagtttagacgttatgggttattttatagaggaggataaggttattattataagtttgtggggtaaggtgaatgtggaagatgttggaggagaaattttgggaaggtaggttttggtgattaggataagggagggaaggaaggattttgtgtttggtaaaagtttaggtcgttttttaggatttgtggtattttttgattgttaaattgtttttgttaattttataggtttttggttgtttatttatggatttagaggttttttgatagttttggtaatttgttttttgtttttgttattatgggtaattttaaagttaaggtatatggtaagaaggtgttgatttttttgggagatgttataaagtatttggatgattttaagggtatttttgtttagttgagtgaattgtattgtgataagttgtatgtggattttgagaattttaaggtgagtttaggagatgttttagtattgttgtttttagtttcgaggtaatttagataattgagtattgatttgagtatagtagggtgtgagttgtttgaagatattggggttgggagtgaagaaattgtagaggattaattgggttgagatttagtggtaatgttttagggtttaaggagtgtttttgaaaatttagatggataattttgattttgagaaaagagaggtggaaatgaggaaaatgatttttttttattagatttcggtagaaagaatttttattttttttttatttttgttattcgttttaaaatatttatttggaggtaggataagtatggtcgttaaaaagatgtaggtagaaggtatatattggtttagttaaagtggggaattttggtggttaaatatatattgttaaggttatttttatattagttggatatatataaaatgttgttaatgttttattataaatttatattttttaattttagatgggggtaaagtatgtttaggggtgaggaataattgaaatatttgggttggagtagattttgaaagttagttttgtgtgtgtgtgtgtgtgtgtgcgcgcgtgtgtttgtgtgtgtgtgagagcgtgtgttttttttaacgtttttagtttatagtatatagggtttatggtggtaagaagataataagatttaaattatggttagtgattagtgttgtaagaagaataattatttgtatttaatgggaaagtaaaattttaggttttgagggaagttaatataggtttgattttgggtggaagtttggtgtgtagttatttggaggttaggttggagtttttagtttattatgggtttatttttattgtttttttttattttaatagtttttgggaaatgtgttggtgatcgttttggtaatttatttcggtaaagaatttatttttgaggtgtaggttttttggtagaagatggtgattggagtggttagtgttttgttttttagatattattgagtttattgtttatgatgtagagtttttaaggataggttttattttgtaagtaatataaataataaatttattttgttaagagattatatatggttgtttttagtttttttttttatgtttttttaaatatatgagttataaagggttttatgttgagggatgtgtttatgtgtatttatatatggttatgtgtgtttgtgttatgtgtatattttatatttttttgtttacgttagatgtgggttttgatgagtaaataaaagaattaggtaataaagaaatttatatatgggagcgtttgtaagtgggagtaaaaggtgtaggagaaatttggttggaagaaagatttttataggataggattttttagaaatagatgttttggaagagatggggaaaggtttagtgaagggggttgaatttttttttttggattgtagtatagtagcgaggaaggggtttaacgaagaaaaagtgttttaagttttaggaagttaaggtttaggtagggatagttattttattttattaggggtaatattatttttaacggtatttggttttttttagtttttgtgaggttttacggggaggttgaggtgttagagattagagtaggaaataggtttttttttttacggtaattataatgaagtgatttttattttattaaggaatttttttattttaagtgttgacgtatgtttaaagaggtgaaattaattttatatttttaagtttatagattggttatagtattttaaggaggagattttattgtaagtttttagggaggtggggatttaggtgaaggaaatgagttagtagaagtttataagttagtattagcgtgttatgttttagtagtagaatagtacggttagatgaaaatatagtgtgaagaatttgtataatattaattgagaaggtagatttattggagtttttatataattgaaagttaatgtacgttaataagtaagagtttagtttaatgtgatggtgttatgaatttaacgtttgtgtttttagaaaatttatatgttgaatttttaatttttaattggttttatttgtgggggaggttttggaaaagtaattaggtttagaggagtttatgagagtagatttttattatagaattattttttttattagaagtagagagattagttattttttttttttttggtgaggatatagtgggaagttagttatttgtaatttaggaagagagttttgattaggaattagtagaaaagtgagaaaaaattttgttgttgaagttatttagtttatgttattttgttatagtattttgtattaagtaaggtagatgaagaaagagaaaaaaataagtttcggtgtttagtggattagaaattatgtttattttaggtttataaatttttatttgttttttgtgttttagaataaaatattaattttattatttttatttgtaagatgtaaatagtaagtttgattttttttgtttaatttcgaattttattttttttttaacgtattttaggtttgtaatgtgtttatatatagtgaaatgttaagttttttttttatattttttttttttttttttttttttagttttagagttttttatatgttttttttatttttaggaatttttttttttaaacgttttttgtttggtttttatttaaattataaaggatttattttaaatgttattatttattattattttataattcgtattttttttttttgttttttttttttttagtaaaataagtttataaaaaattgaaggaataaatgaatggttattttataggtagagtagatataagggttattggttgtcgatttttattgttattttttaatagtatgttaaataaggggtagattatttatgttgtttatttttagattataaaagataattttttgatgttgttatggtattttttttttttttaattttattttattttattttaatttcgaaggtatatgtgtaggatgtgtaggtttgttatatgggtaaatgtgtgtttttttggttttttagttatttgtattaatgagtagatataagttttatataggattatgaaggatgaaagaattttattaatattataataattttaattaatttgatagtttaggggataaattaatttgaagatatagtttgttttcgataagttagaattttagagtttttggtattataatttagtaaggttagagattatggattatttttagagaaaaataaaaataaattaattaaaagtaaaatagaattaaaaaatttttataaatattttttatttagttaatggtttaatatgttagaaatagtattgtgttagaaataaagttgtttaaagtatattaatattcgagttataatagtgtgtggattattagttaataaaaataatttttgtttttttagagttgttttttatgtatacgtatattttatgttttagagtaagattttttgagaagtgaatttagtatttatataagataattaattttaatttatagtatttgttaaagaatattttattattatttttattgagtatagaagagttacgttaaaattttgggttattagttagtatatatatttatttagtggtaaatatatattatttggtgtatatatatatatttgaatatggaattaaatatttttttaagatgaaatagttatgatttattttaaataggtacggataagtagatattgaggtaagtattaggttttatattatgtaatattaatttattattgcgttgaaattgtggtttttatgaaaattgtttttattatattattgagaaattaagagataatggtaaaagttataaagagtatatttaaaaagaagtatagtattttttttttagaaattattgttaattgaaagagattaagatttgtttcgttaaaaattttggatttatgtttaaaatatattttataatttttgaattttttaaaaattggtatatgttttagttttaaattataggttttattggagttatagataagaaggtaaaaaacggttgataaaagaagttttggtattttttatgatgggagaaggaaattagttaaagggaagaataaattagagaaaaattggaatgattgaatcggaataaggtaaaggttataaaaaaaattaagtagtagtatttttttgggggttttttttttatattattttaatgtaaatatttgtttgaaacggtttttggttaaattttatttatgggttggttagttttgttttgattaatagttttgataaggtaaatttgattaatagttttagagtatttagtgaggttaggggtcggcggttggttagggatgaagaataaaaggaagtattttttagtagttttatatattcgtttttggaacgtttgagattattaataagtttttagtttagacgttatgggttattttatagaggaggataaggttattattataagtttgtggggtaaggtgaatgtggaagatgttggaggagaaattttgggaaggtaggttttggtgattaggataagggagggaaggaaggattttgtgtttggtaaaagtttaggtcgttttttaggatttgtggtattttttgattgttaaattgtttttgttaattttatagg

SEQ ID NO: 850 - DNA, 5268 bp, Artificial Sequence
  chemically treated genomic DNA (Homo sapiens)
tttgtgagattgataagaatagtttgatagttagaaggtgttataaattttgagaagcgatttggatttttgttaggtatagggttttttttttttttttttgttttggttattagagtttatttttttagggttttttttttagtattttttatatttattttgttttataggtttgtgatagtagttttgtttttttttgtgaaatgatttatggcgtttggattaggagtttattgataattttagacgttttagaagcgagtgtgtggaattgttgaagggtgtttttttttattttttatttttagttagtcgtcggtttttggttttattggatattttaagattattggttaagtttgttttgttaaggttattggttaaggtaaggttggttaatttatgggtggagtttagttagggatcgttttagatagatatttgtattgagatagtgtggggaaggggtttttaagaggatattgttgtttaattttttttatagtttttgttttgtttcgatttagttattttagtttttttttaatttatttttttttttagttagttttttttttttattatagaggatattaggattttttttgttagtcgttttttatttttttgtttgtagttttagtgaggtttgtagtttaaagttaaagtatgtattaatttttgaaaagtttagggattgtgaaatgtgttttaggtataggtttaggatttttgacgggataaattttagttttttttagttagtagtggtttttaaggaaaaagtgttatatttttttttgaatatattttttgtgatttttgttattattttttaattttttaatagtgtagtgaaaataatttttataaagattatagttttagcgtagtaatagattagtgttatataatataagatttaatgtttattttaatatttatttattcgtatttatttgaaataaattatgattgttttattttagaaaaatatttgattttatatttaggtatgtatgtatatattagatgatgtgtatttattattggataagtgtgtgtgttggttgatgatttagggttttggcgtagtttttttatgtttagtaaagatgatggtagaatgttttttggtaggtattgtggattagaattaattattttgtataaatgttaggtttattttttagggaattttattttaagatataagatgtgcgtgtatatggaaaataattttaaagaggtaagggttgtttttattgattaatagtttatatattattataattcgaatattagtgtattttagatagttttatttttaatatagtgttgtttttgatatattggattattaattgggtaggaagtatttatggaggttttttggttttgttttgtttttggttagtttgtttttgtttttttttgaaagtgatttatgatttttaattttgttagattataatgttagaagttttggaattttggtttatcggaggtaagttgtatttttaaattagtttattttttaagttattaggttgattgaaattattataatattggtgaaatttttttattttttatgattttgtgtaaagtttatatttgtttattgatatagatggttaaaaggttagaaagatatatatttatttatgtaataagtttgtatattttgtatatgtattttcgaaattaaaatgaaatgaaataaaattaaaaggaaaaaaaatgttatggtaatattaggaagttattttttatggtttaaaaatgggtagtataaataatttattttttgtttagtatattattgaaaaataataataaaaatcggtaattagtagtttttgtgtttattttgtttatgaagtagttatttatttatttttttaattttttataaatttgttttattaaaaaaaaaaaggataaagaaagaaagtgcgaattgtgaaatggtagtgagtgatggtatttgaagtgggttttttatgatttgaatggaggttaggtagaagacgtttggagaaagaagtttttgaaggtaggaagggtatgtggaaaattttgaggttgaggaaaaaaaagaaagaaagaaatataaagaaagaatttgatattttattgtatataaatatattataagtttaaagtacgttgaagaaaaaatagaattcgaagttagatagaagggattaggtttattatttgtattttatagatgagagtagtagagttggtattttattttgaaatatagaggataagtggagatttgtaaatttgagataaatatggtttttaatttattgaatatcgaagtttatttttttttttttttttatttgttttatttagtgtaaggtgttataataaaatagtatagattgggtgattttaataataggatttttttttatttttttgttggtttttggttagggttttttttttgggttgtaggtggttgattttttattgtgtttttattagaaggaagagaaatggttaatttttttgtttttgatgaggaaaataattttatgatggggatttgtttttatgagtttttttaaatttgattatttttttaaagttttttttataaatggagttaattgggagttggggatttagtatgtgaattttttggagatataagcgttaagtttataatattattatattaaattaaatttttgtttattaacgtgtattaatttttaattatataagaattttagtgaatttgtttttttaattaatgttatataaattttttatattatatttttatttgatcgtgttgttttgttgttgagatatgatacgttgatgttgatttgtgagtttttgttggtttattttttttatttaggtttttatttttttagaagtttataatgaggttttttttttgaaatgttgtgattagtttgtagatttaagggtatgggattaattttatttttttaggtatgcgttaatatttaaaatgaaaaagttttttagtaaagtaaggattattttattgtagttatcgtggaaagaaaaatttgttttttgttttgatttttaatattttaattttttcgtagagttttataagggttgagaaaagttagatgtcgttggaaatagtattgtttttaataaaatagaatggttatttttgtttaaattttgattttttaaagtttggaatatttttttttcgttgagtttttttttcgttgttgtgttgtaatttagggaagggggtttagttttttttattgaatttttttttattttttttaaaatatttgtttttgaggagttttgttttatagaggttttttttttaattagattttttttgtattttttatttttatttgtagacgtttttatgtataagtttttttattgtttagtttttttatttgtttattaaaatttatatttaacgtaaataaaaaagtgtggagtgtgtatatgatataaatatatatagttatgtataaatatatataaatatattttttaatataaaattttttgtggtttatatatttaaaaagatataaaaaaaagaattgaagataattatgtgtgattttttagtagaatagatttattatttgtattgtttgtagaataaagtttatttttgaaagttttgtattatgggtagtgagtttagtggtatttggaggatagggtattggttattttagttattattttttgttaggaagtttgtattttaggggtgaattttttgtcgaaatggattgttaaaacggttattagtatattttttaggagttgttgagatgaaaggagataataaagatgaatttatagtgagttgagagttttagtttggtttttagataattatatattaagtttttatttagaattaagtttatgttaattttttttaaagtttgagattttgtttttttattaaatgtaggtagttgttttttttgtagtattagttattggttataatttaaattttgttatttttttgttattatgaattttgtatgttgtaggttgaaaacgttaaaagaaatatacgtttttatatatatataaatatacgcgcgtatatatatatatatatatatagagttgatttttaaaatttattttagtttaaatgttttaattgttttttatttttggatatattttgtttttatttggaattaaaggatataagtttgtaatgaagtattagtagtattttatatgtgtttagttgatataggaatagttttagtaatgtatgtttggttattaaagttttttattttgattgagttaatatatgttttttgtttgtatttttttaacgattatatttgttttgtttttagatagatgttttaaaacgaataataaaaataggggaaaggtgaaagttttttttatcgaaatttaataaagaaaagttattttttttatttttatttttttttttttaaagttaaagttgtttatttagatttttagaggtattttttaggttttaaaatattgttattgggttttagtttagttagttttttgtagtttttttatttttaattttagtatttttaaatagtttatattttgttgtgtttagattaatatttagttgtttaagttgtttcgagattaaaggtaatagtgttgaaatattttttggatttattttgaagtttttaggatttatatgtagtttgttatagtgtagtttatttagttgggtaaaggtgtttttgagattatttaggtgttttatggtattttttaaggaagttagtatttttttgttatgtgttttgattttggggttgtttatgatggtagaggtagaggataggttgttaaagttgttaaagaatttttgggtttatgggtagataattaggagtttgtgagattgataagaatagtttgatagttagaaggtgttataaattttgagaagcgatttggatttttgttaggtatagggttttttttttttttttttgttttggttattagagtttatttttttagggttttttttttagtattttttatatttattttgttttataggtttgtgatagtagttttgtttttttttgtgaaatgatttatggcgtttggattaggagtttattgataattttagacgttttagaagcgagtgtgtggaattgttgaagggtgtttttttttattttttatttttagttagtcgtcggtttttggttt

SEQ ID NO: 851 - DNA, 5994 bp, Artificial Sequence
  chemically treated genomic DNA (Homo sapiens)
gtttataaaagggaattaagggtttttttttgtttttaatacgattataaaacgattatagggagggggcgtttttcgttagatacgattttattattacggggtgaaggattatatttacgtttatacgtttagatttatttattttttttttttgagacggaattttgttttgtcgtttattttggagggtagtggtataattttggtttattgtaatttttgttttttgggtttaagaggtttttttgttttagtttttcgagtagttgggattataggcgcgaattattacgttcggttaatttttgtatttttagtagaggcggggttttattatgttggttaggttggttttaaatttttgatatggtagtttgtaattttagttattcgggagattgaggtaggagaatcgtttgaatttaggaggtggggttgtagtgagtcgagatcgtgttattgtattttagtttgggagatagagcgagattttattaaaaaaaaaaaaaaaaaaatttttgaagttttttttgagtttatattttagtggattgtaaatagaaatattttttttttttgtggataaagaaaagtagggtaagtaggggtttagatagaggaggggaggatttagattttaaatgggttggttattgtaggtttattaacgtggtgatatttgagggagtggtaatattagggaaggggttttaggggagtggttaggagttagggatagagggagggaggataggaggttttgtttgtttttttttttatatgtaagttttaggagtgagtggggggtgtcgagggtgttgtgtttttcggtttgagttttaggaaggaagggtagtagttagggatgttagggaaggatagtggagtaggttttgtggggaattttacggttttattgttgagatgatttgttggagatatatagatgaggatattaaatatatttttggattaggttttggggtttgagttcggaagagaggtttgtatggatatatttattaatgggagtattaggatatagatggaggttaatgttatgttgtagataggatgggtgttgagttgttatatttatattattagaaaataatagtataggtttggggtggaggcgggatataagattagttagaagtagaaagaaaggtgaaaagttgttggtgtaaggaagtttttggtatttttaacggtttgggtataggttgtgagggtgtttgggacggtttgtggggtataggttgtaagaggtgtttaggacggtttgtggggtataggttgtgagaggtgttttggacggtttgtggggtataggttgtgagagatgtttaggacggtttgtggggtataggttgtgagggtgttcgggatggtttgtggggtataggttgtgagaggtgttcgggacggtttgtggggtataggtttgagaggtgttcgggacggtttgtggggtataggtttgagaggtgttcgggacggtttgtgggatataggttgtgagaggtgtttgggacggtttgtggggtataggttgtgagaggtgttcgggatggtttgtggggtataggttgtgagaggtgttcgggacggtttgtggggtataggttgtgagacgtgttcgggacggtttgtggggtataggttgtgagggtgttcgggatggtttgtggggtataggttgtaagaggtgttcgggacggtttgtggggtataggttgtgagggtgtttgggacggtttgtggggtataggttgtgagggtgttcgggacggtttgtggggtataggttgtgagggtgttcgggatggtttgtggggtataggttgtaagaggtgttcgggacggtttgtggggtataggttgtgagggtgtttgggatggtttgtggggtataggttgtgagaggtgttcgggatggtttgtggggtataggttgtgagggtgtttgggacggtttgtggggtataggttgtgagggtgtttgggatggtttgtggagtataggttgtgagaggtgtttgggacggtttgtggggtataggttgtgagaggtgttcgggacggtttgtggggtataggttgtgagggtgttcgggatagttcgtggggtataggttgtgagaggtgttcgggacggtttgtggggtataggttgtgagggtgtttgggacggtttgtggggtataggttgtgagaggtgttcgggacggtttgtggggtataggttgtgaggatgttcgggatggtttgtggggtataggttgtgagaggtgtttgggacggtttgtggggtataggttgtgagggtgttcgggacggtttgtggggtataggttgtgagaggtgtttgggacggtttgtggggtataagttgtgaggatgttcgggatggtttgtggggtataggttgtgaggggtgttcgggacggtttgtggggtataggttgtgagggtgtttaggatggtttgtggggtataggttgtaagaggtgtttaggacggtttgtggggtataggttgtgagggtgttcgggacggtttgtggggtataggttgtgagggtgtttaggacggtttgtggggtataggttgtaagaggtgtttaggacggtttgtggggtataggttgtgagaggtgttcgggacggtttgtggggtataggttgtgagggagttcggtacggtttgtagttatagggagaaaagatttggtgttgtgggtttgttttggggttggtggtatagtttttatttgttgtttttaggatttttcggtttttttcgtttaggtttttgtaattttatgttttagtttttgaggattaaaggcgtttttgtttgggaagagggggtttaggggagtcgtttgattcggttttaagttaggttgatttatcgttgttaatattttagtgtacgtatttttttgttttatgtatttaattttaaggtttggtatattgtaggttttaaggttttgtgcgtttttttaatattttttttatttgttttatttgttttttttattttgattttggttggagattttttttagggagtttttaaaataaagggtgttagttttttgtgggatttttttatttttgtagtttgcggtttgaaagttgttttatggtgtgtagtgttaaatttttaatttattttaggttagcggtgatagttcgagggtaggaagggtatttatattgagttttaaatagttaattttgtaattgtaagtttatataattgttttgaaaagtaatttgttttaaaaagttaaaaaacgaatatttttgagtttttttttagtaattttttttttagaggtttattattaggaaaagatttaaagtattgatattttttatggagttgtttataatagaaaaaaattagagtttgtttataaaggggagttttgtaggttgaagatgttgtatttgttagcggggatgggggtacgtttgttgacgtagtaacggaaaagtattagtgtgtgaagatgtattttttttttttttattattattatttttatttttattttttttgaggtagaatttcgttttgttatttaggttggagtgtagtgatgcgattttattataattacgagttattatgtgcggttttatgagtaagttattacgtttagttttttttttttttgttttaaaaaattttttatttaaaaaagatgtgtatgggtcgggtacggtggtttacgtttataattttagtttttttagaggtcgaggtaggtagattatttgaggttaagagttcgatattagtttggttaatatggtgaaattttatttgtattaaaaatataaaaattagttaggtcgtggtggtgcgtgtttgtaattttagttatttaggagattgaagtaggagaattatttgaatttaggaggtagaggttgtagtgggttaaaattatgttattatattttagtttgggagatagagtaagattttattttagaaataaattaataaataaaatttttatatttatttataattcgtataaatttaaaatatatgtataaaattatattttttgtaagtatacgtattaattaaaaggaatatatttagtatatagaaatggttgtttaacggaagaggggggagttaataaatagagaggataaaaagaaataaattagtagagttggaggagggttttttttaggttgcgatgagaatatagtgagtagaattgtaggtttgtatgattttattttttgtgaggagttcggttttttaagacgtttttttgtttaggtgttcggtttagagtgttttttataaggttattggaggagaattttagatcgagttttatttaggtgagggggttgtatatcggaggtgggagaggtttgtttttttttattttgtgatattgggttttattttttttttagggggtttcggtttttttatttgtaaattggagtttataaggtgggttagagaagttttagtgaagtgaggaatggatcgtttttttgttagggtttatgtgttttaggttattttgttattatagggatagggaggttaaggatagttatttttgaggttagttcgggttgggttgattacgtggatttttatgtttagattggggttttaatttttttgaagttggggttttagttgtgatttaggggtgggtagaaggggagatagaagcgataggttttttagtttttagttttatttgagggtttttttgttattggatttgataagaaatattatttttgtagttttttttttttatttgattaatggttatagtttggttgggtttagttttttgtatataaggggattttgggggttgagtattattaaggttagttttgagtaggtttaattttagtgtagttgtttattttgtcgttatgtttttgattaagattgagaggattattattgtgtttatgtgggttaagatttttacgtaggtcgatattatcggtatcgagattttggagaggtgagtgttagacgggattgttagagggattgggtgggaggttaggtatgtgagtggggatagtggggagggggcggtggggaggggatagtggggaggggattatggagaggagatagtggggaggggatagtggggagaggatagtgaggaggggattatggggaggatatagtggggagggtattgtggggaggggatagtgaggaggggattttggggaggggagagtgaggagggaatcgtggagaggggatagtgaggaagggatagtgaggatagatagcgtttttttttagtgaggagggtagggtaaggagggaacgattaggagttgtataattatttgggttcgttgagatttgggtaggtataggtttaggttttgataagtagagggtgaaaggtttcgttttaggtttgaagggttttatagggtagttagggtattatagtttttaaagttttagtatttgggattagggtattgttttagttttaaatttttagtatttgattttttgggaggggttagggagtttttttttttttggaacgttgttgggaggttatgagtttgtagaaggggtggcgggtaatttagtttggggttgggagggaggttttgtggttagaggagacggtggaggggttgggggtattaggcgtgttggaggcggagggcgggagatttggggattaggttgtatagaattcgtcggaagtagggcgattagtcgggagttgtagaggtttggggggtttttagtttagggtagtttgggaggggtagttgtttgggtattcgggtttcgcgaggaggggttggggtttgttgcggggtcgtagatgtgtttcggtgttcggagagggtcgtagggcgcgtgggtcgtgggcgggaggtcgcgttgttgggagtttacggcgtttcgtcgcgttttagg

SEQ ID NO: 852 - DNA, 5994 bp, Artificial Sequence
  chemically treated genomic DNA (Homo sapiens)
tttgggacgcggcggggcgtcgtgagtttttagtagcgcggtttttcgtttacggtttacgcgttttgcggtttttttcgagtatcgggatatatttgcgatttcgtagtaggttttagttttttttcgcggggttcgggtgtttaggtagttgttttttttaggttgttttgggttagaggttttttaggtttttgtagttttcggttgatcgttttgttttcgacgggttttgtgtagtttggtttttaaatttttcgtttttcgtttttagtacgtttggtgtttttagtttttttatcgttttttttggttataggattttttttttagttttagattgggttgttcgttattttttttgtaggtttatgattttttagtagcgttttagggaaggaaaagttttttggttttttttaggggattagatgttgggaatttgaagttgggatagtgttttgattttagatgttgggattttagaggttgtagtgttttggttgttttgtaaggttttttaggtttagaacgaaattttttattttttgtttgttagaatttgggtttgtgtttgtttaggttttagcgagtttagatggttgtgtaatttttaatcgttttttttttattttgttttttttattgagagggaacgttatttgtttttattgttttttttttattgttttttttttacggttttttttttatttttttttttttaaggttttttttttattgttttttttttatagtgttttttttattgtgttttttttatggttttttttttattgttttttttttattgttttttttttattgttttttttttatggttttttttttattgttttttttttatcgttttttttttattgtttttatttatatatttggttttttatttagtttttttggtagtttcgtttgatatttatttttttagagtttcggtgtcgatggtgtcggtttgcgtggagattttggtttatatggatataatgatggtttttttagttttggttagagatatggcggtagggtgggtagttgtattggagttgggtttgtttaggattggttttggtagtgtttagtttttagggtttttttatatatagggagttgggtttagttaggttgtggttattggttaggtgaggggagggggttgtaggggtggtgttttttattagatttagtgataaaggggtttttaggtgggattgggggttgaggaatttatcgtttttgtttttttttttgtttatttttgagttatagttggagttttagttttagggagattggggttttaatttgggtatgagagtttacgtggttagtttagttcggattggttttaggagtgattgtttttgatttttttgtttttgtgatgatagggtgatttagagtatatgggttttggtagagggacgatttattttttattttattgaaatttttttggtttattttatgagttttagtttgtaaatgaggaaatcgagattttttagagagaaagtgggatttagtgttatagggtgggaagggatagattttttttattttcggtgtgtagtttttttatttgaatgaggttcggtttggggtttttttttagtagttttgtaggggatattttgagtcgggtatttaggtaggaaagcgttttgggaggtcggattttttatagaaggtgaggttatgtaggtttgtaattttgtttattatgtttttatcgtagtttggaggagatttttttttagttttattgatttatttttttttattttttttgtttattaatttttttttttttcgttagataattatttttatgtgttgaatatattttttttagttagtacgtgtgtttgtaaagggtatgattttatgtatgtattttaaatttatacgaattataggtagatataaaaattttgtttgttagtttgtttttgagatggagttttgttttgttttttagattggagtgtggtggtatgattttgatttattgtaatttttgttttttgggtttaagtgatttttttgttttagttttttgagtagttgggattataggtacgtattattacggtttggttaatttttgtatttttagtatagatggaattttattatgttggttaggttggtgtcgaatttttgattttaggtgatttgtttgtttcggtttttgaaagagttgggattatgagcgtgaattatcgtgttcggtttatgtatattttttttaaatagaggattttttaaaataagggaaaaaaaggttgggcgtggtggtttgtttatggggtcgtatatggtggttcgtggttgtgatgaggtcgtattattgtattttagtttgggtgatagagcgaggttttgttttagaaaaaataaaaataaaaataataataatagaaagagagaaaatgtatttttatatattgatgttttttcgttgttgcgttagtaagcgtgtttttattttcgttgataggtgtaatatttttagtttgtagagtttttttttgtgaataagttttagtttttttttattataaataattttatgaagaatattagtgttttggatttttttttggtgatagatttttagaaggggaattattagaaggagatttaagagtattcgttttttagttttttgaaataaattattttttaagataattatatggatttatagttgtaaaattagttgtttgaggtttagtgtgggtgttttttttgttttcgggttgttatcgttggtttggagtaagttggaagtttagtattatatattatggggtagtttttagatcgtaggttgtagaggtgagggaattttataggagattgatattttttgttttgaaaattttttggagggggtttttagttagagttagggtagggggggtaggtgaggtaggtgaggagggtattgaaaggacgtataggattttggggtttgtagtgtattaggttttggggttgggtgtatgaggtagagggatgcgtgtattaggatgttagtaacggtaaattagtttggtttggaatcgggttaggcgatttttttgagttttttttttttaagtaggggcgtttttggtttttagaggttggggtatggggttgtaggggtttggacgagaggggtcgggagattttgagggtagtagataagggttgtattattagttttaaggtaggtttatagtattaagttttttttttttgtagttgtaagtcgtgtcgggtttttttatagtttgtgttttataagtcgtttcgggtattttttataatttgtgttttataagtcgttttgggtattttttgtagtttgtgttttataagtcgttttgggtatttttatagtttgtgttttataagtcgtttcgggtatttttataatttgtgttttataagtcgttttgggtattttttgtagtttgtgttttataagttattttgggtatttttatagtttgtgttttataagtcgtttcgggtattttttataatttgtgttttataagttatttcgggtatttttatagtttgtgttttataagtcgttttaggtattttttatagtttgtgttttataagtcgtttcgggtatttttatagtttgtgttttataagtcgttttaggtattttttataatttgtgttttataagttatttcgggtatttttataatttgtgttttataagtcgtttcgggtattttttataatttgtgttttataagtcgttttaggtatttttatagtttgtgttttataagtcgtttcgggtattttttataatttgtgttttacgagttgtttcgggtatttttatagtttgtgttttataagtcgtttcgggtattttttataatttgtgttttataagtcgttttaggtattttttataatttgtgttttataagttattttaggtatttttatagtttgtgttttataagtcgttttaggtatttttatagtttgtgttttataagttatttcgggtattttttataatttgtgttttataagttattttaggtatttttatagtttgtgttttataagtcgtttcgggtattttttgtagtttgtgttttataagttatttcgggtatttttatagtttgtgttttataagtcgtttcgggtatttttatagtttgtgttttataagtcgttttaggtatttttatagtttgtgttttataagtcgtttcgggtattttttgtagtttgtgttttataagttatttcgggtatttttatagtttgtgttttataagtcgtttcgggtacgttttataatttgtgttttataagtcgtttcgggtattttttataatttgtgttttataagttatttcgggtattttttataatttgtgttttataagtcgttttaggtattttttataatttgtgttttataagtcgtttcgggtattttttaaatttgtgttttataagtcgtttcgggtattttttaaatttgtgttttataagtcgtttcgggtattttttataatttgtgttttataggttatttcgggtatttttatagtttgtgttttataagtcgttttgggtattttttatagtttgtgttttataagtcgtttagggtattttttataatttgtgttttataagtcgttttgggtattttttgtagtttgtgttttataagtcgttttaggtatttttatagtttgtgtttaagtcgttggaaatattaagagtttttttgtattaatagttttttatttttttttttgtttttggttagttttgtgtttcgtttttattttaagtttgtgttgttattttttaataatgtgggtgtggtagtttagtatttattttgtttataatatgatattagtttttatttgtgttttggtgtttttattgatgggtgtgtttatatagatttttttttcggatttaggttttagggtttgatttagggatgtatttgatgtttttatttgtgtgtttttagtaaattattttaataatggaatcgtgaagttttttataaagtttattttattgtttttttttggtatttttgattattgttttttttttttgaggtttaggtcggagagtatagtattttcgatattttttatttatttttgaaatttatatatggaggaaaagatagataaggttttttgttttttttttttttatttttagtttttggttatttttttgaagttttttttttagtattgttatttttttaaatgttattacgttaatagatttatagtggttaatttatttaaaatttgaattttttttttttttgtttaagtttttatttgttttgtttttttttatttataggaaaaaaaaatgtttttgtttatagtttattagaatgtaagtttaagaggagttttaggaatttttttttttttttttttgatggagtttcgttttgttttttaggttggagtgtaatggtacgatttcggtttattgtaattttattttttgggtttaagcgatttttttgttttagtttttcgagtagttgggattataggttattatgttaggagtttgagattagtttggttaatatggtaaaatttcgtttttattaaaaatataaaaattagtcgggcgtggtggttcgcgtttgtaattttagttattcgggaggttgaggtaggagaattttttgaatttaggaggtagaggttgtagtgaattaagattgtgttattgttttttagaatgggcgatagaataagatttcgttttaaaaaagaaaaataaataaatttaggcgtatggacgtagatgtgattttttatttcgtagtgatggaatcgtatttggcgaaaagcgttttttttttatagtcgttttgtaatcgtattaagagtaggagagagtttttagtttttttttgtggat

SEQ ID NO: 853 - DNA, 10197 bp, Artificial Sequence
  chemically treated genomic DNA (Homo sapiens)
gcgtttttagaatgttttttttttaatgagaatagtagttttacgtggttgggaagtttaaagtggttttgatatagaaaagaggaagtaagtggattttatttttgatttgggattttatttttgattttgtgaattttttggtttttttttgaggacgttggtttgaaagtggttttgtgggttttttttgttttttgattttttcgagtttgttggttattgttttggttgagattgttttagtttttagaaaggagatttgtttatttttaagaagtattaaggttaggttaggtgtggtggtttacgtttgtaattttagtattttgggaggttaagataggtagattaggaggttaggagatcgagattagtttggttaatacggtaaaattttatttttattaaaaatataaaaaattagttaggcgtggtggtatatatttgtagttttaggtattcgggaggttgaagtaggagaatcgtttgaaattaggaggtcgaggttgtagtgagttaagattgcgttattgtattgtagtttgggcgatagagcgagattttattttaaaaaaaaaaaaaaaaattaaggttaggggggaagtgggaagattgaaatagataaaggattttaaagagatataatagttaaatgcgatatatgaaattttgattagataaaaattaaaaatttataaaatatatgtttgaagttatagagtaatttgatttggattagatatgtgatatatgtgaggtttgtgatttttttaggagtgatggtagtatagtatagggtagagattcgtttatggaagaaatattggtgttagtgtttagggtagaagtgagtgatgtttttaagtggatatggaaaaatattaattattttatttaggttgtgggtgtatggatatttagtatttaattattttaatttttttgtgtatgtatatatattttttttagagatagggttttattttgtcgattatattggagtagggggtataattatagtttattgtatatatttaagtgatttttttgttttagttttttgagtagatgggattataggtgtgtagtattatggtttagtttttttttttttggtagagatgggttttgttagtcgggcgtagtggtttatgtttgtaattttagtattttgggaggttgaggcgggtagattatttgaggttaggagtttaagattagtttgggtaatatggtaaaattttgtttttattaaaaatataaaaattagttaggtatgatggtaggcgtttgtaattttagttatttgggaggttgaggtaggagaatcgtttgaatttaggaggtagaggttgtagtaagttaagattgagttattgtattttagtttgggtaatagagtaaaaatttcgttttaaaaaaaaaaaaaaaaaaaaaaaggagagagagagatcggttttgttatgttgtttaagttggatacggatatatatatatatatatatatatatatatatatatatatatatatataagttggatatagagatatatatagtgatagggtaaaggttttaaaattttaaatttggtaaatttgggtacgggtatataggagttgttttattatattatttttttaatttttttgaaagtttgaagttattttaaaagaaaaagttttttaaattttagtgatttttttgttttagttttttaaagtgttgggatgataggtatgagttatcgtgtttgatttttttgtatatttttagaattttatgttaaaagatggaaaagtttggatgaggtagtttacgtttgtttttttagttttttgggaggttaaggtgggaagattgtttgaagttagacgtttaagattaatttggttaatatagtgagatttcgtttttttttaattaaaaaaatttttttttaagttggaaaaaatatttagttataagataaattttgaaattgtaaaagaataatggagtatgtgtgataggaggtattgttttatagtggggttaaagttatatataagttgtggtggtttacgtttgtaattttagtattttgggaggtcgatgcgggcggattatgaggttaggagtttaagattagtttggttagtatggtgaaattcgtttttattaaaaatataaaatattagttagacgtggtggtgggtatttgtagttttagttattagggaggttgaggtaggagaatggcgtgaatttaggaggcggagtttgtagtgagttgagattgcgttattgtattttagtttgggcgatagagcgagattttgttttaaaaaaaaaaaagttatatataagttgttattattaaatgggaaaatgattgaaaaatgttaatgttaagagggattgaaattaaatttttttaatagtgggttatatgattagaaatttaaatagataggaaatatgttggttttatttatttatttatttatttatttatttagatagagttttattttgttatttaggttggagtatagtggtatgaattcggtttattgtaatttttattttttaggtttaagcgattgttttgttttagtttttcgagtagttgggattatagatgtgtgttattatatttagttaatttttgtatttttagtagggacggggttttattatgttggttaggttggttttgaatttttgattttaagtgatttattcgttttggttttttaaagtgttgggattataggtgtgagttattatatttggtcggtattggttttaaaaataataaaagtaatatatatatatagaaaaaggttaaataaagaagtatatagaatgaaaaatgaatgttgtgtttttttttagattatttttgtgaataaatatgtaatattatgaaatgatgaggattaatattttttgaatgttaggtattattttatgtgttttttatatatttattaattttatttaatttttttatttaattaatgagataaattaatgtattttatttaatttttataataattttatgtagtaggtgtaattgttatttttattttagagagtagaatattgagagttggaggttaagcggtaattttagttagggtggttggtgacgtttcggtgaaattaagagcgaatagtgagagtagcggttatttgttggtttgtagggatggtgttttgggtagaaagaatagtaagtgttagggttgtgttggggtcgggttttgtatgtgtgagaataagatagagaatgagggaggtgggtttacgaggagtgtgggtatagatagtagtttttgtttgtggtgttacgttgaagatttagtattgtatgtgatagatgaaggttttaagaagatagttttgataaaagttagagtgtaaaattagatttagatataattatcggtttgtgttttgaatataatggatttttatattttggaattttttaaacggagtaatgtatagatatttttatgggttttttgtatattcgtagatttttttaggagttatattttttttttagatagattttgggtgtcgatatttttaaatatgtttttgaggagtagtttttgtgataagttgattttttagataatttagaatatttttaaaattttttagattataaaatttaaaatataaattaaaaaataaattattataagttcgggtatagtgatttatgtttgtaattttagtattttgtaaggttgaagtaggaggattatttgagtttaagagtttaagattagtttaggtaatatagtgagattttgtttttataaaaaagttaaaagttagttagatatggtggtgtgtatttgtatttttagttatttgtagggttgaggtgaggaggattgttttagttcgggaggttgaggttgtagtgagttaagattacgttattgtattttagtttgggtaatagagtgagattttgttttaaaaaatatatagggttaggcgtggtggtttacgtatgtaattttagtattttgggaggtcgagacgggaggattattttattttaggagtttaatattagtttggttaatatagtgaaatttcgtttttattaaaaatataaaaaattagttggatatggtggtgtgcgtttgtaattttagttatttaggaggttgaggtaggagaatcgtttgaatttgggagatagaggttgtagtgagttgagatcgtattattgtattttagtatgggtagtagcgcgaaattttgttttaaaataaataaataaataaataaatatttataaatataaaatgtattatagttttagagatttttacgaatgtttaagtggttttgaatttgggaggtattgtttagtaatagttttatttgttttataatagataggagtgttgggttgtatttattggtaataaatatagtaatttttgattgaagaaaggtttatgttataatttttttattttgtaagttattaattttgtttttttttttttattttttattgaggaacgagtttttggaaggatagggatattcgtttagtagttgagttagttatattagttttggagagtaggtggagggtagatgttgtgattattttagaagagaggatatagttggaggtagatgtatggtttttatttttagttatttttaatgtagtttggtttttagaggtttgaagagcgttttgtttatgtggtgattttaagaggggttgtttttgtattaaggttatgtgtgtatgttaatatagtaatcgttatatatttaaaatgttagttttaagaattggagatgaggagttgtaagttattttatagttattaaaggtatagttgagggggtttgtgttgattaagttggttgtttggtgtttggattgggatttatttattttggaaaatatgtagtaatagtttagtattaaagtttatattaaaattttattgatgattttggttgtttttatttttgaagcgttattttttagaaatatagaggtaagttgggtttttaatgtttttgttgattataaattatttttggtgtttacggataggtaattggtttatttttttagtaaattaagaatttagaagttttttatattgttttagaagtgggaaatggttttattttttaatgtgtttattataaaattgtgttagttttattgttgggagagttgataaatttagaataggagttgtggaatagatgaaaatattgtatttatattaaattaatcgaattggataattgttttgtgattatgtatgagaatatttttgtttttgggtattttttttgaagtattagtattaaaggttagaggggtcgggtgtagtggtttacgtttgtaattttaatattttgggaggtcgaggcgggtggattacgaggttaggagtttaagattagtttgattaatatggtgaagttaagtttttattaaaaatataaaaattagttgggcgtggtggtacgcgtttgtaattttagttatttaggaggttgaggtaggagaatcgtttaaattcgggaggtagaggttgtagtgagcggagatcgtgttattgtattttagtttggataatagagttagatttcgttaaaaaaaaaaaaaaaagaagaaaaaagaaaaaatgttagaggaataagatataggagatttatttttaaatggtttagaagaaaaaatgtgtatgtgtatgtttgtgagaatatatacgtacgtatatatatatatagataatgatagggtaaaggttttaaaattttaaatttggtaaatttcggtacgggtatataggagttgttttattatattatttttttaatatttttggaagtttgaatttattttaaaataaaaagttttttaaattttaggtagttattttttttttattttgtttgttttgttgggtttggagattatatattaggagggatgacggtttattaagtgttatgttttgatgcgtgattgaaaaggttaatttagttttggtaattagtaagaaagtataatatgaagtttttaggaaaaaaaaaaagtaaaataaatttttgaatgatttatttttaaaatatattgtttttttttaaatagtaatttggatttaattataatttagtgatagtttttaaacgttttttataatgtttgttatattaaatagtaaaatattaggaagatttatttttagatttttaattttaatttataaaagatattagagatatttttttttttttttggtaagggaatgacgaaaattatttttggttttttattagataatgtgggaatagggtataagaagtttttaaatataatttttgaatatcgggataaaatatgtatgtttttattttgttattttatttggttttagatacgtttttttgaatgtttatttatttaagttggtttttgttttgttttttaattttatttttatttgagaagaaaatattttttttttttgttttttttttttttggtttttttttttaaaatagagatgaggttttgttatgttgttttagttggttttgaatttttgggtttaagcgatttttttgttttggttttttaagatgttaagattataggtgtgagtttttatgtttggtttttttttttttgattttagttaaaaggttaagaagtgataagaggaggatatttgaagtgtagttgggtaaggagttttttattagttgtttattttttttgtttttgatttttaaaagtgtgttgttattgatatatagttttttgatatgtaaaatgttgggaggatgaagttaagttatttaaagtgttatttagaaattgggtttagttttatttgtagttatatatattagaaattatttttagaggtcgagtatggtaatttatatttgtaattttagtattttgggaggttaaggtaggagaattgtttgagtttaggagtttgagatttgtttgggtaatatggtaaaattttatttttattaaaaatataaaaaattaattgggtttggtggtatatatttgtggttttagttattttaaaaggttgaggtgggagggttttttgagtttgagaggaataggcggtagtgaattaatattgtgttattgtattttagtttgggtgatagagtgagatttcgtcgttttaaaataaaaataaaaagaaatcgtttttagaaattgttttttcgtgtgtaaattagtggtattgtagtttgaggtaggtgttgagatggggatttggaaaaggtaataggtattttgagttagaaataatgtgatttttttgttttaaaatgtgtaatttaaaagttttttttagttgtgattaaaataaattttgaatttattattttaatagtattataaggggaagatttaaggaatgggattggtattgggaaaatagttaggaagttgttttgtacggttagggagtttggaagtattttggtattttagagcgaataaggttgagcgtttgatgtggggtttagaggtttaattaatttggttcgaatttagttattgttatttattagtgatagtgacgaaaggtttagttttttgatatataaaatgttgggaggatgaaattaagttatacgaagtgttttatatagcgtgttaggtatttaatagaggttattattaatattaattatattgatagtattttaagtagagtattcgaatagttattttatttttaggtttattgagtttaaatatttgtttaataagagtagttagtaatttttatttggttttaattggtagtagatattttgggttttaaatatttatttaataggaaatggttatagatataaaataagtttaataaaaggtagtttttttttgtttttttttgttttttgttttttgagataaggatttattttattttttaggttggagtgtagtagtggcgtgattacggtttattgtagatttaagtgatttttttattttagttttttaagtagatgggattataggcgtgtgttattatattaggttaattatttttttttttttttttttttttttgagacggagtttcgttttttttgtttaggttggagtgtaatggtgcgattttggtttattataatttttgttttttgaatttaaacgaattttttgttttagttttttaagtatttgggattataggtatgcgttattacgtcggttaatttttttgtattttttgtagagatagggtttttttatgttggttaggttggtttcgaattttcgattttagatgattcgtttatttcggttttttaaagtgttgggattattgatttgagttatcgtatttagtttatttatttaattttttatagagatgaggttttgttatgttgtttatattggttttgagtttttgggtttaagtgatttttttgttttggttttttagtgttgggattataggcgtaagttatagcgtttggtcggtagttttttttggggtgattagaagttgggattatgtattatttgtttgagttagtattataaatatttatggttattgttttggtaaaatatggaattattaaagtttatttaattagagtgtagttaataattaggaagtaagtaagagaaagataaaggatttggtagttaaaatagatttgataggttaagttagatttttttttgaatgagttagaggaataaataaagataggattgttataatgtttttgtgttaaaagtttattttgtttatttaaataaagggagtgttttttaggttttgagtaagagtttgttgatattatttttatatagattttattttttgtttttaattttgtgttagaagtagtaatatagaagatttagttgtttttgatagtagtgggagttattgtttaagagatataaaggagaaaaaagtatatttgtagtaagtgatattatttttggggttgttattatattattttattacgttttgagggggttttagtattagataagttttaaattttttgtaaattaaataattttaggttaggcgtggtggtttatgtttgtaattttagtattttggggggttgaggtgggtggattatttgaggttaggagtttgagattagtttggttaatagagtaaaattttatttttattaaataaaatataaaaattaattaggcgtagtggtgtgtatttgtagttttagttatttgggaggttgaggtaagagaattgtttgagtttaggaggtcgaagttgtagtaagtcgagattacgttattgtattttagtttgggtgatagagtgagattttattttaaaaaataaaaataacgaaagttaattataataataataataaaaaaataacgaattaaataattttaaagattgtataaattttaagtatttttagaatatgtttttagaaagtttggtttatggatattttttaatagtatttttattgtaaaggtggaatggtgtgagttatataggtatggttgagttttattaatgtatattttttttaggtattttttaattattagttttaggtgtttatttaagtttagtttttagtgaggtttttttgattttttgggtatttttatttttattatatagggtagagttatattttttttcgtatttttatgtgttttggtagtattattttgagagttttcgttttattgtacgtttgttttatttgttttttgattggtttatgagtttttggtgggaattttgtttttggtaattaaatattgtttggaggtggtggataaggtgtttggagaaaaataaatttttttttgggatgtttgagtttttaggattttagaaggttagttttgtaaatttttaaagaagggatttttattaaggggtttatagattttttattgaggtttatgagttttatattaaaggttgggtgtttatttatattagatttttttaaagtttatgattttaaaatagttaagaattaatgttgtgagggtttttttttgggttaaagttatagggaatttgttatgtggatgttgtagcggggtgtggattagttaggtcgttttttattgtgttttgtttttttttttagt

SEQ ID NO: 854 - DNA, 10197 bp, Artificial Sequence
  chemically treated genomic DNA (Homo sapiens)
gttgggagggaaaatagaatatagtgaaaggcggtttggttgatttatatttcgttgtagtatttatatggtaggttttttgtggttttgatttaggaagaggtttttatagtattagtttttaattgttttaggattatggattttaagagaatttgatgtagatagatatttaatttttgatgtgggatttataaattttaatgaaggatttgtgggttttttgatgaaaattttttttttaaaggtttgtaaaattaattttttagaattttgggagtttaggtattttagggaggagtttgtttttttttagatattttgtttattatttttagatagtgtttagttattagagataaagtttttattaggggtttatggattagttaggggatagatgggatagacgtgtagtaaagcgaaggtttttaaaataatgttgttagagtatatgggggtacggaaaggggtgtggttttattttgtgtggtaggagtggaagtgtttagagagttagggaaattttattaagagttgggtttgagtgggtatttggggttggtgattggagagtatttagaagggatgtgtattagtgggatttagttatgtttgtgtgatttatattattttatttttgtaatggagatgttgttgaaaaatgtttatgggttaggttttttgaaaatatattttaaagatatttgaaatttgtgtaatttttggggttgtttaattcgttgtttttttgttgttgttgttgtaattggttttcgttgtttttattttttgaaatggagttttattttgttatttaggttggagtgtagtggcgtgatttcggtttattgtaatttcggttttttggatttaagtaatttttttgttttagttttttaagtagttgggattataggtgtatattattacgtttggttaatttttgtattttgtttagtagagatggggttttgttttgttggttaggttggttttaaatttttgattttagatgatttatttattttagttttttaaagtgttgggattataggtataagttattacgtttgatttggggttgtttaatttgtaaaagatttggaatttgtttagtgttgagatttttttagggcgtagtgaggtgatgtggtggtagttttagaggtgatattatttgttgtaggtatattttttttttttttgtattttttagataatagtttttattgttgttaggagtaattaaattttttgtgttattgtttttaatatagggttagaaataagagataaagtttgtgtgagggtgatgttagtaagtttttatttaagatttgaggggtattttttttatttaagtaaataagataagtttttagtatagaggtattatggtaattttgtttttatttgtttttttgatttatttagaggaggatttgatttggtttgttaaatttgttttgattgttaaattttttgttttttttttgtttattttttggttattaattgtattttggttagatgagttttgatgattttatgttttgttaggatagtgattataggtgtttataatgttgatttagataggtaatatatggttttaatttttaattattttagaaagaattgtcggttaggcgttgtggtttacgtttataattttaatattgggagattaaggtaggaagattatttgagtttaggagtttaagattagtgtgggtaatatagtaagattttatttttgtgaaaaattaaataaataggttgggtgcggtggtttaggttagtaattttagtattttgggaggtcgaggtgggcggattatttgaggtcgggagttcgagattagtttggttaatatggagaaattttgtttttataaaaaatataaaaaaattagtcggcgtggtggcgtatgtttgtaattttagatatttaggaggttgaggtaggagattcgtttgaatttaggaggtagaggttgtggtgagttaagatcgtattattgtattttagtttgggtaaaaagagcgaaatttcgttttaaaaaaaaaaaaaagaaaagaaaaataattagtttggtgtgatggtatacgtttgtggttttatttatttgagaggttgaagtaggaggattatttgagtttgtagtgagtcgtgattacgttattattgtattttaatttgggggatagagtgagtttttattttaaaaaatagaaaataaaaaaaaataaaaaaaaattgttttttgttaagtttattttgtgtttgtgattattttttattagatagatatttgaggtttagaatatttgttgttagttgaggttaggtaagagttattggttgtttttgttaagtaaatatttgaatttagtaggtttgaagatggggtaattgttcggatattttgtttgaaatgttgttagtgtggttaatgttgataatggtttttgttggatgtttgatacgttgtataaggtatttcgtgtaatttagttttatttttttaatattttatatattaggagattgagtttttcgttattgttattaataagtggtagtggttagattcgaattaagttggttaagtttttaagttttatattaagcgtttagttttgttcgttttggagtattaggatgtttttagattttttggtcgtgtagagtagttttttagttgtttttttagtgttagttttattttttgggttttttttttataatattgttgaaatagtaagtttaaagtttgttttagttataattaagaaagatttttgaattgtatattttggagtaggaaagttatattgtttttgatttaaaatgtttgttgttttttttaggtttttattttagtatttgttttaggttgtagtgttattagtttatatacgggaaaatagtttttagaaacgatttttttttatttttattttgagacggcggggttttattttgttatttaggttggagtgtagtggtataatattggtttattgtcgtttgttttttttaggtttaagagatttttttattttagttttttgaagtagttgggattataggtgtgtgttattaaatttagttaattttttgtgtttttggtaaagatggggttttattatgttgtttagataggttttaaatttttgagtttaggtaatttttttgttttggttttttaaagtgttggaattataggtatgagttattatgttcggtttttagaaatgatttttaatgtatgtagttgtaaatagaattgggtttagtttttgaatggtattttgagtaatttagttttatttttttagtattttatatattaggagattgtgtattaatagtaatatatttttaaaagttaggaataaagaaagtaagtagttggtagaaggttttttgtttaattatattttaaatgttttttttttattattttttggttttttggttaagattaagaagaagaagattaggtataggggtttatatttgtaattttagtattttgggaggttaaggtaggaggatcgtttgagtttaggagtttaagattagttggagtaatatagtaagattttatttttattttaaaaaagaaagttaaaagaagaaggaataaagggggaaaatgttttttttttagataaaaataaggttaaagaataaaataaaaattaatttgaataaataagtatttaggaaaacgtatttgaggttagatagagtggtagagtaaagatatgtatgttttatttcggtatttagaagttatatttggaaattttttatattttgtttttatattatttgataaaaagttaaaaatagttttcgttatttttttattagaggaaggagaaaatatttttgatattttttatggattgaaattaaagatttgaaggtaaatttttttgatgttttgttatttagtataataaatattgtagaagacgtttaaaaattattattaggttgtgattaagtttagattattgtttgaagagaaataatatattttaaagataaattatttaaaagtttgttttgtttttttttttttttgggaattttatattgtgtttttttgttaattgttagagttgggttggtttttttagttacgtattagagtataatatttgataaatcgttattttttttggtgtatggtttttaggtttaatagagtaggtagaatgggagagaagtaattgtttaaagtttggaaaattttttattttgaagtgagtttaaatttttaaaaatgttgaaagaatagtgtagtagaataatttttgtatattcgtatcgagatttattaggtttaaaattttggaatttttgttttgttattatttgtgtgtgtgtgtacgtacgtgtgtgtttttataggtatgtatatatatatttttttttttagattatttgagagtaggttttttatattttgtttttttaatatttttttttttttttttttttttttttttttttgacggagtttaattttgttgtttaggttggagtgtagtggtacgattttcgtttattgtaatttttgtttttcgggtttaagcgatttttttgttttagttttttgagtagttgggattataggcgcgtgttattacgtttagttaatttttgtatttttagtagagatttggttttattatgttggttaggttggttttgaatttttgatttcgtgatttattcgtttcggttttttaaagtgttgggattataggcgtgagttattgtattcggtttttttaatttttaatattaatattttagggaaaatatttaagagtaaggatatttttatatataattataggatagttatttaattcgattaatttaatataagtataatatttttatttattttatagtttttattttaagtttgttaatttttttaataatggaattgatataattttataataggtatattgaaaaatgaaattattttttatttttaaaatagtgtagaaagtttttgaatttttagtttgttagaaaaatgaattagttgtttattcgtaaatattaaaaataatttataattagtagaaatattagaaatttaatttatttttgtgtttttgagaagtggcgttttagagatgaaagtagttaaggttattagtgggattttgatgtgaattttggtgttgggttgttgttgtatattttttaaagtaaataagttttaatttaaatattaggtaattagtttggttagtataaatttttttagttgtgtttttgataattgtagagtggtttgtagttttttatttttagtttttagagttgatattttgagtatatgacggttattgtgttagtatgtatatatagttttggtgtaggagtagttttttttgaggttattatataaataaggcgttttttaggtttttggggattaggttgtattgagggtagttgaaagtagagattatgtatttgtttttaattgtgtttttttttttgggatgattatagtatttgttttttatttgttttttaggattgatgtggttggtttagttattaggcgggtgtttttgtttttttaagagttcgttttttagtgaaaggtggaggagagaggataaaattagtggtttatagaataaggggattgtggtatggatttttttttagttaagggttgttgtgtttgttgttagtaggtgtagtttagtatttttgtttgttgtgggatagataggattattattgagtagtgttttttaaatttagggttatttaggtattcgtggggatttttgaggttgtgatatattttgtgtttatgggtgtttgtttgtttgtttgtttgttttgagatagagtttcgcgttgttgtttatgttggagtgtagtggtgcgattttagtttattgtaatttttgttttttaagtttaagcgatttttttgttttagttttttgagtggttgagattataggcgtatattattatgtttaattaattttttgtatttttagtagagacggggttttattatgttggttaggttggtgttgaatttttggagtgaagtgattttttcgtttcggttttttaaagtgttgggattatatgcgtgagttattacgtttggttttatgtgttttttgagatagggttttattttgttatttaggttggagtgtagtggcgtgattttggtttattgtagttttaatttttcgagttgaagtaattttttttattttagttttgtaagtagttgggaatataggtgtatattattatgtttagttaatttttgatttttttgtagagatagggttttattatgttgtttaggttggttttgaatttttgggtttaagtgatttttttgttttagttttgtaaagtgttgggattataggtatgagttattgtgttcgaatttatgataatttgttttttaatttgtgttttaaattttatgatttaaaaagttttaagaatattttggattgtttggaagattagtttattatagagattgttttttaagagtatgtttgggagtgtcggtatttagagtttatttgaagagagaatgtgatttttaggagaatttgcgggtgtgtaaggggtttatgggggtgtttgtgtattgtttcgtttgagaaattttagagtgtaaaggtttattgtgtttaggatatagatcggtggttgtgtttgagtttgattttgtattttagtttttgttagagttgtttttttagagtttttatttgttatatataatattgagtttttagcgtggtattataggtagaggttgttgtttgtgtttatatttttcgtgggtttattttttttattttttgttttgtttttatatatgtaaagttcggttttagtatagttttggtatttgttattttttttgtttaggatattatttttgtagattagtaggtggtcgttgtttttattgttcgtttttggttttatcgaggcgttattagttattttggttgaaattgtcgtttggtttttagtttttagtattttgttttttgaaatgagggtgatagttatatttattgtatgaggttgttgtgaaaattaaatgagatatattaatttattttattaattaaatgagaaaattaaatgaggttaatgaatgtgtggaaagtatatggagtggtgtttggtatttagaaaatgttagtttttattattttatggtattatatatttatttatagaaatggtttgggaggggatatagtatttattttttattttatgtatttttttgtttgatttttttttatgtgtatgtattatttttgttatttttaaagttagtatcggttaggtgtggtggtttatatttgtaattttagtattttgagaggttaaggcgggtggattatttgaggttaggagtttaagattagtttgattaatatggtaaaatttcgtttttattaaaaatataaaaattagttgggtgtggtggtatatatttgtagttttagttattcgggaggttgaggtaggataatcgtttgaatttgggaggtgaaggttgtagtgagtcgagtttatgttattgtattttagtttgggtgatagagtgagattttgtttaaataaataaataaataaataaataaataaagttaatatattttttgtttatttggatttttgattatgtaatttattattggaaaaatttgattttagttttttttgatattgatattttttagttatttttttatttagtggtaatagtttgtgtatggtttttttttttttgagatagagtttcgttttgtcgtttaggttggagtgtagtggcgtaattttagtttattgtaagtttcgttttttgggtttacgttatttttttgttttagtttttttagtagttgggattataggtgtttattattacgtttggttaatgttttgtatttttagtagagacgggttttattatgttggttaggttggttttgaatttttaattttatgattcgttcgtatcggttttttaaagtgttgggattataggcgtgagttattatagtttgtgtatggttttaattttattgtagagtagtattttttgttatatatattttattgtttttttgtagttttaaggtttgttttatggttagatattttttttaatttggaaaaaaatttttttagttagaaaaaagcggggttttattatgttggttaagttggttttgaacgtttggttttaagtagtttttttattttggttttttaaagagttgggaagataggcgtgaattgttttatttagatttttttattttttaatatgaaattttaaaaatatatagaggggttaggtacggtggtttatgtttattattttagtattttgggaggttgaggtaggaggattattaaagtttggaaaatttttttttttgaaataattttaaatttttaaaaaagttgaaagaatagtgtagtagaataatttttgtatattcgtatttagatttattaggtttaaaattttggaatttttgttttgttattgtgtgtgtttttgtgtttagtttgtgtgtgtgtgtgtgtgtgtgtgtgtgtgtgtgtgtgtgtgtgtgtgttcgtgtttagtttgggtaatatagtaaaatcgattttttttttttttttttttttttttttttttttttgagacggagtttttgttttgttgtttaggttggagtgtagtggtttaattttagtttgttgtaatttttgttttttgggtttaagcgatttttttgttttagttttttaagtagttgggattataggcgtttgttattatgtttggttaatttttgtgtttttagtagagatagggttttattatgttgtttaggttggttttgaatttttgattttagatgatttgttcgttttagttttttaaagtgttaggattataggtatgagttattgcgttcggttagtaaaatttatttttattaaaaaaaaaaaaattgggttatgatgttgtatatttgtagttttatttgtttaggaggttgaggtagaaggattatttgagtatgtatagtgagttatgattgtattttttattttagtgtggtcgatagagtgagattttgtttttaaaaaaaatatgtatatatatatagagaaattggaataattgaatattaaatatttatatatttataatttaggtagaatagttaatatttttttatatttatttaaagatattatttatttttgttttgggtattagtattagtgttttttttatggacgggtttttgttttgtgttgtgttattattatttttgggaagattataagttttatatatattatatgtttagtttaagttagattattttatgattttaaatatgtattttatgggtttttaatttttatttggttagggttttatgtgtcgtatttgattgttatatttttttagaattttttatttattttagtttttttattttttttttgattttgatttttttttttttttttgaaatggagtttcgttttgtcgtttaggttgtagtgtagtggcgtaattttggtttattgtaatttcggttttttggttttaagcgatttttttgttttagtttttcgagtatttgggattataggtgtgtgttattacgtttggttaattttttgtatttttagtagagatggggttttatcgtgttagttaggttgatttcgattttttgattttttgatttgtttgttttggttttttaaagtgttgggattataggcgtgagttattatatttggtttgattttgatattttttaggagtgagtagattttttttttggagattagagtagttttagttaagatagtggttagtaggttcggagaagttagagagtagggagaatttatagagttatttttaagttaacgtttttaagagggagttaagaagtttatagggttaggagtaggattttaaattaaagatagagtttatttatttttttttttttgtgttaaaattattttgaattttttagttacgtggagttattgtttttattgagagggaagtattttagaagcgt

SEQ ID NO: 855 - DNA, 5443 bp, Artificial Sequence
  chemically treated genomic DNA (Homo sapiens)
ttgatgtattacggttttcgtgggggtcgtttgttgttgtttttgtttagtagttttgtttagtttttagggtagaaagtttgttgttgtttacgatagttttgtggtatttttttttttggtggttatttggttcgttttgtgtttttagtataagggttagtttttaagttgtttattgattgttcgttggtttataggattttggttttgtttagaaggtagggttagggtgagttcggttttaggtaagagttggaagagtttgggtgagggaaaagttttttgtaggcggttgggggagggttttgggatgttttagttttgagtggtaggtacggtttttagtattaattttttgtttcgcggtcgtttttttttgggggttttagcgattttttggtttcggtggtggttttgtagataaattttcgttgagtgggttttgtgttttgagcggtgagaggttgttgttttttggttgagttttagtgtttcgatgttttgggggtgggaagttggagttgtttggagggagaaagttggtttagggagttgggaaggttggagttgggtttttgggtgtcgtttttttttttattttttaaggtagaaagtgttggtttttttatatttcggagattatcgttatttattacgttgattttgaaaggttggtgggttgtttgtgatcgtttttcgttttaggttttttagtatttgttgtttttagggagtagggttttttttagtagttttcgggcgggggcgtttggtggttggtggtgtttcgcgttagtttaggtagttgtagtagtaggaattagtttagtaagttaaggtttttttagtggtggggttgtttatagaggtatcgttattatgagtagtattttttttattttgtggatcgattttttttttataaggtttggagtaggttttttggtagggaaatgtaattttagaaagtagggtaggggtttaattatagtcggttttagagtttattattattgttgttttggttttttggggtttttgtatatttattagtttattaaaatgaattgattattttggtatgaatttattattagtttgtaaagataggttgtgtattagaggggtagtttgttttttaaagggttgtttaaaatgaagttttgggattttttagggtagtagtttggaaattgttatcggtaattttttagacgagagagtagttggtagatttgaagtttttttttttatcggggtttttgttttttttcgttagttcggtttcgttatttttgttttgtttttttttgttgtgtttgggatgagattagggtatatttttacgtttgtgttttttgtagttttgcgggattagtttttaaaaagttttgtatttttggagagagttgatttggaaggggttttcgttgttaggataagaaagttttagggggtgtgtgttttgagagtttttagggtagttattgtgtttgtttttagggaattttagttttatgtggtaagttaaaggatttagagtgttgttaggtgtggggggtgggggagcgagagttttggttacggtggttttgtaatgtttataggtttttggagttggagggagttttggaaaatatttagtggaattatttttttgtttttgtagatgaggaaattggggtttaagaggggaagtgataggtttagggtcgtttttttagttggtggcggagttgggcgggagtgtaaatttttatagaggtcgttttgttatttgtttttggggtttattatttttgaaatgtttttatttttttttttgtttttgtatttaattgtttattgcgttgggtaggtattaaatgtgtttttttttatattaagtttttttttttttttattagatttttgtagttattttttgattggttttgttagttttatttgtcgggaaattttgtttattttttaaggttcggttgaaacgttattttttttgagaagttttttttatttttgtttttttttttttagtagtcgtattgttttgtgtttttaagggttcggtttggttagagtttttttagggtgtttgttttatcgtgggaggggggtatgtagtttttttattttattgggagtatgagtataagatcggtgttttttgtgttttttagtacgtcgtatgttatataggaaatgttttaatgtgataggtagaatagagaggaaggtagttcgttgaatttgatcggttattttattgtatgggtattagtttttaggtggtgatgggatagtggtaattagggatggagtttgtagagtatgaagtggttgggggagttgatgaaatatagagaggtcggggtatagttttgtttaggagaggggagttggagtggtttttatttagtgtagggttttttttttattttttttttttagttgagagttagtatttttaggatgaggggtttaaggattgggttatatgatattttttagatgatttaggggtgattgagagtagttgttatattgaaaagttgggagaagggaggagagtttgttcgtgtgtttttagggggcggaattaggattcgtgggtgagatgaggagtcgtaggtttgtcgttatattaggagttgtgttttttgatagattttttttgacgggggtggggagggtttttgttttgtttggagtgttttagaatgagattagtattttttgggttttgtagaaggatttggtgagcgggatttttaaagatattatagggcgtttttggtttggtttatcggtttattgattagcgtgtgataggaaagttgtttattgattttacgtgttatttagttttgttttaaattttgattcgtagttttatagttgtgggttttgattacgagggtgtttaggggagtgagggtggttgtttggatatgggattttagggaaggtatagatcggttgttttaagttagtgatggggttgttgtttttgtttttgttttacgttgtgattttaggtgtcgtttgtttttttgggttttgtttttttatttatcgagagtagttggtttaggtagttttaggtttcgttatgcgtttattttggtagtttgtatggagttttttttagggattggttaggacggttttttagtgcgtaaggttgttggttttggtagtttttgtttttttggggtggtttttgtattgggaatgagaaagaggtagagggttaggattcgagtttgtatatgcgggcggtataggtgttgtttttttgttttagggaaatggtaggggagttttagtgttcggtatgttcgaggtttagtgatttagttgaatggttgtagaggttgttagtttgttcgaagtttattcgtagagtgggtgttggagagcggggtgggggtgttttcgttttaggaggagcggtggtggtatagttgtgttgtgtggggttttttgttttttttgtttgtttgtttgttttgaggttaggttttgttttgttgtttaggtcgggatgtagtggtgcggttttagtttattgtagttttaaattttgagggttaggtagttttttcgttttagttttttgagtagttaggattataagtgtatgttattatattgagttagtgttttaaaattatttgtagagacggggtttttttgtgttatttaggttgggagttgtgttttggataagggttagttttgtatacggtttcgtattgagttttgggggtgatagtgtgagattgggtgggattagagtgtagtggggtatgtatttttaattatggttagtcgtttggttttgggtgtatatttgaatatggaaaaaaaatattgtttttttttttttatggttttataatatttttggttattaaattgaatagtttgtattatattataatattatagtatttttgtgtggaagtttttttattttataggaatttttttatgttttgttacgttttgggggatttattttgcgttttgagttatgtggaggggttttagttttttttgtcgtttgtttgttgagattttatttaggttagtttagaggtatagagtcggggttgtatttggtttttagtttggggtttttggaaagagtgtggtgaattttttgagggattttttataggaggaggttttcggggaagttttggtttgttaggtgtgaggggagttaagtttgaggatatgagggaggggtttggttttagttgaaggttgttgtgttattttgtggaagtaaagtagtgtttaaggtttgattttttttttttttggtggtcgttttatttttatgagtttttgagaagtttttgttatagttttgttgagattgttgtttttggtttgtaagaatgttttggagtattataggtgtggtagtaggggtagggagggatgttggtggattattatttaggagattagaggaagttcgggaggttagagtagaggtcgggttttatttttatggtttttcgtagtttgtagcggttattgttttggttatttgaaagtgttgttttgggttttggttgttttgattttgtgatgaagggataaaaatgtgggttttagggaggaggagtataggtttattaagagggtattttggggagaaatttatgtttgattattgagtgttagggaaggaaggtagtggttagatttttagtagttgatgagggattttgtatagtaatttttcgtttattaagatgattttggcgagaagtagggtggttataggtttttttgtattggtttgaagtcgaggggtttggaagatggtttaggtagcgtagttggagttgttagagcgttcgtagggatggtgttggtttagttttttttattaagtttgacggttggtatatttggggaatgagaggaatgggggttttcgggtgttttgatttttgtttttttttgttttttagtaattaattagtggtttattttagtcgtgaggggggatattttttttgggtgtgtagtttatggtttcgtgtgtgacgggattcgttttttggtgtttggtgggatggtggagtatgggaaatatagtaatgatttttacgaattttaggtaaagtagttttaggtttttattttgtttttttggttttatgtgatttgacggtagtggttttagggttgaggtaagcgggaggtggaagggacgtttgagagtttgttaaggttgttttgaatttggtttattttagaagaaggtagtaaggattaatatttaggatttttttgttttagtaaggtatttcgtttattttcggttatttttttttttattataagttgtttcgggtttttagtggtggtttttttattttacggtttagtttttaggttttgattttgtagg

SEQ ID NO: 856 - DNA, 5443 bp, Artificial Sequence
  chemically treated genomic DNA (Homo sapiens)
tttgtaaaattaagatttggagattgaatcgtgggatgagaaggttattattagggattcggggtaatttgtggtggaggaggaaatggtcgggggtgagcgaggtgttttgttggagtaagaaggttttgggtgttggtttttgttgtttttttttgaggtgggttaagtttagagtagttttggtagatttttaagcgttttttttatttttcgtttgttttaattttgaagttattatcgttaggttatatggggttaaggaggtagagtgagaatttggggttgttttatttggagttcgtagaggttattgttgtattttttatattttattattttattaaatattaggaggcgagtttcgttatatacgaagttataggttgtatatttagggggaatgtttttttttacggttgggatgaattattggttggttgttggggaatagaaggaggtagaagttagaatattcgggagtttttattttttttattttttaaatgtgttagtcgttaagtttggtgagaggggttgagttagtattatttttgcgggcgttttagtaattttagttgcgttatttgggttattttttaaatttttcgattttaggttagtgtaaaagagtttgtgattattttgtttttcgttaaggttattttaatgagcgggaagttattgtgtaagattttttattagttattgggaatttagttattgttttttttttttagtatttagtgattagatatgaatttttttttaaaatatttttttggtgggtttgtgttttttttttttggagtttatatttttgtttttttattatagggttaggatagttagagtttagagtagtatttttaagtggttaaaatagtgatcgttgtaggttacgaagagttatggggatgagattcggtttttgttttgatttttcggattttttttggttttttaggtgatggtttattagtatttttttttgtttttgttgttatatttatggtattttagaatatttttgtaagttagaggtagtagttttagtagagttgtgatagaagttttttaaaagtttatgagggtgaggcgattattaagaaagagggaaattagattttaggtattgttttgtttttataggatggtatagtagtttttagttgggattaggttttttttttatgtttttaaatttgattttttttatatttggtaggttagggttttttcgaaaatttttttttatgaggggttttttagaggatttattatattttttttagaaattttaaattgggggttaggtgtaatttcgattttgtgtttttgagttggtttgggtgagattttagtaagtagacggtagaaggaattgaggtttttttatatgatttaagacgtaagatgggttttttaggacgtgatagggtatggggggatttttgtggggtgggaaggtttttatatagggatgttgtgatattgtgatataatatagattatttagtttggtggttaaaagtgttgtgagattatagaagaggaaaaatagtgttttttttttatatttaggtgtgtatttagggttaggcggttgattatggttgggaatgtatgttttattgtattttggttttatttagttttatattgttatttttagggtttaatgcggaatcgtgtgtaaggttagtttttatttaaagtataatttttagtttgggtagtatagggagatttcgtttttataaataattttaaaatattggtttagtgtggtggtatatatttgtggttttagttatttaggaggttgaggcgggaggattgtttgatttttagagtttgaggttgtagtgagttgagatcgtattattgtatttcggtttgggtaatagagtaagatttaattttaaaataaataaataaataaaaaaaatagaaaattttatatagtataattgtattattatcgttttttttgaggcgagagtatttttatttcgttttttagtatttattttgcgggtaggtttcgagtaggttgatagtttttgtagttatttagttgagttattgggtttcggatatgtcgagtattagagtttttttgttatttttttaaagtagagggataatatttgtgtcgttcgtatgtgtaagttcggattttggttttttgttttttttttatttttagtgtaaaaattattttagaaaagtaagagttgttaaggttaatagttttgcgtattggagagtcgttttgattaatttttggagggagttttatgtaagttattagggtaaacgtataacgagatttaaggttgtttgggttaattgttttcggtaggtaaaggggtagagtttaggagggtaagcgatatttgaggttatagcgtaaaatagagatagagataatagttttattattgatttgaagtaatcgatttgtgttttttttagggttttatgtttaggtagttatttttatttttttgagtattttcgtggttaaagtttatagttatggggttgcgggttagagtttgggataaagttaaatggtacgtggggttagtgggtagtttttttattatacgttgattagtgagtcggtgggttaggttagaagcgttttgtgatatttttggggatttcgtttattagatttttttataggatttaagaggtgttgattttattttagaatattttaggtagggtaggggttttttttattttcgttaagagaggtttgttagggagtatagtttttggtgtgacgataaatttgcggttttttattttatttacgagttttggtttcgttttttgaaagtatacgagtaagtttttttttttttttttagttttttaatgtgatagttgtttttagttatttttgaattatttggggggtgttatgtaatttaatttttgggttttttattttggaaatgttggtttttagttgggaggggaaggtggggaaaggattttgtattagatgaagattattttagttttttttttttgagtaaggttgtgtttcggtttttttgtgttttattagtttttttaattattttatgttttgtaagttttatttttggttgttattgttttattattatttagagattggtgtttatgtagtgaggtggtcggttaagtttaacgagttgtttttttttttgttttatttgttatattagagtattttttgtgtggtatacgacgtgttgggaggtatagaggatatcgattttgtgtttatatttttaatggggtaggaaggttgtatgttttttttttacgatgagataaatattttagaagagttttgattaagtcgggtttttgggagtatagagtagtgcgattgttggagaggggaggataggagtggaaagggttttttagaagaggtgacgttttagtcgggttttgaagggtgaataggatttttcgataaatgaaattagtagggttaattaggaagtgattgtaagagtttagtaagaggagaggagggtttggtgtggaaggggatatatttgatgtttgtttaacgtaatgaataattagatatagggatagaggagagaatggaggtattttaaaggtgatgggttttaaagataggtggtagaacggtttttatgaaggtttgtattttcgtttaatttcgttattagttgggagggcgattttggatttgttatttttttttttggattttaatttttttatttgtagaaataaggaagtagttttattaggtattttttaaggttttttttagttttaagaatttatggatattatagagttatcgtagttaaagttttcgtttttttattttttatatttggtagtattttgaattttttggtttgttatatggaattaaaattttttaaggataagtatagtagttattttaagagtttttaaagtatatattttttgaagtttttttattttagtaacgggaattttttttagattagttttttttaaaggtataaggttttttgaggattgatttcgtagaattgtaaggggtataggcgtgagaatatgttttgattttattttaaatataataaaagaagataagataaaggtgacgaggtcgggttggcgggagggggtagaaatttcggtgaggaagagggttttaggtttgttagttgttttttcgtttgaggaattgtcgatgatagtttttaaattgttattttggaggattttagagttttattttaagtagttttttggaaggtaggttatttttttaatgtataatttgtttttgtagattggtaatgaatttatgttaaagtggttaatttattttaataaattaatgaatatgtagaggttttaggaagttaaggtagtagtggtggtggattttggagtcgattgtaattaggtttttgttttattttttaaaattgtatttttttgttagggagtttgttttaggttttatgagaagaaagtcggtttatagagtggagaaggtgttgtttatggtgacggtgtttttataaatagttttattattggagaagttttagtttattgagttaatttttgttattgtagttgtttgggttggcgcggggtattattaattattaagcgttttcgttcgggggttgttgagaaaggttttgttttttggaggtaataggtgttgagagatttggaacgaaaaacggttatagataatttattagttttttaaagttaacgtggtaggtggcgataattttcgagatgtggagaaattagtattttttgttttggggggtggggaaggaagcggtatttaagagtttagttttagtttttttaattttttaaattaattttttttttttaggtagttttagttttttatttttagagtatcgaggtattggagtttagttaaagaatagtagttttttatcgtttaggatataaagtttatttagcgagggtttgtttgtagggttattatcgaggttaggggatcgttagagtttttaggagagaacggtcgcggagtaaggggttagtgttgggagtcgtgtttgttatttaggattagggtattttaaggtttttttttagtcgtttgtagggggttttttttttatttagatttttttagtttttgtttgggatcgaatttattttgattttgttttttgggtaaggttagggttttgtgggttaacgggtagttagtaggtaatttgggaattgatttttgtgttaggggtataaaacgggttaagtagttattaagaaaaaggatgttataaagttgtcgtggatagtagtaggttttttgttttagagattaagtaaggttattaggtagaggtaataataaacggtttttacgaaggtcgtggtgtattag

SEQ ID NO: 857 - DNA, 7644 bp, Artificial Sequence
  chemically treated genomic DNA (Homo sapiens)
ttttttttttattttttagttttaagtagatttcggtgtttgttgtttttttttttgagtttatgtgtttttattatttagtttttatttataagtgagaatataaggtatttggttttttgtttttgtgttagtttgttaagggtaatagtttttagttttattcgtgtttttataaaaaaatatgatttcgttttttttatggttgtatagtattttatggtgtatatgtattatattttttttatttaatttgttattgatgggtatttaggtttattttatgtttttgttattgtgaatagtgttgtaatgaatatttatatgcgtgtgtttttatggtagaatgatttatatttttttgggtgtatatttagtaatgggatttttgtttttagttttttgatttaatatttattttttaagattaagttagatttttaaaaaaggtattattttagtatttttttattttttttttgaattaaatttaatgttgtgtgtattaattagtatatagttaagatagaaattatatatgaatattaaatataatgagttattaatttataaaagggtatgaattattaaagggggtaaggagaatgttgaagaatgtaggaatggtagatgtagagagtagttataatttttaagttaaggtatagtagttaaggaaggggcgaatttaaaaaatgttttttttttttagttgatttatttttgttggagggggtgtggttgtaatttaatggatgtttaagaagtttgtagagttgtggtaggttggggttgttgagtaggaaattgttcgaaggggtattagtgagatttttaagaatgtgggtatgtttttggcgaggaagacgtttttggagtgttagtaaaatttattaggaagttatttagtagggtgttagtaaaagttagtaggaagttattgtcgtggtgtcggtaaaatttattgaggagtgggtattgtagggtttttatttagtattggtaaattagttaaaagaataaaaataaaataaaaataaattttagaattagaaagaaaaaattttgttttttattgcgatttttttatgttttttatagtaattggtaaaggagaaatgtttatggggtttagttttagatttataaagtagaatatagaagagtgaatgaagagttgaaaggcgataaattagtaattggagttttatattttttgttttttttattgagggttaatatattaagaagaatatgtttgcgttttcggtaaaattattgttaaggttattatttagtgtgtgtttttaatttttttgatataagaatttagtgataagaaagaatgagataatgattatgaattattggatttaattatttgtggttttagtgtttatttttttagtaaggtttttttttttttttttttttttttttttttttttttttttttttttttttttttttttttaagatggagttttattttgttatttaggtcggagtgtagtggtataattttggtttacggtaatttttattttttgggttcgagtgatttttttgttttagtttttcgagtagttgggattacgggtatttatcgttattttttttggttaatttttgtatttttagtagagatgaagttttgttatgtcggttaggttgtttttaaatttttgattttaagtgatttatttattttagttttttaaagtgttgggattataggtatgagttattatagttagtttttagtaaggttttttttgattatattatttaaaatgtgatttttgagttattttggttttttttgttgtttttttttgtttcgttttttttatagtattttttttttattaatttataatttatttgagttttgtgaaggttaggatttttgtttattttgtttattggtgtatttttagtatttggaatagagttaggtataggttaggtattttagaaatatttgttgaataattgaattaagtaaatgagtgatttatacgtagtggggaatgagagtatatagtgatagttttttcgattaaaattggggttaaattatagtgataaagaggaatttagatttttagaggtaagttttgtggattatttgttaaggttgtagaatgtgatgtcgttttataaataaggaggttttattatggttttagatatgagaataataaagagaatttttttttcgttttaattgtagttttttaaattttttttttttttttatgtagaagttttaaggattttatggtttgagtgtggataggtagaatgttgggaattaggtaaaaataaaataatattgaaagtgaaggttatgttaatattagtaagttagggtgattttgaatttataaaatatttttttttgggaaattttatattttatatgattttgtgtttttatttgggaaattttatattttatatgattttgtgatatgcggtatatgaggtgtttgattgttgtttttgttttttattaatgaggaagagtgtgcgtatttttagcgttttgtaagttttaaagtttgatttgatttttttttttttttttggaattgatttatgagtatcgagagtaaagttgttcgtatttatttatttaagattttgagtgttttgtttagttgtaggaggtggagagatttaggaggaggggttattgttgattttaggttgtagggggtgggaagagtgttttagggtattatgatttttatttatttatttataggagatttatataagagaggagagggtatttatagtttaggtttttattagtattaatttttttgttattaaatattattgtgtttttttttttgttttgtttgtcggtatacgtggagttaaatttaatgtttaattatatatttgtttgggttttttttgtgtttattttttttttaatagttttttttttttttttttttttttcgtttttttttttttttttttttttttttttttagagatagtgtttcgttttgttatttaggttagagtgtagagtggtatgattatggtttatcgtagtttttaatttttgggtttacgtgaatattttattttggtttttggaatgtttgggattataggtatttgttattgtatttggttaatttttatattgtttatagattcgggattttattatgttgtttaggttggttttaaatttttgggtttaagcgatttttttattttatatttttgagtagttggggttgtaggaatgcgttttagtgttaggttagttttttaattttttatttttattttgataggtataaattttgtatttaattttattttagatatatttttggtgggaaaaggatgttatttaattaatatataaattttaagtaaataggtttgatttttaaattaggttagttatagttgttgagtcgttgatttaagagaagtttatttagatttttttattatttttaagttttttttttcggttcgttttttttttagattatgtttttttcgttttattttttttttatagttttttttttttatagtttttttttattattttaaatttgggttgtttttttaatttttttttttttggatttaaatttattttagtttttagttttagtttggggttaaatttgttttttttatatttttttttatttaatttgatgtcgtttttgtgttattattacgggattttttttttttgggtttttttttttcgagtggggttagtttttttatgagttatagtattaattatttttggttgtttgtaaatttttttgttttttttagtgttgatatttagggtagttttatgtttattgtcgttgagattttatttttgtttttggtttttttttagttgatattattttgtggtttttatttttttaaaatttttttttgaggttttagttttaattaaagtatatagtgttttttaaaaatgataataaaaatttaaatatatcgtgattgttatggtaggtttttggttttcgtattgaattagcgggtgggtttttgcgaatattggtgagaggtcgtattagagggttaggatttttaggtttggattcgtggttattatatatttttttttttgttgatagtagttggtatttgttatttatttagagtgttatatgttataagttagagcgttttggtagtttttagtattttgatattatttttttgttattatttagagcggtagtgatatagtttttttattttagaaggttagaagacggttgttaaaggttatagggaaattaaaggcggggtatagggttagagggaggaggaaataatttttcggttgtttttagacgttttagagattttttggaggtttgggggagtttttgagtattttattttagttggtttttgagttcggtgagtggggcgggtagagttattaggggaattaatagtggtttttcgtgttttttagggttaggagtagtttgattaaaaggagggtatttattgttcggggttatttttatagttttcggatgttgggtttggaggttgcgttttttttttgtaggagtttagtttagtggtaagttatttgtgtgttatttatgtatttaattttttatggttatgttgatgttgagtatggttttatttttgtaaatatttatttatatttttcgagagaaaaacgttttagttgttataggaagttgtttcggggggtgagtaaattttttaaaatgtagaaattatgatttatattcgttttttaaaagtaagttatcgtatttggttttttttaattatatatttttttatatattgtgtttatgtaggtaagttttgtttttgttaaaagaaggtaagttttattaaggcggtgttatgttagttttatttttcgtggtatttggtatattgttaagtatttatatgtttaataattagattgggaatggtgttgttttggggaagtgggtatacgttaaagaaatgtttattttagttttttgaaatagggaattattttggttaaaatgtagttttagaaagggaaagtggggttgtatgaatttaggtttagtttgttgttttttttaggataaggtagttgtcggaggggaaaattattttttatttttttatagggtagtttgaagatggttaattatacgttggtattagaggatgaatatgatgtttttatagaaggtgaattggagagcgatgaggtagagtaatgtgataagtatgacgtttaggtatttttagtttagttggtgttattattttgttttgttgtgtttgtgatcggtgttttggataattttttggttgtgtttattttggtaaaatataaaggatttaaacgcgtggaaaatatttattttttaaatttggtagtttttaatttgtgttttttgtttattttgtttttttgggtttatgttgggggcgattttatgtgtaaaatttttattggattgtatttcgtgggtttgtatagtgagatattttttaattgttttttgattgtgtaaaggtatttagtgtttttgtataagggtaatttttttttagttaggaggagggtgttttgtggtattattataagtgttttggtatgggtaatagttattttggttattttgtttgaatacgtggtttataaattttagatggaagattagaaatataagtgtgtatttagtagaattttttttttgttagttgatgagatattttggaagtattttttgattttaaaaatgaatatttcggtttttgttttttttttatttatttttatatttttttatgtgtaaatgagaaaaatattaaggtttagggagtagaggtatagtttttttaagtttgtttttgttataatggtagttttttttttgatgtgggcgttttataatattgtattttttttgtttatttttaaagaatatttttttttgagtgattgtaagagtagttataatttggataaaagtgtttatattattaaatttatcgttattatttattgttgtattaatttttttttgtatgcgttttttgatgggatatttagtaaatatttttgtcgttgtttttatttgcgtagtaatattttattttaatttagggggtagtttgtataaggtatatcgagggaagaatttgattattttatcgaagtgtaaattagtatttattaaatgtaagaagaataaatatggatttttatttttttgtattattttatgtaaattttttatatatttgtatataaaatcggatataggaagaaaagggagaggtgagttaatatttgttaagtattgaatttgttttaggtatcgtgtaaggttttttataaacgtgagttttttcgttttttattatttgtttatagtgtggataggattagttttatttttttgagaagaaaattaaggcgcggaaatttgtttaagattatataattaggaagtggtagaattgattttttagttttggtagtatttgtttagagtttacgtttggtttagaatattaaattttaaattttggggataaacgatatgaaataaatgtattttaaaatatttatttaatgtattttaaaataatttgtaagttgattttaaaattaatttaattatattttaaattatagatagtttatttatatgggagtaattttttaggtttattgtttcgtcggtgatgagaagaattagttagttggaagttgtgggaaaaagaggtaaggtaatttgttttgtcgaagttttttaaatttttttgtttatttgttatatttttaggtttttagttttttttaatttaaggtttttggtattttttcgtattttattaagattatggaattttaggagatttaataaaagtaaatgagaaattatgtttagaaatgtttaataaaatgaattttttgtttttttaagtataatatatattttaggttttattagtatataattataaaaggttgttttattttttttttgtggttgagttagtagaatataggtttttatttgttatattagtagaaggttattttaatatgtgagttattttttcggagattttttagattcgtaaggatgatgtatttttgattttaaaaatatttttttgtttttggtgtttagaattggattttatatttattggtttttttataattttgtttttggttttttgaggttttaaagttattagggttttgttgttaggggataattatcgttttcggttgagttttgtagatatagggtttgggttggttgtttttttttgttggtttagtattttgtttgtattaaagagagttggaggtttggtattgatgtttgttaaaaatttatttaggtcgtttattgttgtcgtattgtagggtattagtttatatttttttttttttggtattaggtatacgtttacggtattaaattttataggaaagtagtggaattttgttttttttttataggaggtatttttttttttaggtaaaaacgatgatatttatgggtatagtattttatatagggatatatagagatgtttgatttattaaaa

SEQ ID NO: 858 - DNA, 7644 bp, Artificial Sequence
  chemically treated genomic DNA (Homo sapiens)
ttttaatgagttagatatttttatgtgtttttatgtgagatgttgtgtttatgggtattatcgtttttgtttaggaaggaaagtgttttttgtgaaggaaagatagggttttattgtttttttgtaaggtttagtgtcgtgaacgtgtgtttgatgttaggaggggaggagtgtgggttggtgttttgtagtgcggtagtagtgggcggtttgggtaggtttttagtaagtattagtgttaagtttttagttttttttagtgtaagtaagatgttgggttagtaggaggaggtagttagtttaggttttatgtttgtaggatttagtcgggagcggtgattgttttttggtagtaaggttttggtagttttgaggttttaaagggttagaagtaagattataaagagattagtgagtgtggagtttaattttgaatattaggaataggaaaatgtttttaggattaaggatgtattatttttacggatttggggggttttcggggaggtagtttatatgttgaggtgattttttgttgatgtggtaggtgggagtttgtgttttattaatttagttatagaaaggaagtgggataattttttgtagttatgtgttggtgaggtttgaggtatgtgttatatttaaaaggataaagaatttattttgttagatatttttaaatataattttttatttgtttttgttaagttttttaagattttatagttttgataaagtacgagaaaatattagaaattttgggttaggggaagttgggggtttaggggtgtggtaagtaagtaagagaatttagagaatttcgatagaataagttattttattttttttttttatagtttttagttagttagttttttttattatcggcgaggtaatgagtttgaaaagttatttttatataaatgggttgtttataatttggaatgtagttaaattggttttaaaattaatttataaattattttaaaatatattaaatagatgttttaaaatatatttattttatgtcgtttgtttttagggtttggagtttgatgttttggattaagcgtaggttttgagtaaatgttattagggttggagaattagttttgttattttttagttatgtgattttagataaattttcgcgttttagttttttttttagagaaatgagattagttttatttatattatggataagtggtaggaggcgaaggagtttacgtttgtaaagagttttgtacggtgtttgagataaatttagtgtttagtaaatgttagtttattttttttttttttttttgtattcgattttgtatataaatgtgtagaaaatttatatgaaataatgtagaaagatgaaaatttatgtttattttttttgtatttggtggatgttagtttatatttcggtggaatggttaggtttttttttcgatgtgttttgtgtagattgttttttgggttgaagtggggtgttattacgtagatggaaatagcggtagaggtatttgttaaatgttttattaagaaacgtatataggagagggttgatgtagtagtgggtggtggcgatgagtttagtgatgtgaatatttttgtttagattgtagttgtttttgtagttatttagggagaagtgttttttgaaagtggataggaaaaatgtaatattgtagggcgtttatattagaaggaagattattattatggtaaaaataagtttgaaaaggttatatttttgttttttgaattttagtgttttttttatttgtatatagagaaatgtaaaaataaatagggggaggataagaatcgaaatgtttatttttaaagttagaaaatgtttttagaatgttttattagttggtaggaagggagttttgttaaatgtatatttgtatttttggttttttatttgaggtttataaattacgtatttaggtaaagtggttagaatggttgttatttatgttaggatatttgtaatgatgttatagggtattttttttttggttgagaaaaagttgtttttgtgtaaaaatattaggtatttttgtatagttagaaggtaattgaaaaatgttttattgtataggtttacgaagtatagtttaatgagaattttatatatgggatcgtttttagtatgagtttagaagggtagggtaagtaagaaatataagttagaaattgttaagtttagaagatagatattttttacgcgtttgagttttttatattttattaggataagtataattaggagattgtttaggatatcgattataaatatagtagagtagagtgatggtattagttgggttgagagtgtttgggcgttatatttgttatattgttttgttttatcgttttttagtttattttttatgaggatattatatttattttttggtgttagcgtgtaattggttatttttagattgttttgtggagaaatgggagatgattttttttttcgatagttgttttattttggaggaaataataaattggatttggatttatatagttttattttttttttttggagttatattttagttagagtaattttttattttagaagattgaaataaatatttttttaacgtgtgtttatttttttagagtagtattatttttaatttagttgttaagtatgtaagtgtttagtagtgtgttaggtgttacgggaaataaagttggtatgatatcgttttggtagaatttatttttttttagtagaaataggatttgtttatatgaatataatatgtaagaaaatatataattaaagagaattaagtacgatggtttatttttaagaaacgggtgtagattataatttttgtattttaaaaagtttgtttatttttcgaagtagttttttgtgatagttgagacgtttttttttcgaagggtataaataaatgtttgtaaaagtgaaattatgtttagtattaatatggttataaggggttaaatatatagatgatatatagatgatttattattgggttgagtttttgtaggggaagggcgtagtttttagatttagtattcgggagttgtgggaatggtttcggatagtggatgttttttttttgattagattgtttttgattttgaggggtacgagaaattattgttgatttttttggtggttttattcgttttatttatcgagtttagggattaattgaaataaagtatttaaaagtttttttaggtttttagaggatttttgaagcgtttgaaagtaatcgggaagttgtttttttttttttttggttttgtatttcgtttttgatttttttgtgatttttgatagtcgttttttggttttttgagataagggaattgtgttattgtcgttttgagtggtagtaaggaagtgatgttaaggtgttgagaattgttaagacgttttggtttgtggtatgtgatattttgagtaggtaataggtattagttattgttagtagggaggaaggtatgtggtgattacgagtttagatttgagggttttgattttttaatgcggttttttattagtgttcgtagaaatttattcgttgatttaatacggggattaggaatttgttatgatagttacggtgtgtttgggtttttattgttatttttgaggggtattgtgtgttttggttaagattgaggttttaaaagagaattttaggaaaatggaagttatagggtgatgttagttgggaaaaggttaggggtagaggtggggttttagcggtagtgagtatagggttgttttgggtgttaatattgaggaaagtaaaggggtttgtaagtagttagaagtgattggtgttgtgatttatgggggagttgattttattcggaaaaggagaatttagaggaggaaaatttcgtggtgatgatatagaggcgatattaagttgggtgggagagaatgtgaggaggataagtttaattttaaattgaggttgggggttagggtaggtttgagtttagagagaaggaaattgagagaatagtttagatttggaatggtgggaggaggttgtggggaggggaggttgtgggaagagagtgggacggggagggtatggtttggaagaaggacgaatcgagaagaggaatttgaaaataatgaaaaaatttagatgagttttttttgggttaacgatttagtagttgtgattaatttaatttggggattagatttatttgtttagaatttatatattgattaaatgatattttttttttattaaagatgtgtttgaggtaggattgaatataaaatttgtatttgttaaaatagaaatagaaaattaagaaattagtttggtattgaggcgtatttttatagttttagttatttagaagtatgaggtgggagggtcgtttgagtttaggagtttgaggttagtttgggtaatatagtgagatttcggatttataaataatataaaaattagttagatgtagtggtaagtgtttgtaattttagatattttagaggttaaggtgggatgtttacgtgagtttaggagttggaggttgcggtgagttatgattatgttattttgtattttggtttgggtggtagagcgagatattgtttttggaaaaaaaaaagaagaaggaggaggaggggcggggagaggaagggaggagagagaattattaagagaaaaataaatatagaaagagtttagataaatatgtgattgagtattaaatttaattttacgtgtgtcgatagataaggtagaaagagaaatataatgatgtttgatggtagaggagttggtgttggtgggaatttaagttgtaagtgttttttttttttttgtgtgggttttttgtgagtgagtgagtgggggttatggtgttttgggatattttttttattttttatagtttgggattagtagtggtttttttttttgggtttttttattttttgtagttgggtaggatatttaggattttgaatgagtaggtgcgggtagttttattttcgatatttatggattagttttaggaaaaggaaggaaagttaagttagattttgaaatttgtaaaacgttgggagtacgtatatttttttttattagtagaggataaaaatagtagttaggtattttatgtatcgtatgttatagagttatgtgagatgtgaaattttttaagtaaaaatatagaattatgtgaggtgtgaaattttttaaagaaaaatgttttgtaaatttaggattattttggtttattaatattagtatgatttttatttttagtattattttatttttgtttgatttttagtattttgtttatttatatttaggttatgaggtttttgaaatttttatataggaaggaaggaagagtttagaaggttgtagttgaggcgaaaggaaagttttttttattatttttatatttgaagttataatagggtttttttgtttgtgaaacgatattatattttgtagttttggtaagtggtttataaagtttatttttgaaggtttgagtttttttttattattataatttgattttagttttagtcgaaggaattattattgtatatttttattttttattacgtgtagattatttatttatttaatttaattatttagtaagtatttttagagtgtttagtttgtgtttagttttgttttaggtgttggggatgtattaatggataaaataggtaaaaattttgatttttatagagtttaagtaaattgtagattagtaggagagaagtgttatggagaaggcgaagtagggaaggatagtaagagaggttaaggtggtttagggattatattttaaatagtgtagttagaaaaagttttgttgagagttggttgtggtggtttatgtttgtaattttagtattttgggaggttgaggtgggtggattatttgaggttaggagtttgagaatagtttggtcgatatggtaaaattttatttttattaaaaatataaaaattagttaggaggggtggcgatgggtgttcgtaattttagttattcgggaggttgaagtaggagaattattcgaatttaggaggtggaggttgtcgtgagttaagattgtgttattgtatttcggtttgggtgatagagtgagattttattttaaaaaaaaaaaaaaaaaaaaaaaagagagagagagagagagagagagagagagagagaaagttttgttgagaagatgggtattaaagttataaatggttgggtttaatagtttatgattattgttttatttttttttgttattaagtttttatattagggaggttgaaaatatatattgggtgataattttagtaataattttatcgaagacgtagatatattttttttaatatattgatttttaataaaaaaggtaaaggatgtgaggttttagttattgatttatcgttttttagttttttatttatttttttgtgttttgttttgtgagtttagagttggattttataaatattttttttttgttagttgttgtagaaggtataagagggtcgtagtaagaggtagagttttttttttttggttttgggatttgtttttattttgtttttgtttttttggttgatttgttagtgttgggtggagattttgtagtgtttattttttagtgaattttgtcgatattacgatagtggttttttgttgatttttgttggtattttattgggtagttttttagtaaattttgttggtattttaagagcgtttttttcgttagaggtatgtttatatttttgggaattttattggtattttttcgggtagttttttgtttagtagttttaatttgttataattttgtaaattttttgggtatttattgggttgtagttatattttttttaataagggtggattagttggggagggagggtattttttgagttcgttttttttttggttgttgtgttttagtttagaggttatggttgttttttatatttgttatttttgtattttttagtattttttttattttttttagtagtttatatttttttataagttaataatttattatatttaatgtttatgtgtggtttttgttttgattgtatgttgattgatatatataatattaaatttagtttagggaagggatggggaaatgttaggatgatgttttttttagagatttaatttgattttgagaaataggtattagattaaagagttaaaaatagaaattttattattgggtatatatttagaggaatataaattattttattatgaagatatacgtatgtgaatgtttattgtagtattatttatagtagtaaagatatggaataaatttaaatgtttattaatgatagattagataaagaaagtgtggtatatatatattatggaatattatgtagttatgaaaagaacgagattatgtttttttgtggaaatacgaatggagttggaggttattatttttagtaaattaatataggaatagaaaattaaatattttgtatttttatttataagtgggagttaaatgatgagaatatatgaatttaaagaagggaataatagatatcgaggtttatttgagattggagggtgggaggaggg

SEQ ID NO: 859 - DNA, 16439 bp, Artificial Sequence
  chemically treated genomic DNA (Homo sapiens)
aagagattgtttttgattgtaggtgattcgttaggatgtttagttgttttaggttttattattttaaggattgaggggttggttgttttagtatattagtaggagatttaagaaatattaggttaggcgtagtggtttatgtttgtaattttaatattttgagaaattgaggtgggagagttatttgagtttacgagttttagattttaatttgttgggattgtaggcgtgaattatcgtgtttggttaagaaatatttttaaaatgaataaagttatgttaaagagtatttattgtgtgttagatattgttttaggggttagtgaatatagaatttgtttttaagaagtttttattgtagtggaatagatagataaatggataaataataataatagagttatattttggtatatttaagggattggttttaggaatcgttttttttacgtttttaattttttaaggatattaaaatttgtatatatttcgtatatatttaagttttgtatatggttttttatatttatggggtttgtattttaagaatattgtgttttttatttgtttttggttgtataatatttgtgtatagatggattagtgtagtttaaatttacgttgtttaagggttaattgtatttttagatatatgagattaatttagagagttatgagattatagagggggattttatttagatttgagaagttagaaatttttaggatggtaaaatataagtttagatttttaagtaggtggagggattggaaagtgggaaaggtattgtagagagaagagagtatggtagaggattaggaagtgaggtaatcgtggtatatttttttttgttagttttataaattttttgtttaatatgttattttttttatatttttgtgttttgtttatgttttttttttttgtttggttaatttatgttttgggagttaatttaaagtttatttttattgtaaaagattttttgaggtaaattatttattttttgtttttttttgattttttaatttatgagttaaaaatttgaatatattgtttgatagtgaattatttttttgatatgtaaattaattttattagaagttatagatatgaaaattaaattatgtttttatttatttaataagttgtttttaataaagaaaaaatagtttttagtttttggttcggaggaggttaaggtgtaatttttttcggttatttcgaattcgggtttattcgatattagttgtttttattatgtcgttaaagtttgattttaacgagattaaagttgtatatttgaggtgtattggaggtgaagtcggtgttatttttgttttggtttttaagatcggttttttgggtttgtttttaaaaaaggttggtgatgatattgttaaggtaacgggtgattggaagggtttgaggattatagtgaaattaattatttagaatagataggtttagattgaggtggtgttttttgtttttgttttgattattaaagtttttaaagaattatcgagagagaaagaaatagaaaaatattaaatatagtgggaatattatttttgatgagatcgttaatattgtttaatagatgcggtattgatttttagttagagaattttttggaattattaaagagattttggggattgtttagtttgtgggttgtaatgttgatggttagtatttttatgatattatagatgatattaatagtggtgttgtggaatgtttagttagttaagtataaaggaaaatattttaataaaggattatttgataattagaaaaaaaagaaaaattattaaatattatatatagtatgttattattttttatatttatttattgtttaaattgatggtaatgttgtatatatattaatttaaataatttatattgttaaaaattgtttatttatttttaaatttaaatttaattttttttgagatagaatttttatttaggttgaagtgtagtagcgtgattttggtttattgtaatttttgttttttaggtttaagtgatttttttgttttagttttttaagtagttgggattataggtgtttgttattatattaatttttgtatttttagtagagatggggttttatcgtgttggttaggttgattttaaatttttgatttgaagtgatttattcgttttagttttttaaagtgttgggattaaggtatgagttattatatttagtttaattttaattttaagtttttttggtatatagtaggtgtatatatttatggggtatttgagatgttttgatataggtatttaatgtgaaataagtatattatggagaatggggttatttatatttttaattatttattttttgagttataaataatttagttatatttttttaaaatatataattattattgattatagttattttattgtgttttcgaatagtatgttttatttaggttattttttttgtatttattaattatttttattttaaaaaagaaaaaaataaagagagatgggattttttcgtattatttatgttgattttgaatttttgggtttaagtgatttttttattttggttttttatagtgttggaattgtaggtgtgagttattatttttagtttgtgatttatttttaattaagtttgtgtatgttgtgaggtaggggattatagtttattttttttatatagggatatttattttttttattattttttattgaaaataatttgttttttttattaaattaaattggtgtttttattgaaatggagtaataattaaatggttttttttttggattttttatttcgttttatttatttgtttgttattatgttaaaattttattttagtgtatagtaaggggggatattttggaagattaataaatttattttgtgtaatttatttttatgtatgtataagaatatttggtttaaaaatttggttaagtttaaaagagtttttttagtaataattaaataattgaatttttgtaatttattatgtttagttttattagtaatttttatagcgtttttatttggatttagtttttttattttgtgtaatttttttaagtaaatgattttttttttttggtataggttgaatatttataaaagggtgttttggtatgtgtttagttttgaaattttattttgatttattgtttttatttttgaaattgttttaaatatttttttaaattattgattttgtgggtttgattatgaatttggtttttttgataatattttttaaattttgtatttttggtaatattttttttgattggtagagtatttagatatttaattaatgttgatgaaaattaagatttaagtaaagaagaaattggtgtaagaatgtaagttttaggatttgaaatttgatgattgtgggatttaatttttgttttttttgttataagttttgtttttgaataattaatttttaaagataaattgtttgatgaatttttgtattgttagaatgtttttttgattttttattaaagttatgtatgtgtaattagtaattaggtatttacgatttgaatataaattattattattttagtagttttttatttgtttttgagaaagggttttattatattgtttaggttaaatttgaattttttggtttaagtgattttgtcgttttagttttttgaatagttgggagtagttgggattatagggatgtgttattatgtttagtgaaagttttttatttttaaaagtttatttttttgatttttatatgtattttaatattaaaattaaatttaaaaattttaaaaagtatttattaattaaataatgttatttaataataatagtattatttgtattatgttttggtaatatagtggtgaataaggaagatagggtttttgataattgtggaattttttttgattattttttaagtttttttttcggatattattttttggatttatagttgttttttttttttatttttgtagtttagttttttattattttttatttttaataaaaaggggttttttaattggttttttatgtaattatttaatatggtatttttaaaatgtagatttttcgggatgatttttaattgtttagagaataaattttttgattttttacgtaaggttttgtaggattaggtttttgttattatttttgagtattttttattttgtatttaaagttttagtaatattttattgtttttagtaaatatatatcgggttatgtggggttttgtttggggaaaggggatgtgagttgtaattaagagatttatagttaattttgaagggaagagtttatattggaggtaatggaatgttttaagttggttttgaaagtatatattttttttagttataagtagattatatttgtgtgattttgtgattttttttttagtagagtcgtgtagattatttattttcggtttttttttgttttacgaaattttatattataacgatttgtggttttaatttttcgtttttttgtttttgaagttattttagtttggtaagttttttattttttcgtaggtttggcgagttgtattataatatttaagatttattttagagttatttgggaaatttttttttttaggtcgttttgcgttttcgtttttttatttcgtttttttcgagtcgggtgagttgtttagttttattacggtcggtacggtcgtaggggtggtcggttatttattgttttattgggttcgtgaatagtttggcgagtcgagtagttgtcgacgttcggtataattcgttgtacgtagtaggagtttttaggtttaggtcggaagtgaaagggtagggtgtgggtttttttggggtcgtaggcgtagagtcgtttttggttacgtgattcgtcgataagttacgggggcgtcgtttatttgattagggttttacgtggttagtttttttcgagaggggagattagcgggttatgataagttttaggttttggttttcgttgttgttggcggtagcgttcgtaggacgggcgacggttttttggttttggttttagaatttttaaattttcgattagcgttacgttttttattcgaataatttttaattttagtacgatgttagttcggtcgcgtagttcggttgtttagttttcgacgaggttttttagcgttatcgtgatttgtttttcggtttcgggttttggtttcgtttttattttataggtgagtcggatttgtttcgttttgtttttgggttttgagagtgtttgtttggggatagtttttttagggttttagagacgttttatgggtttttgtttagttttttgattataggtattttatttttttttcgagttgtattaggtttttatttaaagataattattataggattacggtttaattaggagattaatttatggaaaatattgtgttagtagaaatttaaggtgatttttttgatcgtgtttaagttagttagggttttagtgagattgtgagtaagggttgagtagagattagagaaaatatttaaaattggggagatataatataagaattatgtaaagttatatataagtttttggtatatagaatgtttggcgggcggattacgaggttaggagttcgagattagttcggttaatatagtgaaatttcgtttttattaaaaatataaaaaattagttaggcgtggcggcgcgcgtttgtagttttagttattcgggatgttgaggtaggagaatcggttgaatttatgaggtggaggttgtggtgagttgagatcgcgttattgtattttagtttgggtaatagagtaagatttttttttagaaaaataatttttttttttaaataaaataaaataaaattaaaaaaagtgtaaattgtgaaagaaattatagaatataaggaagtgagtttttagcggttatttggaatgggatggtagatgtaattagtcgggattgaaaagagggtattttaggtaggaagaagggtttgagtagaggtataaagaattatgattgagtttaaagtttaggtttagtggatgtgatgagtgggggttggggattgaggagggatgagggtggggaaaatgtggggttgaagagttaagagcgttttagatattggttttatataaaatggaaggggttaatagtttttttttaggtagttatgtaattagtattgaaaattgtatttgaggataattattttatagtatatttgtaagtcgagttaataatgtaaaggaatataattttgttgtatgggtttaaaatttagaagttttttgataatttggaatttagttttttggttatattgtatagatgttatgggggtgggagttatatttacggttaagttttgtagtaatattttatatgatgttttaagtgtgtttaaattatttttataaaagttattatttgatatatagaattaaaagtatttaattatatagatgatttttagagagtgatatttgatttggggaaagaaatataattttagtattagggtagtttttaattggtaaaatgtattaagttggagaggataagaggtttgttgttgagtgtggtagattatatttttttttgaattttttatgataaataatagagtgttttatttaagattggtatttagaatatgttgattttggtttagaagagtttgagtttggtttatggaaaaaaaaattcgtttaattggtatatgttaattttagtgttgggtattttgaaggttataagaaaagttttaagatttaggtttaggttttatagtttaattgcgaaaatatgaaatagagggaggtatatagtgaattataagatttttaaaagttttataggttgttttttattattgtatatatgagaataattttttttttttttttttttttttttgagacggagtttcgttttattatttagtttatattgaggttgagtgtagtgatacgattttggtttattgtagttttcgttttttgggtttaagcgatttttttgttttagtttttcgagtaggtgggattatacgtgtttgttattacgtttagttaatttttgtatttttagtagagatggggttttattatgttggttaggttggttttaaatttttggttttaagtgatttatttattttagttttttaaagtgttgagattataggtatgagttatcgcgttatatttaatttttatatttttaaattaggtttttatttttattgttatagtattatagtttaattaagtagatagaaatggagagattgtaagataatggaatattataaattttttaataaaagagatttagagttagataaatttaataagatgtttatttttatatattatttttttgtaagtttattagttttattagttgagggtttttgtttattgagagaaaatgaaaattgggttgggtgaatattattaaagatttaaaagtaatttttttttttattgttttttttatggagttttttttttggaatgtagttttttgtggaggtttttaggtgattttgagttaaaattttagttttgtagaaataaggatgaagtaatagtatgggaaataaatagaggtagagtaatattaataaggttgaagttagaatatatttttttatgagtttgattttagtaaagaaggtaatatatgtaggttaaattttaattaatagatttttattttttttttttaaataatttatttgtaggttttgggttagtaggttttgtttgtttgtttgtttttgtttttttgagatagaattttgtttagttatttaggttggagtttagtggtataattttggtttattgtaatttttgtttttcggttttaagtaattttttttattttagttttttgagtagttgggattataggagtatgttattatatttggttaatttttgtattttttgtagatggggtttcgttatgttgtttaagttggtttttaatttttgagtttaagtgatttttttgttttggtttattaaagttttgggattatagggtggaatgagttatttgattagtttagtgttttttttaatgtaatataatttttggtttttgtttgaatttgaaattaagaatttatatttttttttttgaaaaagaagtttggtattgaggtttagttttattttgaatttatttttaagggttagttttattagttgttaaatggtttgtgaaggtgtttagtatttgttatttttttttgttattgagaggtgtttttattaattggagggtgtgtgttgtatgttgttgaatttgttaaatagatttattttaggaattagatatttgaatgaatttagttttttgtttgattattaagttatattttgtttgtaaagtaaagatgtgattatttggaatttggaatggtatttatttaatgttgttttagatatttaataagtatggtgtggagtatggtgtttgatggagttgataaagtttaaatttttttaagtaaagtggttaagtttaattttgttattagattgtattttttttttttttttgagatggagttttgttttgttgtttaggttggaatgtagtggtgtgattttgatttattgtaatttttattttttgggtttaagtgattattttgttttagttttttaagtagttgggaatttaggtatttattattatgtttggttaattttttattttttagtagagacggggtttagtagcgatggggttttattacgttggttagattggtttcgaatttttggttttatgtgatttgtttattttaagattataggtgtgagttattgtatttggttatgattgtatttttttttgttttttttgaaattggttgatagaagttatagtatattatagatattataaggtttttattttggtttgatgtttatttgtatatttttgtgagttgttgaggatgttattgttttttaatagaataattttgttttttttttttagtttttttattttggaatggaagtaagattattatataagagtttgtgtttttttgtagttattattagtatttgatttgtttatttttagatattaaagaagtgattaaattaataaatggtatagtttattataatttggattttttaaaatattttttttggttattttttttgtatttggaacgttgtagatatgtagtaattatttgtaaaatatattaacgttaaagagttattttgtgtaaatatttgtaagaaggttttatgggtttgggttttgtttttttttttttttttttttttttttttttaagagatagggttttattttgttatttagtttggagtgtagtggtataaatatagtttattgtagtttcgattttcgaggtttaagttgtttttttattttagttttttgagtagttgggattataggtgtatagttaatttttgtagagatggagtattattatgttgttttagttggtttcgaatttttgggtttaattattttgtttgttttagttatttaaagtgttgggattataggtttgagaagattattaaaaagatatgatttgtaggtttttattgaggattatttttttttttaggttattaatttggagtgtaagtgtgtgattttaggtaaaggataattatattatgttgtttattgtgtgattttaattcgtgttgtttttaatttagtatgtagtgagagatgtattgggattgtatttaggagggaaatagataaggttaagtagttgggttggggagaaagaataaggtcgattagttttttttattttaattgggttagcggttaattatattttaattttttttacggtaaagataaggtatatttttgttaaagatgattgttattaagtttattgttttaaaagtaaagaggaagaaaataatacgggaagaaggttttgtagtagaattatttttttttatgaaggggtttttggagaacgagggatatataggagaaatatagtgatgaataaattgtttttagaaagaaggtgatggtagaagtatagtttttagttgaagggtaaaataagtgttatattttattttgaattttagggtttagattagtttggtttgtagttttttattagtttttttttttatagttttgtttttttttttttttttttttttttttttttttaagaaataggtttttttttgttatttagattggagtgtagtggtgtgattacggtttatagtaatttcgaattttaggatttaagtagttttttcgttttattgatgagtagttaggattatagacgtatgttatcgtatttagttaatttttttattttttgtattttgtagagatgggggttttattgtgttgtttaggttggttttgaatttttggttttaagcgatttttttgtttcggttttttcgagtgttgagattataggtgtgagttattatttattatttaaagtatgatatttttttagtatttttgtatagtattgagtttaagaagttaaatttgattaaggtgtatgtgggtagtttgggtttggtttatgaaaaatttgagttttatttttgtgagttgtaggtgtttttttgttttggatattttgtttgaatatagtatatattggaggatttaggatgtggaatatgatttatttaggagttagttgagaaagtgtttattaattttttaattttgtgtttttagattaattgtttaatttttaagttgttgttgttatttttttttttttttttttttttttaattttgtttgttttttagatattttcgaggataataagaaaatagttatgaatgttttttagtttttaagggagggtataatagtgggaagaatttggtgattttaaaaattaattaattaaaattaaaagtttaagttttagagatgtttttttttttaattgttattggaagattttaagcggagattgttatgtttttatttttatattttaatatttttgaggatagtagattgatatgggtatttttggaggtaggggaagattgtttgggagattttttatagttatttaggtgagaaattataagaggttgaattaaggttttggtttagtggggttgggaaaatggcgatgtgttaagagattataaggattgtgtaattgtaagatttttaaaaagtatttttattgttgtaattttagtgtttaatataatgtttgagatattagatagtttgtaaatgttattttgagttggatgaatttgtgatttatttagttagatggaaggtgtagaagaaggagatttttggtataggtgaatagatggggttgttattaaagtgagagagaggattagttaggaggaggaatgaagagttagattagttttatgtttaagatttaagtggtttttgagatatttgagtggaggtgtataagtttagagttttagaagaagagttggtttggaaagatagatttgggagttattggtttgttgtgggagtggatgatattgtttagggagagtgtaagcgaagggaaaaagagaagtttggaattttggatattttgggtaatattagtatattgggattggtaaaggagaagttgaatgaagaagtatatttaaggagttagaaggaaaattaagagagtaatgttttttaagttaagggagtttagttttaagaaggttagagatgtttgatgttgttaagaggttttagaaggagtgagtggtttttattagttttttgatagttgggatttttgtttgttttgattattgttgtatttttagtatttataatattttggtatatagtaagtatttagtaaattattgttgaatgaatgaatgaattgaaaagagttttttgaatttggttatagaattataggattttggtgaagttattttgagagaagtggtggtgaaggaagttagattatagtggattgaggaatagataggttgtaaggaagtagttataaaatattaagtatgattaatattatgagtatataggaggtattaggtattgagttaagtattttatatgtattaatttatttaatttttttagtagtttaattatataggtattatgatttttattttatagttgaggaaattgtagtttagagagggtaaataatttgtttagagaaggtttgtagttagaaagtgttagaattaagatttgaatttagatttgtttttttttggagtttaggtttttagttgtttaggttatattttttttagggagtttttgtggtaggaaggtaaaagaaagagtaagtgaggttaggaagattgtaaatattttaatgttgatgagagttgaaagaaataatttgaaggttttgggaaaaggggaaataatttatataagaggagattgagaagagttttagagtataggtaaaaggaagttttttttattaaggtggaggtttaggagagggtataggtaggtgtgtgttgtagatatttttgttagcgaggagaggggaagagggtagggatagttgaaagtttttttttgattgtttgttgagtataagggaggtggtgattaagtagatttgaggaaggtgtagagaatagaatgaagtaatgatggagatagaagatttttagggtagtattaagggtttagttaagatggagattattattttgtagtggtttagttttgttgttttgtgattttttttttttttttttagtagggtatagtagtcggggttaggggtatagtaggtagatgttagattgatttagggttgaaagttttgtttattggttgtgatagaagaaaagagatagatcgttgggagtattggttagattgcgtttgaggtgatgaattattatatgtaggttagtagggaaggaagtaagaatgagagaagattgagaatagaagggaaatggaggggttatagtattggagtttggagaaggtttaatagtaggattttggtgatagagcgtttttgttattagaattttatgtttagaggtgatttgtttgtgatgaataaggtaaaattattttataaggtattataggggtagaaaattattagtgatgtttgtttttttattgaggggattaaggaagggtattaaagatattttttttttttaatcgtaaatattttttattgtttggtagtattgtttgattttttttttaattagtatgtattatttttttttttttttttttttttttttttgagatagttttattttattgtttaggttggggtgtagtggtgtagtttttgtttattgtagttttcgttttttgggtttaagtgatttttttgttttagttttttgagtagttgggattatagggtttattattatgattagttaatttgtttgtatttttagtagagatagggttttatcgtgttggttaggttggttattaattttcgattttaagtgattcgtttgttttagttttttaaagtgttgagattatggatttgagttatcgtattaggtttatataattgttttgattttaaaaaaagatataaagtttttagtgaatttaaagagaagagtaggtttatatgaaagtagggagatgagtgagttgtagaggtagtaggttgtggttttggaatgggattttggagtgtattatttgtttatggaattataaggttttagatttgaagaggagtagttggaatttggttttattttgttattgtttatagggaaggaaatgggagttttgagatttgtttagtttggtagtagtaaaattagaattagaagtaatttgttttgattttttagttttttggtttgttttttatgttattttttaagttttggaggttttttaattttttgttgttttagttagatttatggtatatgtgtttatgatattgttggttgatcgggttgtttgttatattgtgttttttatacgttggtgttttttagtgtttagggtgtgggcgggtgtgtgtagaggcggttgtattattgttttttgtttattttttgttttttttatagttaggtaaagtagtaatttggaggcggaaaattatagtggtgatattttatttatattttttataatgatttagtgttttttttgttttgttagtttttatgttgttgttttttttaaatattttttttataatttgtttaaatagtagttatgttttcgtatttattttttttagtttaaatttagatgagttattgagagaatttcggatagggattttttattatgagattgatggtagggagtggaagaattgtaattttggagaaatagtttttaaattaggggtattgttttgggaaaaaaagtgtttttttatttagtagatttgtaaaggagtttgtgattttttaaaagattatagatttagggagtatagtgtaggtgttttttagaaaaataaattttttaaaaatcgaaagattaggtatttttttgttttttaagtaatagtttagataaatttggtgtttgtgtggttttttttattttgttatgagggtagcgagttatggtagttgtatatggattagttgtgatttttttttatgtggtaggttgagttttagaggattagaattaaagtttaggatttcggttgttttttggatggttgtttgggtagatatgtagatgaattttttatataatgatattggggttttatgatgtgtggggttgggagtgggggtaagaagttagaggatggggtatagtttttttttatttttgtttttaggttaagtttttattggtttttttgtagagttttttgtggagatgggtttgtagtttgtttgtttggatggttttgtagattttgttttgagtgtggtttttgttttgaaggtttgtttgtttttttgtgttgtaataatgtagttttagggtttaagtatggagttgtgaattgatttggtttagagttgttttagatttttttttttttgtagaatgtaggtaggtattggtgtggggatttagggtatttattggtaagggaaagaatgtgttgtttatgatggtaggaaaggtttttttattggtttgttttttggtagattaaagagttgagatatagttatgtggtagtgtttaagaggtttgagtaggttttcgtgagatgatttgagcgtttggattttttttgtttggagatgggtaatatttgagattttagtttggttttgaatttttttattgttttttgttaggttattttatttttgatattgtagtgttataagaagttatggatgttgtgatgttagtgggatgaatatggttttaggaaagaatagaatagagaggggtttattaagttaaggtttggggttataatattagagttattttgaaaattatagggaagaattagtaggagggtgagaagagatagtgtatttatattttggttttggtattttttttgtatagataagggtttgtaaagttatattagatattatgttggtttaattttttattattagggtaaaatttattttggatagagaatttgtttgggaagaggaaggaaggaagtaagatgggtgggtgattttgattttttttgaggtattagttgtattattttaggttttttttgtttgatttttttgttatttgttttattagtttttaggtttttgtaaaattggaaattttttatttggagtttttaagagtagtattatttaatatgttaatttttaatgagataagaagtatatgtattagaatgtaagattgatttttttattaagaaaattttgtatgaaaaaatgttagaattagatagtgtgtttattttgatataattgatttatatttaggttttatataagttttttatatagtgattagttagtaatatagtttgtaaattggtagttaatttgtagattatatttggagtagtagtgttttagagttgttttttatttagaagtagttgttgaggttatggagttgtttgtttggtataggttaagggtagttagaaatatagagttttggttaagaagagttgttatttagagtatttagatatgggttagggtagttattgaggagaagaggggtataacgagagtgagatagttgaatagatgattaggtattgtttatgttaagggtaaatgttatgtttttttttttttttattataggcgtgtgagttgagggattagagttagggttttggttttgtttgttgtttttaatggtaggttggtcgtattaagtttattttgtttttttagg

SEQ ID NO: 860 - DNA, 16439 bp, Artificial Sequence
  chemically treated genomic DNA (Homo sapiens)
tttaggaagatagggtaagtttggtgcggttaatttgttattagaagtaataggtaaaattaagattttagttttagttttttagtttatacgtttgtggtaaaggaaagggaggatatggtatttatttttggtataggtagtgtttgattatttgtttagttgttttattttcgttgtgttttttttttttttagtagttgttttgatttatgtttgaatgttttgggtgatagttttttttaattagggttttatatttttgattgtttttggtttgtattaaataaataattttatgattttaataattgtttttgaatgaaaggtagttttagagtattgttattttaagtatggtttgtagattagttgttaatttgtaaattgtgttattggttggttattatatagaaaatttatatgaagtttgaatgtaaattaattatgttagagtaaatatattgtttagttttaatatttttttatataagatttttttgatgaagagattagttttatattttggtatatatgttttttattttattgaagattggtatattaagtagtattgtttttgagggttttagatgaagggtttttagttttgtaaaagtttaggagttaatggagtagatgatagaaggattaggtagaggaggtttgagatgatgtaattgatattttagagaagattagggttatttatttattttgttttttttttttttttttttaaataggttttttatttaaggtagattttattttaatagtggagggttgaattaatatagtatttaatatagttttatagatttttgtttatgtagaaaaaatgttaaagttaaaatatgaatatattgtttttttttatttttttgttggtttttttttgtgatttttagggtggttttggtgttatagttttaagttttaatttaatgaatttttttttattttatttttttttggagttatatttattttattggtattataatatttatgattttttatggtattataatgttagggataggatggtttggtagaaggtaatgagagaatttagaattaaattggaattttaaatgttatttatttttaggtagaaggaatttaagcgtttagattattttacggaagtttgtttagattttttgagtattattatatggttgtattttagttttttggtttgttaagaagtaagttaataagggggttttttttattattatgaataatatatttttttttttattagtaaatattttggatttttatattaatatttgtttatattttgtaaagaggagggaatttgaggtaattttgggttaggttaatttatagttttatatttgaattttaaaattatattgttataatataaaaggataagtagatttttaaggtaaagattatatttaaggtagaatttgtagggttatttaagtagataggttataaatttatttttataggagattttatagggagattaatgaggatttaatttaggagtaagggtgaggaaaaattatattttattttttgattttttgtttttatttttaattttatatattatggagttttaatattattgtgtggagaatttatttgtatatttatttaggtagttatttaaaagatagtcgaagttttgagttttagttttaattttttggggtttagtttgttatataaggagaaattataattaatttatatgtaattattatggttcgttgtttttatgataaaataagagaggttatataaatattaggtttatttgaattattatttggaagatagaaaaatatttaatttttcgatttttaaaaaatttatttttttaaaagatatttgtattgtattttttaaatttgtagttttttggagagttatagatttttttgtagatttgttgaataggaaaatatttttttttttagaataatgtttttaatttaagggttgtttttttagaattataatttttttattttttgttattaattttatggtgaagaatttttgttcgaagtttttttagtgatttatttgggtttgggttgaaagaagtagatacgggggtatggttgttgtttaaataaattatgagagggatgtttgggggaggtagtaatatgagagttggtaaaataggagggatattaggttattgtaaaggatgtaaatagggtattattattgtggtttttcgtttttaagttgttattttgtttggttatgaagagggtaggaaataggtaggggatagtagtatagtcgtttttatatatattcgtttatattttgaatattgagaagtattaacgtgtgggaagtatagtatggtaaatagttcggttagttagtaatgttatgagtatatgtgttatgagtttggttggaatagtaggaaattgagaagtttttagggtttaggaggtagtatgaaaaatagattagagggttgggaaattaggataggttgtttttggttttggttttgttgttgttaagttgagtaagttttagggtttttatttttttttttgtaaataatggtagggtgggattagattttagttatttttttttagatttaagattttgtgattttatagatagataatatattttagggttttattttaggattatagtttgttatttttgtagtttatttatttttttgtttttatgtaaatttatttttttttttgggtttattgaaaattttgtatttttttttaaaattaaaatagttgtataggtttggtgcggtggtttaggtttatgattttagtattttgggaggttgaggtaggcggattatttaaggtcgggagttagtgattagtttggttaatacggtgagattttgtttttattaaaaatataaataaattagttggttatggtggtgggttttgtaattttagttatttaggaggttgaggtaggagaattatttgaatttaagagacggaggttatagtgagtagagattgtattattgtattttagtttgggtaatagagtgaaattgttttaaaaaaaaaaaaaaaaaaaaaaaaaagagtagtatatattggttaaaaaaaaaattaaatagtattattaaatagtagaaaatatttacgattaaaaaaaaaaagtatttttggtatttttttttagtttttttagtaaagagataaatattattggtagttttttatttttgtagtattttatagagtaattttgttttatttattatagataggttatttttggatatggaattttaataataaggacgttttattattaaagttttattgttgaattttttttagattttagtattatgatttttttattttttttttgtttttagtttttttttatttttgtttttttttttgttggtttatatgtagtgatttattattttaaacgtaatttagttaatatttttaacgatttgtttttttttttttgttataattaatgggtaaaatttttaattttggattaatttaatatttgtttgttgtgtttttgatttcggttattgtattttattggagggaagggagaaaaattataaaatagtaggattggattattgtaaaataatggtttttattttggttgggtttttgatgttattttgaaaattttttatttttattattgttttattttattttttatattttttttaagtttatttgattattattttttttatgtttagtagataattagaagagaatttttaattatttttatttttttttttttttttcgttgataaaaatatttgtaatatatatttgtttgtatttttttttggatttttattttgatggaaggggtttttttttatttgtgttttggagttttttttagtttttttttgtataaattattttttttttttttaaagtttttaaattattttttttaatttttattagtattaaaatgtttgtaatttttttggttttatttatttttttttttgtttttttgttataaagattttttagaggaaatgtagtttgggtagttaaggatttgaattttaaaggaagatagatttggatttaaattttggttttaatattttttagttgtaggttttttttaggtaagttatttattttttttaagttgtagtttttttaattgtaaaatagggattataatatttatataattgggttgttgggaaggttaaatgagttaatatatgtaaagtgtttagtttagtgtttggtattttttatgtgtttatgatgttggttatatttagtattttgtagttgtttttttataatttatttattttttaatttattataatttggttttttttattattattttttttaaaatggttttattaaagttttgtggttttgtaattaaatttaagggattttttttaatttatttatttatttaatagtaatttattgaatgtttattatgtgttagggtgttgtaagtgttggggatatagtagtggttaaaatagataaaaattttagttgttagagagttaatagaaattatttattttttttgggattttttgatagtattagatatttttgatttttttgaaattaaatttttttagtttaggggatattgtttttttggttttttttttaattttttgaatatgtttttttatttaattttttttttattaattttaatgtattaatgttatttagggtatttaaggttttaaattttttttttttttttcgtttatattttttttagataatgttatttatttttatagtaggttaatgatttttaaatttatttttttaagttaattttttttttggagttttagatttgtatatttttatttaaatgttttaaaagttatttgaattttaaatataaaattaatttaattttttatttttttttttggttgatttttttttttattttgataatagttttatttatttatttatattagaaattttttttttttatattttttatttaattgagtagattataagtttatttaatttaaaataatatttatagattgtttgatattttaaatattgtgttaagtattgagattataatagtaaaaatattttttaaaagttttataattatataatttttataattttttaatatatcgttatttttttagttttattgggttaaagttttaatttagttttttgtaattttttatttggatgattataaaaaattttttaggtagtttttttttgtttttaggaatatttatgttaatttattatttttagagatattagaatatgaagataagagtatgatagttttcgtttaaaattttttaatggtaattggaaggaaaggtatttttggggtttggatttttaattttaattggttaatttttaaaattattaagttttttttattattatatttttttttaaagattgaaaaatatttataattatttttttgttattttcggaaatgtttggaaggtaggtagagttaaaaaaaaaaaaaaaaaaaaggaagtagtagtaatagtttggaaattaggtaattagtttgaaggtatagagttaaggggttaataaatatttttttagttgatttttgaatgaattatgttttatattttgagttttttaatgtatattgtgtttaaatagaatatttaaagtaggggaatatttatagtttatagaaataaaatttaaattttttataaattaggtttaggttatttatatatattttgattaagtttagttttttggatttagtattatatagggatattagaaaagtattatgttttaggtaataaatggtggtttatatttgtaattttagtattcggggaggtcgagataagaggatcgtttgaagttaggggtttaagattagtttgggtaatatagtaagatttttatttttataaaatgtaaaaaataaaaaaattagttgggtgcggtggtatgcgtttgtagttttagttatttattagtgaggcgggaagattgtttgagttttggagttcgaggttgttgtaagtcgtgattatattattgtattttagtttgaatgatagagaaagatttgttttttaaaaaaaaaaagaaagaaaagaaaagaaaaaaatagggttgtgagaagagaggttggtggaagattgtaggttaagttaatttaggttttgggatttaaaatgaaatatgatatttattttgttttttaattaaaaattgtgtttttgttattattttttttttaaagataatttatttattattgtattttttttatgtatttttcgttttttagaaatttttttatgagaaaaagtaattttattataaaatttttttttcgtgttgttttttttttttttgtttttaaaataataaatttagtggtaattatttttggtaggaatatgttttgtttttgtcgtgggaaaggttaaagtatagttagtcgttagtttaattaaagtggagagaattaatcggttttattttttttttttagtttagttgtttgattttatttgttttttttttagatgtaattttaatgtattttttattgtatgttgagttaagagtagtacgagttgggattatataataagtagtatagtgtgattattttttgtttggaattatatatttatattttaaattggtaatttgaaaggaaaggtaatttttaatgaaaatttgtaaattatatttttttgatgatttttttagatttgtaattttaatattttgggtggttgaagtaggtagagtggttgagtttaggggttcgagattagttggggtaatatggtggtattttatttttataaaaattagttatgtatttgtagttttagttatttaagaggttgagatgggaggatagtttgagtttcggaggtcgaggttgtagtgggttgtgtttgtgttattgtattttagattgggtgataaaataagattttgttttttaaaggaaaaaaaaaaaaaaaaaaaaggaaaataaaatttaaatttataaagtttttttataaatgtttatataaagtagttttttaacgttaatatattttataaataattattatatatttataacgttttagatatagaagaaatggttaaagaaggtattttaggagatttagattataatgaattatgttatttattaatttagttatttttttaatatttgaggatgagtaaattaaatattgataatggttgtagaaggatataggtttttatataataattttatttttattttagaataaaagggttggagaaggggggtaggattattttgttgaaggataatggtatttttagtaatttatagggatgtgtaggtgaatattagattaggatgggaattttataatatttatgatatattatggtttttattaattagttttaggaaaagtaaagaagaatgtagttatggttaggtgtagtggtttatatttgtaattttgaggtgggtagattatatgaggttaggagttcgagattagtttggttaacgtggtgaaattttatcgttattaaatttcgtttttattaaaaaataaaaaattagttaggtatggtggtgggtgtttgaatttttagttatttgggaggttgaggtaggataattatttgaatttaggaggtggaggttgtagtgagttaaaattatattattgtattttagtttgggtaatagagtaagattttattttaaaaaaaaaaaaaaaatgtagtttaatggtagaattagatttagttattttatttggaaaaatttggattttattagttttattaagtattatgttttatattatgtttattaaatgtttggagtaatattagatgggtgttattttaaattttaaataattatatttttgttttgtaaataggatgtggtttaataattaaatagggaattagatttatttaagtatttagtttttaaaataagtttatttaataggtttaataatatgtaatatatattttttaattggtagaaatattttttaatgataaagaaaggtggtaaatattaaatatttttatagattatttagtaattggtgggattaatttttgaaggtgaatttaaaatagaattgaattttaatattagattttttttttagaaaagggagtatgaatttttagttttaggtttagataaaaattagaagttgtattgtattaggaaaaatattgggttggttaggtggtttattttattttgtaattttaggattttggtaggttaaagtagggggattatttgagtttaggaattggagattagtttgggtaatatggcgaaattttatttatagaaaatataaaaattagttaggtgtggtggtatgtttttgtggttttagttatttaagaggttgaggtggggagaattgtttgagatcgggaggtagaggttgtagtgagttaagattgtgttattgaattttagtttaggtgattaagtaagattttgttttaaaaaaataaaaataaataaataaataaaatttattggtttagagtttataaataagttgtttggaggaagaggatggaaatttgttagttaagatttaatttgtatatgttgttttttttattaaaattagatttataaagaaatgtattttggttttagttttgttggtattgttttatttttatttgttttttatgttattgttttatttttgtttttgtagaattaggattttagtttaaagttatttaaaagtttttataggaaattatattttaaagggaagattttatgggaagagtaatagagaaagaagttatttttaagtttttggtaatgtttatttaatttagtttttatttttttttaatggataagaatttttaattaataaagttaatgaatttataggaaggtaatatatggaaataaatattttattgaatttatttggttttaaattttttttgttagggaatttatagtattttattattttataatttttttatttttatttatttgattaaattatggtgttatagtaatggaggtgaaggtttaatttagaagtataggaattaggtatggcgcggtggtttatgtttgtaattttagtattttgggaggttgaggtgggtggattatttgaggttaggagtttgagattagtttggttaatatggtgaaattttatttttattaaaaatataaaaattagttgggcgtggtggtaagtacgtgtagttttatttattcgggaggttgaggtaggagaatcgtttgaatttaggaggcggaggttgtagtgagttaagatcgtattattgtatttagttttagtgtaggttgagtgataaagcgagatttcgttttaaaaaaaaaaaaaaaaaggaaaggaattatttttatgtatataatagtaggaaataatttataaagtttttgagaattttataatttattgtgtatttttttttgttttatattttcgtaattgaattatagagtttaggtttaggttttaagattttttttgtaatttttagagtgtttagtattgggattgatatatattagttagacggatttttttttttataaattaggtttaaatttttttaaattaaaattaatatattttgagtgttaattttgggtaaggtattttattatttgttatgaaggatttagaggaaaatgtgatttattatatttaatagtaggttttttattttttttagtttaatgtattttattagttaaggattattttgatgttgagattgtgtttttttttttaaattaaatgttattttttaagggttatttgtataattaaatgtttttaattttatatattaaatgataatttttgtgaaagtaatttaaatatatttgaaatattatataaaatattattataagatttaatcgtaaatgtggtttttatttttataatatttatataatataattaaagagttagattttagattattaagaaatttttaaattttgaatttatgtagtagaattgtatttttttatattgttggttcgatttataaatgtgttgtggaataattatttttaaatataatttttagtattgattatatagttgtttaaaagaaaattgttagttttttttattttatgtgaaattaatgtttaaagcgtttttgattttttaattttatattttttttatttttatttttttttaatttttagtttttatttattatatttattagatttgaattttgaatttaattataattttttgtgtttttgtttaagtttttttttttgtttggaatattttttttttagtttcggttaattatatttattattttattttaagtggtcgttggaaatttatttttttatgttttatgattttttttataatttatattttttttggttttgttttgttttgtttgggggggggggttgtttttttgagagggagttttgttttgttgtttaggttggagtgtagtggcgcgattttagtttattataatttttattttatgggtttaatcgatttttttgttttagtatttcgagtagttgggattataggcgcgcgtcgttacgtttggttaattttttgtgtttttggtagagacggggttttattatgttggtcgggttggtttcgaatttttgatttcgtgattcgttcgttaaatattttatgtgttagaaatttgtatgtaattttgtatagtttttgtattatgtttttttaattttgagtgttttttttggtttttatttagtttttgtttatagttttattaggattttggttagtttgaatacggttagaaggattattttagatttttgttggtatagtattttttataaattaattttttgattgaatcgtagttttatagtagttatttttggatgaaaatttaatgtagttcgaggaggaagtggagtgtttgtgattagagggttggataaaagtttatagggcgtttttggagttttgggggaattgtttttaggtaggtatttttagggtttaggaatagggcgggataagttcgatttatttgtgaggtaaggacggggttaagattcggaatcgaaaagtaggttacgatagcgttggaaggtttcgtcgaggattgagtagtcgggttgcgcggtcgagttgatatcgtattggaattgaaagttgttcgggtaaaggacgtagcgttggtcggaggtttggaagttttgaggttagggttagagggtcgtcgttcgttttgcgaacgttgtcgttagtagtagcgaaaattaaagtttggagtttgttatggttcgttggttttttttttcggagggggttggttacgtgagattttggttaggtgagcggcgttttcgtgatttatcggcgaattacgtgattagaggcggttttgcgtttgcgattttaggaggatttatattttgtttttttattttcggtttggatttgagggtttttgttacgtgtagcggattgtgtcgggcgtcggtaattgttcggttcgttagattgtttacgggtttagtagagtagtaaataatcggttatttttgcggtcgtgtcggtcgtgatggaattagatagtttattcgattcgagaagaacggggtggggaggcgaggacgtagggcgatttggagaagaaagttttttagatggttttagggtgaattttgaatgttgtgatgtagttcgttaggtttacggggaggtaaaggatttgttaggttgaagtaattttagaagtagaaaaacggaggattaaaattataagtcgttgtgatgtgaaatttcgtggggtaagaaagggtcggaagtaggtagtttgtacggttttgttagagagaggattataagattatataaatgtgatttatttatgattggaaaaaatgtgtatttttagagttagtttgaggtattttattgtttttaatatgagtttttttttttaagattgattataaattttttagttataatttatattttttttttttagataaaattttatatagttcggtgtgtatttattgaaagtagtaagatattgttggggttttgggtgtaagatggagagtgtttagagataatgataggggtttggttttgtagggttttacgtagaaagttaaggaatttattttttgagtaattgaaaattatttcgaaagatttgtattttagaaatattatgttgagtagttgtataagaaattagttaggaggtttttttttattggaggtagagaataatgagagattgaattatagaagtggggaaggaagatagttgtagatttaagaaatagtattcggaagagaggtttgagaagtgattaaggagaattttatagttattagagattttgttttttttgtttattattatattattagaatataatataaataatgttattgttattgggtggtattatttggttagtaggtattttttaaaatttttaaatttaattttagtattaaaatatatgtaaagattaggaaaatgaatttttaaaaataaagggtttttattgggtatgataatatatttttgtagttttagttatttttagttatttaggaggttgaggcggtaggattatttgaattaaggagtttaagtttagtttgggtagtatagtgaaatttttttttaaaaataaataaagggttattgaaataatgataatttatatttaggtcgtaggtatttaattattagttatatatatatggttttgatgggaaattaaagaaatattttgataatatagagatttattaagtaatttgtttttgaaagttgattatttaaaaatagagtttgtagtaaaagaagtagaaattagattttatagttattaagttttagattttaaggtttgtatttttatattaattttttttttgtttaaattttaatttttattagtattaattaagtgtttgggtattttgttagttaggagagatgttattaaaggtataggatttgagaagtattgttagaagagttaagtttataattaggtttataggattaataatttgggggagtgtttagagtagttttaaagatgagagtagtagattaaagtagaattttaggattgagtatatgttaaggtatttttttatggatatttaatttgtattagaagggaggagttatttatttaaaagagttatataagatgaaagagttagatttaaataaagacgttataaaaattattaatggggttgagtatggtggattatagggatttagttatttaattattattgaaagagtttttttagatttaattagatttttaaattaaatatttttatgtatatataaaagtaagttatataagataaatttgttgattttttaaaatatttttttttattatatattagagtggggttttggtataatggtagataaatagatggaacggaatagagggtttaggaaaagagttatttgattattattttattttaatgaagatattaatttaatttagtggggaaggtaagttatttttaataaaaggtgatgaagaaaatagatatttttatgtgggaaaaatgaattatgattttttattttatagtatatataaatttaattaaaaatggattataggttggggatggtggtttatatttgtaattttagtattgtggaaggttaagatgggaggattatttgagtttaggagtttaagattagtatgggtaatacgaggaaattttatttttttttattttttttttttttgagatgggggtggttaatgggtataaaaaaagtagtttgaataagatatattattcgagagtataatagggtgattatagttaataataattgtatattttaaaagagtgtaattggattgtttataatttaaaggataaatgattgagggtatggataattttattttttatgatgtgtttattttatattggatgtttatattaaaatattttaggtattttataaatatatatatttattatatattaaaaaaatttaaaattaaaattagattgggtatggtagtttatgttttaattttagtattttgggaggttgaggcgggtgaattattttaggttaggagtttgagattagtttggttaatacggtgaaattttatttttattaaaaatataaaaattagtgtggtggtaggtatttgtaattttagttatttgggaggttgaggtaggagggttatttgaatttgggaggtagaggttgtagtgagttaagattacgttattgtattttagtttgggtggaggttttgttttaaaaaaaattaaatttaaatttaaaaatgaataaatagtttttaataatatgaattatttaaattagtatatatataatattgttattaatttggatagtagatgaatataaaaaataataatatattgtatataatatttgatggttttttttttttttttagttgttaaatgattttttattgaaatatttttttttgtgtttaattagttgggtattttatagtattattgttgatgttatttatgatgttatgagggtgttggttattaatattatagtttatagattgggtagtttttaggatttttttaatggttttagagagttttttggttaaggattagtgtcgtatttgttgagtaatgttgacgattttattaaaagtgatatttttattgtgtttaatgtttttttgtttttttttttttcggtggttttttgagggttttgatgattagagtagaggtagaaggtattattttaatttgggtttgtttgttttgagtggttagttttattgtaatttttaggtttttttagttattcgttgttttggtaatgttattattaattttttttggagatagatttagggggtcgattttgggggttagggtagaagtggtatcgattttatttttagtgtattttaggtatataattttgatttcgttggggttaaattttggcggtatggtggaggtagttggtgtcgaatgaattcggattcgggatgatcgaagaaagttgtattttggtttttttcgagttaaaagttgagagttattttttttttattaaaggtagtttgttaaatgaataaaaatatgatttaatttttatatttatagtttttaataaaattaatttatatattagaaaaataatttattgttagataatgtgtttaggtttttggtttataaattaagggattagaaagaagtaggaaataaataatttgttttaggaagttttttataatggaggtgaattttgaattgatttttaaagtatgagttagttaggtagggaaggggagtataggtaaagtatagagatgtgaaagagatgatatattgaataaagggtttatggggttagtaaaagaaaatgtgttacgattattttattttttggttttttattatatttttttttttttgtaatgttttttttattttttaatttttttatttatttgaaggtttaaatttatattttattattttggaaatttttgattttttaaatttgggtaagatttttttttgtgattttataattttttgagttaattttatgtatttgaaagtatagttgatttttgaataacgtgggtttgaattgtattagtttatttatatatagatattatgtagttaaaggtagatggaaaatatagtgtttttgggatgtaaattttatggatatggaggattatatgtaggatttgagtatgtgcggagtatatgtagattttggtatttttggaaggttggggacgtgggggaggcggtttttggaattaattttttgagtatattagggtatggttttattgttattgtttgtttatttgtttgtttgttttattatagtaagagttttttaagggtaggttttgtgtttattagtttttggaatagtgtttagtatatagtaaatgttttttagtatgattttatttattttaagagtattttttggttaggtacggtggtttacgtttgtaattttagtaggttagggtttgaaattcgtgggtttaagtgatttttttattttagttttttaaagtgttgggattataggtatgagttattgcgtttggtttagtattttttgaattttttattggtgtgttgagatagttagttttttaatttttggggtggtagggtttggggtagttagatattttggcgagttatttgtagttaagagtagtttttt

SEQ ID NO: 861 - DNA, 9145 bp, Artificial Sequence
  chemically treated genomic DNA (Homo sapiens)
tgtttataaggtgatattaagagttatagggaattatttttagtttttgaattcggattaaggaattttaatatttgtttggttggattttggaattgttatagattcgttgttgttttttatttttttttttttgaataggaatgtttatagtggttattttatatttgtttattattgtatttttgtgtcggggaggagtgggaggtagataatttgtatttagtttataggtttttatattaagaggaattgtatttgaagaattttaaggaattgtattttaggaattttatttatatttggatgtaatttatatgttaatattttggattttaagttgtttttttaaagggatgagatttttggggtttttgggagaaagggaatgtgttttgtatggaagaaatagaaataatttgtggttagaaagtatatttttttttttaaaaggtggaagttaatttttttttttttgaatgtgggaaaaataaaagtaagggaaaaataatagtaggtatatatgttaggattttattttggggatatttagtatatagtgtatttaggtggagaaatttgatttagattttgattagattagtaggttgatggtttttaattaaaggtttgattttattttatagaaagtaaaaatttagtgatgtattttaagtaatggtgttatatgtttagaaaggtttttagggaaattagatattatataaatgaatttagtggaaatatatttgttgtaaatttatagtggtttatttttttatattttagttatttggggaaattttgttttagttttatgttgttttaattttatgcgttagttttaattagttgtggtatcgtgagtaaattatttagtttttcggggttttggagttttaatatagttttttaaaatggggataataaaatttattttttaagttgtttggggataaaataagaggatgataataatatgtttggtattttgttgttggtgaataagttgtagtgattattatttagattaatggagtttaataaggtgatatttggtaatatttggagatatttatgttttttattattgaggtttaggggttgggggtggtgttattgacgattagtgagtagagtttagttgttattaaatattacgtaatgtataggatagttttttagaataaaaaattatttagttaaaaatgttattagtgttgaggttgagaaattttgatttaaaatataatttaagttgggtgtattggtataggtttgtagtattaattatttaggaggttgagatatgattgtttgagtttaagtttaagtttattttgagtaatatagtgagattttatttttaaaaaataaaatttaatttaattatgagtatgttaatattgttttcgtgttatagtatttttttaaataatgagttagagttaataacggggtgtaataaaaaagagatttgatagttttataagattttagggtttggtgaatgtaattttaaatttttttgaaattattttttattattttaatttttaaatgtttatagttatttttatcgataatttatttttttttagttttttagtttttaatttttttgtatttgagatttatttttaaatttttcggtgatttatttttaaggaatataatgtggtagtagtgatgtatgttatttataagattacgttatataaaggtattgtggttttttttttgttgttttttttagattatttggttgggagaagttagttgttatattgtgggtatggtaagtaatttaggtttttagttagttgttagtaagaaattgagatttgttgttaatagttatgtaagttaatttagaagtagatttttcggggttgggtgcggtggtttacgtttgtaattttagtattttgggaggtcgagacgggtagattatgagattaggagatcgagattattttggttaatacggtgaaattttatttttattaaaaatataaaaaattagtcgggcgtggtggcgggcgtttgtagttttagttacgtcggaggttgaggtaggagaatggcgtgaattcgggaggcggagtttgtagtgagtcgagatggttttattgcgttttagtttgggcgatagagcgagatttcgttttaaaaaaaataaaataaaataaaaaaaagaagattttttagtattagttaagtttaaagaaaaaaatttttagataattgtaattttatgagataatttaatttagaattatttagttaagatttttaaatttttgaattataagaattgtgagatatttattttattatttatttgttgttgttttaagtttttaaattttggagtaatttgtgatatagtaatagatagttagtatgtaatgtgaagttgtaattaagtatatagtaattgtaataatataaattgatgattgaattttggaaatattatgtcgtgtttttattgatagtaaaaagtggtagtaaagatggatattgtaaattatatttgttttaattataagaataggggagaatagtgtgttattgaagtttttttttatggaagaattttaaatatgtattatgtaggggtggaaagatgtgatatttttttttatttattatgagttatggttgatatttttataataaaagagtagattaatataaggaaagtataatagatttatttaattagttttatatgatatgggagtttttagaatgaaggtttaaagatttaggaaaagttgtttattttgatgtttaggtttgatgtagagtagatagttaggtagaaatgcgattgggtaaaaaggatatgattaatttaatggtaatagagaggagaaatttggtaagatgtgtttgtttaaattttttttggtttttttgtgtggtatttttttttttaggatacggtgtagggttattttggaataaaagttttgagagttattattagataaggtaggttagagaatttttttatggttggtttttatagaaagatacggtaagattagagtaatatttttagattttatgattggttttgggggtataggggttttagttttttttttttttttttttttttttgagatagagttttattttgtggtataggttggagtgtagtggtgtaatttcggtttattgtaatttttgttttttaggtttaagtgatttttgtgttttagttatttaagtagttgggattacgggcgtgtgttagtatatttagttaatttttgtatttttagtagagatgaggttttattatgttggttaggttggtttcgaatttttggttttaagtgatttatttgttttggttttttaaagtgttgggattataggcgtgagttattatgtttaatagtggttttagtttttgtgatttattttgaaaaagaggaattttagtttttatggtttgttttggggaagaaaggggagtaggagaaagaaaggtaggagaaggttagaaagattttttgatttttttttttttagttttaagtatttaatatgttaaagtgttatattttggggttttattttttgaggtttaataattattatatttttttttttttttttttttttttttttaagatggagttttgtttttgttgtttaggttggagtgtagaggtgtgattttagtttattaaaatttttatttttcggttttaagcgatttttttgttttaggtttttgagtagttgggattataggcgttcgttattacgtttaattaatttttgtatttttaatagagacggggttttattttggtggttaggttggtttcgaatttttgaatttgtgattcgttttttttcgttttttaaagtgttgggattttaggcgtgagtcgtcgtatttggtttaattattatatttttttgaagtttttttttaaagtttttttatttttatttttagaatatttatatagtagatttgtggttttggtttgtttagcgttttttttttttggtaagagaatattttttttttttttggtatttttagttcgtgttcgttatgtgattttattggtttttttttagggatgggttatgaaattaaatttgttagttgggattttttatatcgggatttatatagatgagttaagatgtttttttttaggattttttgggtatgttttgttttagggagttttgataggaaggttttattgattatagttgaagtgttgttatagaaaagtttagatttaggagtaaataaatttagtttttatttcggttatttggtggttgggttgagaggagaaaggtgttttttaagtttggtttttttagttttatcgaagttagggatttataggagagcgttcgtgttgatagcgtgagcggcgattcggtgtcggtttggcgtttcgagtttgtgtattgggtcgtttttttttttttttttttttttttttttttttttttgagacggagttttgttttgttatttaggttggagtgtagtggtgcgatttcggtttattgtaattttcgtttttcgggtttaagagatttttttgttttagtttttcgagtagttgggattataggtattcgttattatgttcggttaatttttgtatttttgtagagtcggggttttattaatttggttaggttggttttgaatttttgattttaggtgattcgttcgtttcggttttttaaagtgttggggttataggcgtgagttattacgtacggttagtatcggggtattttttttattttagttatttcgtgtttgaggttgttgtttgggttttgtttttattcgagggtatttttggaggaaattttcgaggtgatttggatagggcgggttgggcgaggacgttttcggggtttggaggcggagtcgggggcgggcgcgcgtagttatttgattcggtgatttattcgcggtcgcgttttttttgattcgggtcgggcgggaagtcgggtttcgaggtttcggttcggtagatcgggcggaaagtagtcgagcggttatggagttgtgcgggttggggttgtttcggtcgtttatgttgttggcgttgttgttggcgatattgttggcggcgatgttggcgttgttgatttaggtggcgttgggttggtgtaggtggcggaggcggttcgggtttcgagcgtttcggttaagtcggggtcggcgttgtggtttttgtcgtttttggtgaagatgatttcgaatttgttgtatttcgtttcggagaatttttatattagttatagttttaattttacggcgggttttttttgtattttgttggaggaagcgtttcgacggtgagcgttttcggttcggtcgggagttgttttgggggaggggagaggcggattatttcggagcgttgtgtagatttttattattttattgcgtagacgagaaatcgtttgggagttggtaggcgatttgtttagcgttatatggattgaatttacgtttttgtttttatttttttattgttttttaagggatattttgggtgtttaggaattttggtttgagagtcggatagtaagtggaagagggagtttgttttgaggttttgttgggtaaatggtatggacggaggggatatcggagttggggaggaaagtgatagttttttatttgaaggacgtgtaaagggataagttattcgaagggtttagataagtttttttgagggattaggaattttttaaagttgattgttatttataggttagtttcgtttttttatttttttttatattttttggtaatagtttaaatggtagaagtttttagtttcgagtattgtttaaaattgtttttttttttaaaattttttttatataaaatgtgatatgtttgtatttgattacgtttttgcggttagtggttaggtagtatttaattttgttttttaatatcgattatgttgtttgttttttttgtttttttttttatagatttttagatagcgtttttgttttttttattttttggttgtagatagggtgagttttgttatgggagttagttaattatattatagataaggtaggtttttttggggagatgtttgaagacgttatatattgtttttttagtgtgagatttgtgtaggtgggattgttttgaaggcgtatcgtgttttgtagaattgtaatttggtgttaattgtattgttttttggtattttttaagtttgtcgttgtatttagtggatattatagagtttaagtgtgtttgtaggattttgaataggtggggagggaatgttaaattaattgaataatgtgttttgattttagataggataggtgtttaggtttaagttgtagaggtttaagatgttgatggtagaaatggtttattttttataattagaaggtttatggtttttttttgttttgtataattaaatgggtattattagtttttattttagatatatatattaatgagtttttggtatttaatttgttaaggttagagtggggttaagatgtagaattaaagtgtttggttgtattgggatatttagaaagattgtatggaaagtatatgaaggttgttttagaagattatgattagggttggaaatttttttaaaaataaatacgtttattatgtttgttttggagtttagtttgtagaattggattttttttttgtgttatattgttaagtaaaataaggatttggtaatatgttgaattgattgtgataagaaagtatgggtgatgtaagttaataataggtagataattaggatttaaattagttgagatggttcgaaggtaaggtttggtattttaaggtatgtgcgggtgattatttgaagagtttgtttaatttatggtttttgagtgaagtagttattaattatgtttggtattattaggaagtaggttataaaatgtgttggtttttatggttaagatttgaaggtatgtatgtgagtattttaggaatttagaaggagtagtaggtattttagagtaaaagtatagtggagttggaaagatttggaaatatgggagtgtttataaagtgcgacgtggttaggaatatatagtttaggttttagattgtttagtattatatagtttttgtttttgaagagtttaggttgtattataaattttgttttgaaatagtatgttttttgtaggtagagagtttggttgttagatgtatagttgtttttttagtttttagaatagcgtttattatatgttagttatttatttttaaaaataaataaatagttttatttttttattttttggaaggttaaattaatttatatatttttgatatattgttttatagttttttgagttttttgttagaattttattatttagggttaaggttttaagttagtttttaattttgattttaaagttgttagtagttttaattttttttttaaaaaaattttaattaaggaaaaaatatatataatataaaatttattattttaattttttgtaagtatgtatttcggtggttttaattttttttttaatttgttagggtttttttatgagaagggtttttaatatttatatttattttatttttttattggttaatttttatatatttttaaatatgttagaatttttcgattttttttgtaaaaaagtataagacgtttttatatataagtagtatatataattttttggtttattaaaatttgtaaaatattatttaaatagttgttttgaagtttatttgattttttttatttagtgtttttatatttttatttaatattttgatttttggatattaaaaataattgttttgaagtttgtttgattttttttatttaatgtttttatataatttttatttaatgtttttatagaatttttatgtatttaatatttaatgtttttataatatttaatgtttttatagaatttttatttaatattttttgatttttggatattaataaaaggtattttttttgtatttaatattaatattaatatttaatgtttttataatatttaatgtttttatagaatttttatttaatattttttgatttttggatattaataaaaggtattttttttttttttgagatggagtttcgttttgttatttaggttggagtgtagtggtgcgattttggtttattgttgtaatttttatttttcgggtttaagtagtttttttgttttagttttttgagtagttgggattataggcgtttgttattatatttagttgattgtttgtatttttagtagagattgtgtatttttagttttattatgtgggtcgggttggttttgaatttttgatttcgtgattttttcgttttggttttttaaagtgttgggattataggtatgagttattgtagttggttaataaaaagtaaattttaaaggttttggtgagaattttggatttttttttggggttttatatgtaagttaggatatttttgtaggaaggtaataggaattttgatttaatttggtttaaataataggaaaatttattttatatattaggatgtttaaaagtagggatgaatttagggtaagttgattaagtggtttaatagtgttattagggatttatattttttttatttttgttttgtttattttagtgtagtggtaattagtttagtttttatatatagagaaacgaagtttttttgtgatttgtttagaattttttttaatttttatattttattattggttagaattggttttttatttttaagagtgatggattattatgatggttttattattggtttttaacggggttttatatgttattttagagtgtggggaagtatttaaaatttttatgtttgaattttattttaatagattttgattttgaaggtatggacgttgggatttttaaaaaattttttaagtgattttaatgtatagtttggggtgagaatttttagttggatttataatgggtagtatggatttgaggagttaattataatgttattagtatatttgttttaaaaatttggttaaaatttttttaaaatgtgtttatatttattttttaaataga

SEQ ID NO: 862 - DNA, 9145 bp, Artificial Sequence
  chemically treated genomic DNA (Homo sapiens)
tttgtttgagaaataaatgtaaatatattttagaaggattttagttaaatttttaaaatagatgtgttagtaatattgtagttaattttttaaatttatgttgtttattgtaagtttaattagagatttttattttaagttgtatattagaattatttgggaagttttttgaaaattttaacgtttatgtttttagaattagaatttattagaatgggatttaggtatgggaattttaaatgtttttttatattttgaagtgatatatgaagtttcgttaagaattaataatgaaattattatggtaatttattatttttgggaatgaaaaattaattttgattagtgataggatgtgggggttagggggagttttgagtaaattataagaaaatttcgtttttttgtatgtgagagttggattagttgttattatattaaagtggatagagtagagatggaaagaatatggatttttggtaatattgttgagttatttggttaatttgttttaaatttatttttatttttggatattttaatgtgtgaaataagtttttttattgtttgagttagattgagttagagtttttgttatttttttgtaaaagtattttagtttatatataaagttttaaaagaaggtttagaatttttattagagtttttaaaatttattttttgttggttagttgtagtggtttatgtttgtaattttagtattttgggaggttaaggcgggaggattacgaggttaggagtttaagattagttcggtttatatagtgaaattaaaaatatatagtttttattaaaaatataaataattagttgggtatggtggtaggcgtttgtaattttagttatttaggaggttgaggtaggagaattgtttggattcgggaggtggaggttgtagtagtgagttaagatcgtattattgtattttagtttgggtgatagaacgagattttattttaaaaaaaaaaaaagtattttttgttggtatttaaaaattagagaatattaaataaaaattttgtaaaggtattaaatattgtaaaggtattaaatattaatattaatattaaatataaaaaaagtattttttgttggtatttaaaaattagagaatattaaataaaaattttgtaaaggtattaaatattgtaaaggtattaaatgttaaatatataaaaattttgtaaaggtattaaataaaaattatgtaaaggtattaaataaaaaagattagataggttttagagtaattgtttttggtatttaaaaattagaatattaaataaaaatgtaaaggtattaaataaaaaagattagataggttttagggtaattgtttaaataatattttatagattttggtaagttagaaggttatatatgttatttatgtgtaagaacgttttatgtttttttgtagaagaggtcggaaaattttgatatgtttggaagtgtatggaagttaattaatgagagaatggaatggatgtaggtgttgagggttttttttataggaaaattttgatagattaaaaaggaaattaagattatcgaaatatatatttataaaaggttaagatggtaaattttatgttatgtgtattttttttttaattaaaatttttttaaaaaagaaattaaagttgttggtagttttgagattagagttggaagttggtttagaattttgattttaggtagtaaaattttaatagaaaatttaaagggttgtgaggtagtatgttaaaggtatgtgggttagtttagttttttaggaaatgaaggagtgaagttatttgtttatttttaaaaatgagtgattagtatgtgatgaacgttgttttagaagttaaagaagtagttatgtatttaatagttaaattttttgtttgtaaaaagtatattgttttaaagtaaggtttgtgatataatttgggttttttagagataggggttatgtgatgttgaataatttggggtttagattgtgtgtttttgattacgtcgtattttgtgaatatttttatatttttaaatttttttaattttattgtgtttttattttgagatatttgttgttttttttgagtttttagaatgtttatatgtatgtttttaagttttagttataagggttaatatattttatgatttgttttttaataatattaggtataattaatggttgttttatttagaggttatgagttaggtaaattttttaggtaattattcgtatatgttttgaaatattaagttttgttttcgaattattttagttgatttaagttttggttatttatttattgttaatttatattatttatgtttttttgttatagttagtttagtatattattaagtttttgttttatttagtagtatgatatagaaggaaaatttaattttataagttgaattttaaggtaaatataataagcgtgtttgtttttaaaaagatttttaattttagttatgattttttgagataatttttatgtattttttatgtaatttttttgaatattttaatgtaattaaatattttggttttatattttaattttattttggttttagtagattggatattaaaggtttattagtgtgtgtgtttaaaatagagattgataatatttatttagttgtataaaatagaaggaaattatgagttttttgattgtagagaatgaattatttttgttattagtattttgggtttttgtagtttgagtttaggtatttgttttatttggggttagaatatattatttagttagtttgatattttttttttatttgtttagggttttgtaagtatatttaagttttatagtatttattgggtatagcgataggtttggggaatgttaggaggtagtatagttagtattaaattataattttgtagggtacgatacgtttttaggatagttttatttatataggttttatattgaggggatagtgtgtggcgtttttaaatatttttttaggggaatttgttttgtttatggtgtgattggttgatttttatgataaaatttattttgtttgtagttaaagggtgagagagatagaggcgttatttaggggtttgtaaaagaggaagtagggagagtaggtaatatgatcggtgttgagaaataaagttggatattgtttaattattgatcgtagaaacgtagttagatgtaaatatgttatattttatatggaagagattttaggagagagggtagttttaggtagtgttcgaaattgaggatttttgttatttgagttgttattaggagatgtgaggagaggtgagggggcgaaattggtttataaatgatagttagttttgggggatttttggttttttaagagagtttgtttaagtttttcgggtaatttatttttttgtacgttttttaaataaggagttgttatttttttttttagtttcggtgtttttttcgtttatgttatttgtttaataaggttttagagtaaatttttttttttatttattattcggtttttaaattagggtttttgagtatttaaggtgttttttaagaagtagtaggagggtgggggtaagagcgtgggtttagtttatgtggcgttgggtagatcgtttgttagtttttaggcggtttttcgtttgcgtagtggggtggtgagggtttgtatagcgtttcggggtggttcgtttttttttttttttaggataattttcggtcgggtcgggagcgtttatcgtcgaaacgttttttttagtagggtgtaggaggggttcgtcgtggaattggggttgtggttgatgtagaagtttttcggggcgagatgtagtaggttcggggttatttttattaagagcggtaggggttatagcgtcggtttcggtttggtcgagacgttcggggttcgagtcgttttcgttatttgtattaatttagcgttatttgagttagtagcgttaatatcgtcgttagtagtgtcgttaatagtagcgttagtagtatgggcggtcggggtagttttagttcgtatagttttatggtcgttcggttgtttttcgttcggtttgtcgagtcggagtttcgggattcgatttttcgttcggttcggattagaggaagcgcggtcgcgggtgagttatcgagttagatgattgcgcgcgttcgttttcgatttcgtttttaggtttcgggagcgttttcgtttagttcgttttgtttaggttatttcgagaattttttttaggggtgttttcgggtaggagtagagtttagatagtaattttaaatacgggatggttaaagtaagaaaaatgtttcggtgttggtcgtacgtggtggtttacgtttgtagttttagtattttgggaggtcgaggcgggcggattatttgaggttaggagtttaagattagtttggttaaattggtgaaatttcgattttataaaaatataaaaattagtcgagtatgatggcgggtgtttgtagttttagttattcgggaggttgaggtaggagaattttttgaattcgggaggcggaggttgtagtgagtcgagatcgtattattgtattttagtttgggtaatagagtaagatttcgttttaaaaaaaaaaaaaaaaaaaaagaaaagaaaaagaaaacggtttagtgtataggttcgggacgttaggtcgatatcgggtcgtcgtttacgttgttaatacgggcgtttttttgtggatttttggtttcggtgaagttggagaagttaagtttgaggagtatttttttttttttagtttaattattagataatcgagatgagagttgagtttatttgtttttaagtttaggtttttttgtaatagtattttagttgtggttaataaagtttttttattagaattttttggggtagagtatgtttaaggaattttgagagagaatattttggtttatttgtgtgggtttcgatataaaggattttaattgataagtttgattttataatttatttttaaggaagagttagtgaagttatatgacgaatacggattggagatgttaaagggagaagaggtgtttttttattagaaggagaaaacgttaggtagattaaaattatagatttgttatataagtattttgaaaatgagggtggaagagttttaaggaaagattttaaagaaatgtaatgattaggttaggtgcggcggtttacgtttgaaattttagtattttggaaggcgaaggagggcggattataagtttaggagttcgagattagtttggttattaaagtgaaatttcgtttttattaaaaatataaaaattagttgggcgtggtggcgggcgtttgtaattttagttatttaggagtttgaggtaggagaatcgtttgaaatcggaaggtggaagttttagtgagttgagattatatttttgtattttagtttgggtaataagaataagattttattttaaaaaaaaaaaaaaaagaaagaaaagaaatgtaatgattattgggttttagaaaatgagattttaaagtgtggtattttggtatgttgaatatttggaattgaagaaaagagagttagaagatttttttgatttttttttgttttttttttttttgttttttttttttttttagagtaagttatagaaattagaattttttttttttaaaatgggttatagaaattagagttattgttgggtatggtggtttacgtttgtaattttagtattttgggaggttaaggtaggtggattatttaaggttaggagttcgagattagtttggttaatatggtgaaattttatttttattaaaaatataaaaattagttggatgtgttggtatacgttcgtaattttagttatttgggtggttgaggtataagaattatttgaatttgggaggtagaggttgtagtgagtcgagattgtattattgtattttagtttgtgttatagagtaagattttgttttagaaagaaaaaaaaaaaaagaagaaattagagtttttatgtttttaaagttagttataaaatttagaaatattattttaattttgtcgtgtttttttgtaggagttagttataaagaggttttttgatttattttgtttgatagtggtttttaagatttttgttttagagtggttttgtatcgtattttggaggaaggaatattatatagagaggttaagaagaatttgaatagatatattttgttaggttttttttttttattattattaggttgattatattttttttgtttaatcgtatttttgtttggttgtttgttttgtattaaatttaaatattaaaataggtagttttttttgggtttttgagtttttattttgaaggtttttatgttatgtaaaattgattaaataaatttgttatgttttttttgtgttaatttgtttttttgttataagagtgttagttatgatttatgatggatgaggaaaggtattatatttttttatttttatatggtgtatgtttaaaatttttttataaaagaaaattttagtggtatattatttttttttatttttataattaagataaatataatttgtaatatttatttttattgttattttttattgttaatggaagtacggtataatgtttttaagatttaattattaatttatgttgttgtaattattatatatttaattataattttatattgtatattagttatttattgttgtgttataaattattttaagatttaggagtttaaaataataatagataaataataagataaatattttatagtttttgtggtttaggaatttaggagttttagttgggtgattttggattagattattttatgaagttgtagttgtttgaaggtttttttttttaggtttggttagtgttggaggatttttttttttttgttttgttttgttttttttgagacggagtttcgttttatcgtttaggttggggcgtagtggagttatttcggtttattgtaagtttcgtttttcgggtttacgttatttttttgttttagttttcggcgtagttgggattataggcgttcgttattacgttcggttaattttttgtatttttagtagagatggggttttatcgtgttagttaggatggtttcgattttttgattttatgatttgttcgtttcggttttttaaagtgttgggattgtaggcgtgagttatcgtatttagtttcggaggatttatttttaagttaatttgtatggttgttggtaatagattttagttttttgttggtaattggttgaaagtttgagttatttgttatatttataatatagtagttggttttttttaattaaatgatttgagaaagatagtaaagaggaagttataatgtttttatatagcgtaattttgtaagtgatatgtattattgttattatattatattttttagaagtaagttatcgaagagtttaagagtggattttagatgtaaggaaattgaaggttagaagattaggaagagataaattatcggtgggaatgattgtgggtatttaggaattagggtgatggagggtggttttaggaagatttggagttatatttattaagttttgagattttgtgaaattattagattttttttttattgtatttcgttattaattttgatttattatttaaaagggtgttataatacgggaataatattaatatatttatggttgggttagattttattttttagaaatggggttttattatgttatttagggtggatttgggtttgggtttaagtaattatgttttagttttttgaatagttagtattataggtttatattaatatatttagtttgggttatattttaaattagggttttttaattttagtattagtgatatttttggttagatggttttttgttttggggagttgttttgtgtattacgtgatgtttagtagtaattgggttttatttattggtcgttagtagtattatttttaatttttgagttttagtggtaaaaaatataaatgtttttagatattgttaaatattattttgttgagttttattagtttaagtaataattattataatttatttattaataataaggtgttagatatattattattatttttttattttatttttaaataatttaagaggtaggttttattgtttttattttagaggattatgttgaggttttagggtttcgaagaattaaatggtttgtttacgatattatagttaattaaagttaacgtatggaattgaaataatatggagttgaaataaagtttttttagatgattgaaatatgaaaaagtggattattatggatttatagtaaatgtgtttttattgaatttatttgtatggtatttggtttttttgaggatttttttaaatatgtaatattattgtttaaaatgtattattggatttttattttttatagggtaaaattagatttttaattaaagattattaatttattagtttaattagaatttgaattaagtttttttatttgggtgtattgtgtgttaaatatttttaaaatggaattttaatatgtgtatttgttgttattttttttttgtttttattttttttatatttaaggggaggggaattagtttttattttttgaagggaggagtatattttttgattataaattatttttattttttttatgtaaaatatatttttttttttttaagaattttaaaaattttatttttttagaaaagtagtttgaaatttagaatgttagtatataaattatatttaggtgtgggtgagatttttaggatgtagttttttaaagttttttaagtatagttttttttagtgtgaagatttgtgaattaaatgtaagttatttgttttttattttttttcgatataaaaatatagtggtggataggtgtaaaataattattgtaaatatttttgtttaaaaagggaaaaatgagaggtaataacgagtttgtagtaattttaaaatttagttaggtaaatgttgaagttttttgattcggatttaaagattgaaaataattttttatggtttttgatgttattttgtgggta

SEQ ID NO: 863 - DNA, 6131 bp, Artificial Sequence
  chemically treated genomic DNA (Homo sapiens)
tttgtttaaattaggagttttgaagtttagattttattagttttatagaaaaattaagttttgttataaatattagtttttattttttttttttatattgagatgttgtgtaatagttgtattatgaatttatttagtaatttatttaatttgttatttttttgagtttttttttttttatttattttaatataatcgttaaagtattattatttaaataatgtatgatttatattttttttttaattagatttattaaagattttttattgtttgtaaaataatttgtaagtttttgatttggaatttaaattattttttatttaaagttttttttattttttttataatttttttgtgtaaaattattgttttaatgtgagtttttttattaattttagattagtttttatatttttttattttttatagttttagtggtattttttttttaaattatagtgtaatatttaagtgtttttaaaattatttttgattaaaattagtgtttagtaattttttttttttgtaaatttttttcgaaaattttaattataatagttatttgttatttagtatagatattaattatttttaattttttaaatatggatttttttttaatataaatttatatttttatttttttaaatttttaatgtttaaatatatatagtatgtatttgttgagaatgtgttaatatgaatattgaaaataaattggatttattttatgtttaattttagtattaatagttaattatttattatttggtttttttaatggtaatttaatattatataataattttatgagtttaaggtataatatgttgttaatttttttatgttttgaatttttttataatagatttttgtagttttgaaaagtattgatgaaaaaagggaaataaaaatatttaattgacgttagttattagtttttgaaaaaaggtaggataaagaaaaaatagtaaaaataatatatttgaaagatatttgttgaaattaatttaagaggattatttttatttggatagtagagtggtattttatatttaataattgtaaattaggtgaagatttgtatagtaaaattatttttgtatgtattttaaattatttataaatatatatatgtgtgtgtgtatttttaatatttttatagtatatgtataattgtaaaataaataaatgtgaagtatatattagagtatatatgtgaatattttattatatttttaaatatatattttaaatatagattattggatttgatatttggttttagtaatgttttgtgattttaagggagttgttaaaatgttttgtggtttagtttagttatttatatttttgaaagagtaatagttttttattttattgtgttgtattaagtattgaataaatgtgtttagatttgtgtttggtatataattaatatttaataatattaattttagtaagtttttggaatattttttaagtgataatattgttattagaatagaaattattattggaaatttaagttttaggtaaaatgtttggatttatatttaaatagataaaattaaggaaggaataaagaagaagtttaaatgatttagtatgttaatatatgtgttattagttaaattaaattaaattttagaatgatagtttagaattcgaatttgtttgattatttatatatttatgttattttattttttattttttttagaataaatgattaagtttaatttttattttttatatttttattataaaaataaaaataaaaataaaataaaatgtaaaatttatattggaagtaaaattagagttagggtgggttatttaatatgagaaaatgattaatgtaaaagaaggatattataattttaaatacgtatgtaagtattattatagttttaaaatatataaagatttatagtattaaatagggaaatatataaatttatatttataatgggagatgtaatatatttttttaatatttgatggaataattagataaaaatataataaaaatataaaagattttaataaattataaatttgatttattgatataggtagaattttgattataatgggttataaagaaagatttattaaattttaaaatagtgtaattatttagaatatgaaattaaaaaagaaattaatttaaaagataattagaaagttaaagtttttagaaatttatattttagaaaagttttaaaaataaattattatagtaagaagagtttggtgatatagatttatatatatttagtatttgatttatgataaaggtgaaagtatgttagtatagaggaaagaatgatattttcgttgaataatgttataataattggatatttttattttaaaaatgtatttggagttttttattatgttatatataaaagataattatagttgttttaaaggttttaaatgtgaaagataaaataatttttttagaagaaaagtattgtgttttaggattaggtaagtttttattaaataggatatataatgtattagttatagaaaaaaattgaaaatttgttttattttaaaattaaggaattttttttattattataaaagatatgtaatattgaatagaaagaaaatttatagattggaagaaggtatttataatatatattaataagattatttttatatttagaatatataagtaattatatataaatagtttttatattttaataagttaaagataaataatttaataagaaaaaaatatgtaaaggatttgaatagaatttttattaaagagggtatttaaatgattagttattataggaaagttttttaattttatgttaagggtaggagatagggaaatattgggtagaagagggtggtttttaagtaaaggttttatttttaagtttgaagatttgtggttttaaatgaggataggtattttaggttttatatttaaaaagttgttttttggttcgttatgtttcgttgtcgtatttttatataaattttaaattttaagttttagaagagatttataagtgaggagacggagaggtaagtcgataaataggtttgcgatggtagaatgatatagtagagaaagagaggagggatatttggatttcgaggggagtttggttagggacgggtggagaagagtttggttattgggaggtttgatattgggcgaaggttatttttttattttattttgttgatagttatttttattatttaataaaaagttgtttttatttttcgagttttcgtgtgattcgatttttttgggatattgggtaatagttggggatatagagggttattttattgttttattatttatgagataaggaagagggtttgttgagttgattaatatataaattatttgtagatggtaaagttaaaggagtatattgtaatatacgtttatttgggtttcggaaatcgtagatatttatttttagatgttgttgtgaggttagagttcgaaagcgtttatttcggttttcgtatcggtgtatttgtgtgtttttttttttcgtaaggggtttgagttgtagggcgatttaattggtaagtcgtatatttgttgtatgttttttaaggggaattagggattttttatattttaattagttattaggaaaatttatattataattacggagaattattgttttgtgttattagaaaagttaaaattataaggattaaaattattaagtatttttgagggtatggagtaatttggatattgttgatagaaatgttaagtgatgttaagtgttataatttatttggaaaattgtttaattttatttattatatttaaatataaattatgttttagtgttttattattaagtatgtatttattagaaatgtggattgtgtttattaaaaattttataatataaggtttatagtagtattatttatattagttttaaattaaaatttgtttaaatgtttattaataggtatatagataaataaaatgtgaattatttaaaaagtggagtattaaatcgtaataagaatgaattatttgtaattatatttaataatgtgtttgaatggtttaaatataatttttggtgaaaaattttaaatataagaataaattgttttttttttattatataaagtataaaagttagataaatatattttatgtttttgaagattagaatcgtggtttttgtgtgtggggggtgtgggagagggttgagaggcgtattgattgaaaaggagtattggggttttttgggatgtaataatgtttagtgttttgattttggtggtggttttataggtatttttatttttttaatatttagtatatgatttatgttttttttatatatattatattataatataaagttttaaaaattagtattttaatttgttgatttttggattattaaatttatttacgttaaatgagagtgagttagttgttttatatatatatataaaaagtatttagaaaattaattttataaattgttagaaaagtagatttttaaatttattaagtattgtatttttggtaaagtttgtatatattgtttgggtgttgattgtgaaaatattgtttaaattaaagttttgtatgtgattttttttaaagttttttttattttttgttttgaggtttatatataatagattcgaatagagtttgaataattgaagggtttatgaaatttagaggatattattagttgttgatttgtatatattaagaatatgaatattttttaacggagaatttttttagtttaataagaaaaagtttaagagtcggttatagtattaatatttagtgggagtgtagtgagaattgggtttaatttttggtatttttgggtttgtggtttgtggttgattttttatttattttgtaaaagtttttgataggcggagtatttagttttaatttttttttgtagtaagtttttttttgtattaattataatttttggaagaggagaattggacgttgtgaatagagttagttggtaaatgtttttttaaaagatttaaaaaatgagatttttagtaaagattatttgttttatgttatgggttatttgtgtagtagaaggtaagattaaaagagatttttttttgaaaattgtattatgaaatatttgttaatgatgttttttataggagtaataaaaatttgatttagaaaatgtgtttaagtattttgtaatttgataattgagtggtttttgatattgttgagtttaaaaaatgtaagaattttatttgaatggtatatttaaatatttattataattatatttaatataaaatagaataaaatgttttaataaatatttttgaaaaattatgatttggaataattattttttttgtaattattataaaatgtaatttatttttttgtttaggagtataattaaaatgtattatgtgaaagtattaagaaggatgtgaatatatatagttaataaaagttattaaattataatgattagatttattttaaatatgattttaattttttttaaataaaaatttatttattatttataattgatattgttatgattttagaatttttgtagataagtattatttgtattattagaataaaaatattatataaatttgaaatttaattgaatatataatatttgtaatagttaagttgtttaatagagattttttttttgtagttgtatataatatatatttttgaagagtagttttttggagtagtgaatatgaatgtaggagtttttttttgattttagtaagataatttttggatttataataaaatttaattatattattgttttttgatagattaaaaagtttatttttggaggaggtttgtttttttagtttttgataggtaattagttatgtgatagatatttggtaaatatttttaaattgaatgaattatatattatttataatttttaaaatttttttatttagtaaagaaattttgattgagtgattattatatagtttttaggaattgaagaatattagtaaataatataaatttttgttttagttttttaatttagaaaataaaagtagatatatttttatagtta

SEQ ID NO: 864 - DNA, 6131 bp, Artificial Sequence
  chemically treated genomic DNA (Homo sapiens)
taattataagaatatatttgtttttattttttagattggaagattgaaatagagatttgtattatttgttaatattttttagtttttagaggttatgtaatggttatttaattaaaatttttttattaagtgaaaagattttagaaattatgaataatatgtaatttatttagtttaaaaatgtttattaaatatttattatataattggttatttattaaaaattaggaaagtaaattttttttaagaataagttttttaatttattaagaagtagtgatataattaaattttattatgaatttagaaattgttttattgaggttagaaaaaaatttttatatttatatttattattttaaaagattgttttttaagaatatatgttatatataattataggaaaaaaatttttattgaataatttaattgttataaatattgtatatttaattgggttttaaatttatataatatttttattttgataatataagtaatatttgtttataagaattttaaggttatgataatattagttgtaaatgataaatgaatttttatttaggaagagttaaaattatatttgaaataaatttaattattatgatttgatggtttttattgattatgtatatttatattttttttaatgtttttatataatatattttggttatatttttaagtaaaaaagtaaattatattttatgataattataagggaaatgattattttagattatagttttttagaaatgtttattaaaatattttattttattttatattaaatataattatgatgaatatttagatatattatttaaataaggtttttatattttttaaatttaataatgttaaaagttatttaattgttaagttatagaatatttaagtatattttttaaattaaatttttattatttttgtgaaaagtattattagtaaatgttttataatatagtttttagaaaagagttttttttaattttattttttgttatataaatagtttataatataaggtaaataatttttgttagaagttttattttttggattttttaagaggatatttattagttaattttgtttataacgtttagttttttttttttaagaattgtgattagtgtaggaaagaatttgttgtaaaaggaagttgaaattagatgtttcgtttattagaaatttttgtaaagtaaataaaaaattaattataagttataagtttagaaatgttagaagttaaatttaatttttattgtatttttattaaatgttaatgttgtgatcggtttttggatttttttttattaagttagggaaatttttcgttggaaaatgtttatgtttttggtatgtgtaaattagtagttggtgatattttttggattttataaattttttaattatttaaattttattcgggtttattgtgtataaattttagaataggaaataagagaaattttaaaagaaattatatataaaattttggtttaggtaatgtttttataattagtatttagataatgtgtataaattttgttaagaatgtagtgtttgatgaatttgggggtttgtttttttagtaatttatgaaattagttttttaaatattttttgtatatgtgtatgaagtaattggtttatttttatttgacgtaaataggtttaataatttaaaaattaataaattgaaatgttgatttttaaaattttgtattgtagtgtaatatgtataaggaaaatataaattatatgttggatattgagaaggtaaagatatttgtgaaattattattaaggttaaaatattgaatattattatattttagaaaattttagtatttttttttagttaatacgttttttaatttttttttatattttttatatatagagattacgattttgatttttaagaatatggaatatatttgtttggtttttgtattttgtataatgaaaaagaagtagtttatttttatgtttagagttttttattaaaaattgtgtttggattatttaaatatattgttagatgtagttatagatagtttatttttattgcgatttaatattttattttttgaatagtttatattttatttatttgtgtgtttgttagtgagtatttgagtagattttagtttggagttggtatgaatagtgttgttatgggttttatattatgaggtttttggtaaatataatttatatttttggtaagtgtatatttggtagtgaaatattgggatataatttatgtttaggtgtaatggataaaattagataattttttaaatggattataatatttgatattatttgatatttttattagtagtgtttaagttgttttatatttttagagatatttggtaattttaatttttgtaattttagtttttttggtaatataaagtaataatttttcgtggttataatatgaatttttttgatgattaattgaaatgtgagagatttttgattttttttgaaggatatgtaataggtgtgcggtttgttagttaggtcgttttgtagtttaaattttttacggggagggggagtatatagatgtatcggtgcgggaatcggagtgagcgttttcgggttttggttttatagtagtatttaggggtgggtgtttgcgattttcgaagtttaagtgggcgtatgttatagtgtgtttttttagttttgttatttgtaaatggtttatgtgttaattagtttaataaatttttttttttattttatgggtagtgggatagtgaaatagttttttatatttttagttgttgtttagtgttttaaaagaatcggattatacgggggttcgagggatgagggtaattttttattgagtggtggaggtggttgttagtaagatggagtgggaaggtgattttcgtttagtgttaggttttttagtggttagatttttttttattcgtttttggttaaatttttttcggagtttagatgttttttttttttttttttgttgtgttattttgttatcgtaggtttgtttgtcggtttgttttttcgtttttttatttgtaggttttttttggagtttggagtttgggatttatatgggggtacgatagcggggtatggcgggttaaaaggtaattttttgggtgtgaaatttgaaatgtttgtttttatttagggttataggtttttaggtttgagggtggggtttttgtttggggattatttttttttatttagtatttttttgttttttgtttttaatatgaagttgagaaatttttttgtggtaattggttatttagatattttttttggtaaaggttttatttaaattttttgtatattttttttttattgagttgtttgtttttgatttattggagtgtaggaattgtttatatataattatttatatattttagatatgaaaataattttattaatatgtattataaatatttttttttagtttgtgggttttttttttatttagtattatatgttttttataataataaaaagaattttttaattttaaaatagagtaaatttttaatttttttttatgattagtgtattatgtgttttatttaatgaaagtttgtttagttttagaatataatgttttttttttaaaagaattattttattttttatatttaagatttttagaataattgtaattgttttttgtgtatagtataataaaaagttttagatgtatttttaaaatagagatatttaattgttatagtattatttaacgaaagtattatttttttttttgtattgatatgtttttatttttgttataagttaggtgttggatatgtgtgggtttatattattaagttttttttattgtaatagtttatttttaaaatttttttaaagtgtaaatttttgggaattttggttttttagttattttttaaattgattttttttttaattttatattttaaataattatattgttttaaaatttgatgagtttttttttatggtttattatagttaaaattttatttatgttagtaggttaagtttgtaatttgttaaaattttttgtatttttattatgtttttgtttgattattttattagatattgaaagggtgtattatattttttattataaatgtggatttgtgtatttttttgtttaatgttgtgaatttttatatattttagggttatgatgatgtttgtatacgtatttagaattgtgatattttttttttgtattggttatttttttatattaaatggtttattttaattttaattttgtttttaatgtgaattttatattttattttatttttatttttatttttgtaataaaaatataaggaataagagttagatttagttatttgttttgagaaaaataagaaataaaatagtatggatatatgaataattaagtaaattcgaattttgaattattattttgaagtttaatttgatttaattgataatatatatgttgatatattagattatttaaattttttttttattttttttttagttttatttgtttgagtatgaatttaaatattttatttggggtttaaatttttaatagtggtttttattttaatagtaatattattatttggagagtattttagaaatttattaagattaatattattgagtgttaattatatattaggtatagatttaagtatatttatttaatatttaatgtaatataatgaaatgggagattattatttttttaaaggtatagatgattgaattgaattatagaatattttagtaatttttttaaggttataagatattgttggagttaggtattaaatttagtggtttgtgtttaaaatatgtgtttaaaaatatagtaaaatatttatatatgtattttagtgtatgttttatatttatttattttataattatgtatatattgtaaaagtattgaaggtatatatatatatatatatgtttgtggataatttaaagtatatataggaatgattttgttatataaatttttatttaatttgtaattgttgaatgtaaaatgttattttattatttaagtagaaataatttttttgaattaattttaataaatattttttagatgtattatttttattattttttttttattttatttttttttaaagattgatggttaacgttaattgagtgtttttgtttttttttttttattaatattttttaaaattataaaagtttattataaagaaatttagaatataagaaaattagtaatatattatgttttaaatttataaaattattatgtagtattagattattattagaaagattagatagtaaatagttaattattaatattaagattaaatatgaaatggatttaatttatttttaatatttatgttggtatatttttagtaaatatatattatgtatatttggatattaaaaatttagaagagtaaggatataaatttgtattagagaaaaatttatatttaaaaaattagaaatagttaatatttatgttaagtaataaatgattgttatgattaaaattttcgaaggaagtttataagaaagagaaattattgaatattggttttgattagggatgattttaagaatatttggatattatattgtagtttaagggaagagtattattgagattgtgaagaataggaaagtgtggggattaatttagaattaatgagaagatttatattggagtagtggttttgtataaggaaattgtggaagaagtaaaaggagttttaaatgaggaatggtttgaattttagattaaaaatttgtaaattattttataggtaataaagaatttttgatagatttaattgaggaagaaatgtaagttatgtattatttaagtaatggtgttttggcggttgtattaaaatagatggaggaaaaaggatttagagaaatgataaattaaataaattattgaatgaatttataatataattattatatagtattttaatgtaaagaaaaagggtaaaaattaatatttataatagagtttgatttttttatgaagttaatgaagtttaagttttagggtttttaatttgaataga

SEQ ID NO: 865 - DNA, 10710 bp, Artificial Sequence
  chemically treated genomic DNA (Homo sapiens)
tgagatggtattttattgttattttgatttgtatttttttgatgattagtgatgatgagtatttttttatgtgtttgttggttgaataaatatttttttttgagaagagtttgtttttattttttgtttattttttgatgggtttgttttttttttttaaatttgttaagttttttgtagattttggttattagtcgtttattagatgggtagattgtaaaaatttttttttattttgtaggttgttcgtttattttgatggtagttttttttgttgtgtataagttttttagtgtaattagattttatttgtttattttggtttttgttgttattgtttttggtgttttagtgatgaagtttttgttcgtgtttatgttttgaatggtatggtttaggttttttttttgggtttttatggttttgggtttaatatttaagtttttaatttattttgaattaatttttgtataaggtgtaaggaagggatttagttttagttttttatatatggttagttagtttttttaatattatttaagaaataggaaattttttttttattttttgttttttttaggtttgttaaagattagatggttgtagatgtgtggtgttatttttgaggtttttgttttggtttattggtttatatttttgttttggtatcggtattatgttgtattatgttgttttggttattgtagtatagtttgaagttaggtagtttgaagtttttagttttgttttttttgtttaggattgttttggtaatgagggtttttttttggttttatatgaattttaaagtagtttagtttaattttgtgaagaaagatattagtagtttgatgggaatggtattgaatttataaattattttgggtagtatggttatttttataatattgattttttttatttatgagtatgaaatgtttttttatttgtttgtgtttttttttatttcgttgagtagtggattatagttttttatgaagaggttcgttttttatattttttgtaagttggatttttaggtattttattttttttgtagtaattgtgagtgagagtttatttatgatttgattttttgtttgtttgttattggtgtgtaggaaagtttgtgatttttgtatattgattttgtattttgagattttgttgaagttgtttattagtttaaggagattttgggttgagacgatggggttttttaaatatataattatgttatttgtaaatagagataatttgattttttttttttttaattgaatattttttattttttttttttgacggaaattttcggttagaatttttaaaattatgttgaataggagtggtgagagaggatatttttgtcgtgtgttagtttttaaagggaatgtttttagtttttgtttatttagaatgatattcgttgagggtttgttataaatagtttttattattttgagatgtattttattaatatttagtttttcgagagtttttagtatgaagggttgttgaattttgttgaaggttttttttgtatttatcgagataattatgtggtttttgtttttggttttgtttatgtggtggagtatgtgtattgatttgtatatgtttaattagttttgtattttagagatgaggtcgatttgatcgtggtggataagttttttgatgtgttgttggatttcgtttgttagtattttattgaggattttcgtattaatgtttattagggatattggtttaaaattttatttttttgttgtgtttttgttaggttttggtgttaggatgatgttggttttataaaatgagttagggaggagtttcgttttttgtattgattggaatagttttagaaggaatggtattagtttttttttgtatttttggtagaatttagttgtaaatttatttgtttttggattttttttggttggtaggatattaattattgttttaattttagaatttgttattggtttatttagatatttaaattttttttggtttagttttgggaggatgtatgtgtttaggaatttatttattttttttagattgtttagtttatttgtatagaggtgtttatagtattttttgatggtagtttgtatttttgtgggatcggtggtgatattttttttattattttttattgtatttatttgatttttttttttttttttttttattagtattgttaggggtatattaattttgttgatttttttaaatttttagtttttttgttttggtttttttttatttttgtggtttttatttatttttggtttttgatgttggtgatttttagatggggttttggtgtggatgttttttttgttgatgttgatgttatttttttttgtttgttagttttttttttaataattaggttttttagttgtaggtttgttggattttgttggaggtttattttagattttgttttttgggtattattagtagaggttgtagaatagtaaatattgtagaatagtaaatattgttgtttgattttttttttggaagttttgttttagaggggtatttgtttgtatgaggtgtaagtcgtcgtttattgggaggttgttttttagttaggttatataggggttagggatttatttgaggaggtagtttgtttgtttttagagtttaaatgttatgttgggagaattattttattttttagagttgttagatagggacgtttaaagtttgttgttttttgtttagttatgttttgtttttagaggtggggtttatagaggtagtaggtttagttgtgttgtagtgggttttatttagtttaagtttttaggttattttgtttatttatttaagttttagtaatagcggatgtttttttttttattaggttgttgttttataggttgattttagattgttgtattagtagttagtaaggtttcgtgggtgtgggatttatcgaattaggagtaggagagtgttttttggtttgtcgtttattaagattttcggaaaagtgtagtatttgggtaggaatgttttattttttttaggtgtagtttgttatggttttttttggttaggaaagggaaattttttgattttttgtatttttagggtgaggtaatgtttcgtttagtttcggttttttttttatgtgttgtatttattgtttaattagttttaatgagatgaattaggtattttaattggaaatatagaaattttttattttttgcgttggttacgttgggagttgtagattagagttgtttttatttagttattttggagcggtgatcgtatttgttttttttgtagatatattttgttgttttagtttagagatagggtaggtagagaatttatttgtaaaggtttgaggttttttaaaatttggattatagatagaaagaaaggaatgggtaggagagtgtgtgtaagggattgatttatagtgatgaattattgaatttaatttgggtatggtgggaagagagaaagtgaagggaaaagaatagtgaaaaagtattagtgttattgaatggttggaataaatttagtagagtaagtgagttaaaaagattgttgaaatggtttagagtgtgatattttagataatttaggtagtttaattggaaatgataaggtttagatagattagaattaatagtggagattagtagtttatagagatttttttggttttttgattgaatatagttatatgtatttttattgatttttgaattattattagtaagttttattttagtggaagtttttaggttgtttttttttttaaattttgttattaaatttttgattgattggttattttgttgtttgttttagttaatattttttatatatattaattttttttatttgttttttattgtaatttttttatatttaataggatttttgggtagggaattttttacgttataaagttatttttttttagtggagtagtagagtttttagtttatatagattgtttgtttatttagggtttaatttttgagttatagaattgagttgtgagataaaggtggataaaagtatttatttttttttattgagatttatgtggattttttggaataaatattttttaatagtatgttttttggttaatttttagagattatttttataattttatttagttttattgttgttttttggtggtgagtgaatatattaagatttagaaatatttatttttaaagttttattagaataaaattattttgaagtaaaatttgtttaataattttgggaattattatatattaaaaattatttttgatttgattttttatagtttaaaaatatgaaaattattaagaagttattttatttttttttttttttttttttttttgagacggagtttcgttttgttattttggttggaggggagtggtgcgattttagtttattgcgaatttcgtttttcgagtttacgttatttttttgttttagttttttaagtagttgggattataggtatttattattacgtttagttaatttttgtatttttagtagagatggggttttattatgttagttaggatggtttgaagttattttatttttaatattagttttaagtggaatttataattagaatagtgatgttgttatgttaagatgaggattgattatttttatttgtttgtttattgatgtagttgaatttttggttagaaaaaagaaggggtttttttttttttttttaatggtttatttttgaatattttaaatttagagatttagggattataataaggaaattgaatagtttttattttgtttaagttaatattatatgataaatttagagtattattgtgaaaatattgattagatattatttgtttattttgtataattttttatgaattttgatgtttattataaaggattttattaaattagtttttagttagtatattgaaatttaaagttatgtttataattgttaatgaaagtagatttaaagtaatattattattattgaagtatttttagttatataagattggaattattaagtatgtggtttttggttagtgtaattttaattttacggatattttttgttgggggagaaggtaagtttaaaatagatttgaatatttagttttttttttagatatatttatcggtttttgtgtgtatgtttatatatttttaaatgaataaatggatgaaaatattttaaatgagttataatattaatttattttatggaaatattttttaatatgtaattagtaggaaaatagaataaaattagttttttttattttttaagttgtaaaggtaaatggttattaaatagagaatgtaaagaggaattaaatgagggaaaatttgttatattaacggtggtaaggtgaagtattagtgtaattttgtatatattttgtaatgttattaattagaataattaattttaaaaagatttggttatttttaaaatgttttttggattttagttttttagatttgattatttaaattttaaaggttattaaaatggaggaatttttattttaattgaattattttttaatagagggaaatatattttattgaaataatagaaaatattatttatatataaattagtgaattgttaagaaattgttttttttgagtttttaaatgttgagaatgaagtaatgtattatttttttattaatattataaattgttttttatgatattttataaacggttttattttattttatgttgaaattaaggttattatattaaaggaattgtaaataaaatttttattaaggtttaggatattaattaaattatgtttgtatatggagtttcgattattatgttttattttttgatttttaaaaagtttttattttattgtttggttgttttttaatgtttttagatttttgaatttttatttgaatagttttttattagttttgatataatagaataatatgaataataatatgtttttttttaaatatttgtttttagaaatgttgtaaaatattatttttattgtttgaaatttatttttttttgagatggatttttatttttgttttttaggttggagtgtaatggtgtgatttcggtttattataatttttattttttgggtttaagtaatttttttgcgttagttttttaagtggttaggattataggtatgtattacgacgtttggttaattttgtatttttagtagagatggggtttttttatgttggttaggttggtttcgaattttcgattttaggtgatttgttcgtttcggttttttatagtgttgggattgtaggtataagttattacgtttggtttttgaaattcgttttattttgtttttatttttagtgttgagttgtaattataggagtgtgattgtatgagtgtatttgattttttttaagtttgtgtttatggtatttattaagtggtttatatatttattatatatggtattatatgaggatttttaaataggggggtagtagaggaaaataagtgaaaaatatgagagaaatatgtagaattttgataatttttaattttttttttattaaaaaaaagtttaagttttaatttagtttttgggagaaattttagtgaaattttatttaaaggttgtttagatgttaaatgatttgtaagtgtgtgttatattgttatttaggtgtttattgagagatttgttaaatagtaaaaataatatattgaagtaatatatttgtatatatagaaagttgtatgtttttagtagtaaaatatttattaagtattatgttgtgttttatgtagtaaagaagttggaagaaaatgataattttaattatattttattgtaatttatagtgttttaaagaaaagtaaaatgtaaataggtaaataaattgtaaggttatatataggtgattgtgagtgagtgtgtgtgtgtgtgtgtgtgtgtgtgtataaatagttatgtattatttaatgatagggatattttttgagaagtgcgtttttaggcgattttttttttatttaaatattatagagtggatttatataaatttaggttttatagtttattaggtaattaggttatatggtatagtttgtcgtttttaggttgtaaatttgtatagtatgttattgtattgaatattgtgggtaattgtagtataattgtaagtatatgtttattttaatatagaaaagtataataaaaatatagtataaaatattaaaaacggtagatttgtatagggtttttattatgaatagggtgtgtaggattgaaagttatttttagtaagttattatatgagtggtgagtgaatgtgatggtttagaatattattatatattattagaggtggtataaatattgtatatttaggttaaattaatttattttatttatttatttatttgaatagttttgggggagtaggtggtttttggttatatggataagttttttagtgttaattattgagtttttgatgtatttaggatagattaaatttattttaaattttttttcgataataaattaattttagtttatgttaatttttttattttattaattttaatttttgtgtttttcgagataatatttagtttaaaaaatattgtagagatgtataaaagattttttttttttgtttttgtgttataagtttttattttttaaatattttatttatttatttattttttaaatttttttgttaaaaatagatataaatatatatattaatttcggtttataaagagttaggattattagtattattgtttttttttttcgtttttgttttattggaaggtttttacggtagtaataggtatggagttgtttttttttatgataataaaggttttttttagaatagtttttgaaggatttgttttaggaaatattaattgttttatagttaatttttttaattaatagaagaagttaattataaaatattaataataattatattatatgaaatatattaattagtaatatttttatattattattattaagtattacgtattgtataaaattgtgtgtggtatatttttatgtgattggtaatgttgtaggtttgtttattttcggtattgttataaatatgtgagtaatatattgtattgtaatgttacgatggttattaggtgataggaattttttagttatattataattttatgggtttattgttatataagtgattagttattgattaaaatgttattatgtggtgaataattgtacgattgtatatatatatatatatatgtgtgtgtgtgtgtgtgtgtgtgtgtgtgtgtattttagaagaaatgtatttataatattttattaaaatattgagataataaaaattattttttatttttgaaattggtggttgtgtaaaggaggtttgtaagaagatattaatatttttagttagtattattgtagatatgtataatgaatatttgatgaatgttatagaattttttttgaagtataggtataatataaatggttgatgaaaattaagttattttggatagtaaagaatatgtaggtataaatgtatgaaaataaattattataattttggaggagtgaaggataattgaaagagttatggtaggttaatattattaagacgggagttttttttttaatatttttattaaaattatttaatgttaaattttaaatagttagataattaattttaggttttataaggtgaaaatattttaaatattgtgtaatattaaatattatttttagatagatgaaaaagagaaattttttttgatttgttagtttaatttttgtatatattttttaaataaggtgaaaaataaaattattttttatgtagtagtattatattgtaaaaatattttgatataaaaataaagagtagtattatattgaggaaatattttgagttaaatacgtatttaaagataaagtatattaaatttatagaacgtataatattaagagtgaattttaatataaattatgaattttgggtggtaattatattgatagtgagggagtttatgtatgtggtagggaagaggaagtggtatataggaaatttttattttttatttaattttgttgtgaaaaatttgtaaataaagtataaagtttaataaaaaatatgtgtgtatatatatgtatgtgtatataaaaaaagagtaaaaagtatgaagattttatttattttttatattgttttaatatattttgtattatagtgtgtatggatgtatttatatatatatatagtagttttttagtatttttaaggaattggttttaggacgttatttatttttagtagatattaaaatttaaggatatttaagtgtttaagagagaatggtgtagtatttgtatataatttgtgtatatttttttatataatttattttattttattttaattttttttgaggtggagttttgttttgtcgtttttaggttcgagtttagtggtatgattttcgtttattgtaattttttttttttgggtttaagtgatttttttgttttagttttttaggtagttgggattataggcgtgtattattatatttggttaatttttgtatttttagtagagatggggttttattatgttggttaggttggttttaaatttttgattttaagtgatttatttattttagttttttaaagtgttgggattataggtatgagttattatatttagtttttttatataatttaaggaatttttagagtatttataatatttaatataatgtaaatgttgtaaaaatagttgttatattgtatttttaattgtattatttttattgttttattatttttattgttttttttaaatatttttgatttgtagttggttgaattagacgaagtgaaacgagtggggttgattgtatatatatatatatatatatatatatatatatgtgcgtgtgtgtgtgtgtttataagtataaatatataaatataaatatataaatatatatttgtatatataatattaattagaatttagttttaattttattttgattgagttgtttttagtgatttttttatattttttaaattatttttattgaaattatattaattttgtaattagaaaatatttaaaatgatattaataaataaaaaataaaattatatatttaatatttttattgtattagaaaaaaaaataggatagagtttttggtagagatatttatggtagttaatgagaatagagaaaataagtaaattgagagttaagaataattttattatttttttattgtatattatgtagattaggaagatttgttatttttatattttgtttttatttttaaattgttgtgtgtgggttttatttttgaagataatgtaggagagtttatattttatattattttaaaatataaattttatatttattaataattatttttttaaatagttatgtatttttagttagtgatgttttttatttttaatttgtatattggaaagtatttaagttaaaggtatttaagttaaatgaaagaaaaatattataagtgagatgattaaaatataatttagtgatttatttatgtaatttattatgtaattttttagttttatgttatttttttagt

SEQ ID NO: 866 - DNA, 10710 bp, Artificial Sequence
  chemically treated genomic DNA (Homo sapiens)
gttgggaaaataatataaaattgaagaattatataataagttatataaataaattattagattatattttaattattttatttatagtgttttttttttatttagtttaaatgtttttagtttaaatgttttttagtgtataaattaggaatgaaaagtattattaattaggagtatatgattatttgaggaggtaattgttaatgaatataaaatttatattttggagtgatatgaaatatgaatttttttgtattgtttttaagaataaaatttatatataataatttaagaatgaagatagagtgtaagagtagtaaatttttttgatttatatagtatatagtagaaaagtgatagggttgtttttagtttttaatttatttattttttttatttttattgattgttataggtgtttttgttagaaattttgttttatttttttttttggtgtagtaaagatgttggatatgtagttttgttttttgtttattaatattattttgaatattttttggttataaagttaatatagttttagtggaaataatttagggaatataagaaaattattaagaataatttaattaagataaagttagagttaaattttggttaatgttgtatatataaatatgtatttgtatatttgtatttatatatttatatttgtgaatatatatatatacgtatatatatatatatatatatatatatatatatatatagttagttttattcgttttatttcgtttgatttaattaattgtagattaaaaatatttgaaaaaaataataaagataataaaataataaaaataatgtaattaaagatataatataataattatttttatagtatttatattgtattaggtattataaatattttagagattttttaaattgtatgagagggttgagtgtggtagtttatgtttgtaattttagtattttgggaggttgaggtgagtgggttatttgaggttaggaatttgagattagtttggttaatatggtgaaattttatttttattaaaaatataaaaattagttaggtgtggtggtgtacgtttgtgattttagttatttgggaggttgaggtagaagaattatttgaatttaggagggggaggttgtagtgagcggagattatgttattaaattcgagtttgggggcgatagagtaagattttattttaaaaaaaattaaaataaaataaaataaattgtatgggaggatatgtataggttatgtataaatattatattatttttttttagatatttgagtatttttggattttggtatttgttgggggtgggtagcgttttggaattaattttttgaggatgttaaaggattattgtatatatgtataaatatatttatatatattatggtgtaagatatattaaaataatgtagaaaatgggtgaaatttttatattttttattttttttttgtgtatatatatatatatatatatatatattttttattagattttatattttatttataggttttttatagtaagattgagtggaaggtagagattttttatatattatttttttttttttattatatgtataagtttttttattgttaatataattattatttaaagtttatagtttatgttggggtttatttttgatgttgtacgttttatgggtttgatatgttttatttttgagtacgtatttagtttaagatatttttttaatataatattgttttttgtttttatgttaagatatttttgtaatatagtattgttgtataagaaataattttattttttattttatttgaaagatgtgtgtagaaattaagttgataaattaagagaaattttttttttttatttatttagaagtaatgtttaatgttgtataatatttgaaatatttttattttgtgaaatttgaaattgattatttaattgtttaaaatttgatattagatagttttggtaaaggtgttgagggaaagattttcgttttgatagtattaatttattataatttttttaattattttttatttttttaaaattatagtagtttatttttatatatttgtatttatatattttttgttatttagaataatttggtttttattaattatttatattgtatttatgttttagaaagaattttatgatatttattaagtatttattgtgtatatttgtaatggtgttagttaggagtgttaatgtttttttgtaagttttttttatataattattaattttaaaagtagaaaataatttttattgttttaatattttgatagaatattgtgaatatattttttttgggatatatatatatatatatatatatatatatatatatatatatatatatatatatagtcgtatagttatttattatataatgatattttggttaatgattgattatttatatgatagtggatttataagattatagtgtagttgaaaaatttttattatttaatagttatcgtaatattgtagtgtaatatattatttatatatttgtggtaatgtcgggggtaaataaatttatagtattgttagttatataaaaatatgttatatataattttgtatagtacgtaatatttgatgatgataatatagaagtgttattggttaatgtattttatatagtataattgttattagtattttatagttaattttttttattgattaaaaaaattaattgtaaaatagttaatgttttttgaggtaggttttttaggaattattttagaagaaatttttgttattataggagaggatagttttatgtttgttattgtcgtgaagattttttagtgggataagagcgggggaagaagatagtgatattgatgattttgattttttgtaggtcgaggttaatgtgtgtgtttgtgtttgtttttaataaaaaggtttaaaaagtaaataaataagtaaaatatttaaaagataaaagtttatagtataagaatagaaagaaaaaattttttgtatatttttataatgttttttaagttaaatattatttcgaaagatataaaaattaaagttgatgaagtaaaaaggttaatataaattaaggttaatttattatcgaagaaaagtttaaaataaatttagtttattttgggtgtattaaaagtttagtaattagtattgaagaatttatttatgtaattaaaaattatttgtttttttaaaattatttaagtaaataaataaataaaataaattagtttagtttaagtatatagtgtttatattatttttagtagtgtatggtgatgttttaagttattatatttatttattatttatgtaatgatttattgagagtaatttttagttttgtatattttatttatggtaaaagttttatataagtttgtcgtttttaatattttatattgtatttttattgtatttttttatattgagataaatatatatttataattgtgttatagttgtttatagtatttagtatagtaatatgttgtataggtttgtagtttaggagcgataggttatattatatggtttagttatttagtaggttataaaatttaggtttgtgtaagtttattttataatgtttgaataagaaggaaatcgtttaaggacgtattttttagaaagtgtttttattattaagtgatgtatgattgtttatatatatatatatatatatatatatatatttatttatagttatttatatatagttttgtaatttatttgtttatttatattttgtttttttttaggatattgtaagttgtagtgaggtgtggttagggttgttatttttttttagtttttttgttatatgaagtataatatagtgtttgataaatattttgttattggaagtatgtagttttttatgtatataaatgtgttgttttagtgtgttgtttttgttgtttggtaggttttttagtagatatttaaatgatagtgtaatatatatttatagattatttaatatttaggtaatttttagatagaattttattgaagttttttttagagattggattgaagtttgaatttttttttggtgggaggagggttaggaattgttaaaattttatatattttttttatattttttatttatttttttttgttatttttttatttagaaatttttatgtaatgttatgtgtaataggtgtataagttatttaataaatattataaatatagatttaagaaaaattaaatatatttatataattatatttttgtgattataatttagtattaaaagtgaaaataaaataaaacgaattttaagggttaggcgtggtggtttatgtttgtaattttaatattgtgggaggtcgaggcgggtagattatttgaggtcgggagttcgagattagtttgattaatatggagaaattttatttttattaaaaatataaaattagttaggcgtcgtggtgtatgtttgtaattttagttatttgggaggttgacgtaggagaattgtttgaatttaggagatggaagttgtggtgagtcgaaattatattattgtattttagtttgggaaataagagtgaaagtttattttaaaaaaaaatgaattttaagtaatagaaataatattttgtaatatttttaagggtaaatatttaaaggaaagtatgttattgtttatgttgttttgttatgttaggattgatgagaaattgtttaaataaaagtttaaaggtttggaaatattaggaaatagttaaatagtaaagtaaaaattttttggaaattaaagggtaaagtataatgatcgaaattttatgtatagatatagtttaattagtattttagattttggtagagattttgtttgtaatttttttgatatggtggttttaattttaatatgaaataaaatgggatcgtttataaaatattataagaagtagtttgtagtattaataaagaggtgatatattattttatttttaatatttaagagtttagaagaagtaattttttgatagtttattggtttatatataaatgatattttttattgttttagtaaaatatatttttttttgttgaaggataatttaattgaaatgggaatttttttattttaatgatttttaaaatttaaatgattaaatttaggaaattaaaatttaaaaagtattttgaaggtggttaaatttttttgagattgattgttttagttagtggtattgtagagtgtatgtagaattatattaatattttattttgttatcgttagtatagtaggtttttttttatttaatttttttttatattttttatttggtggttatttatttttgtaatttagaggatggagagaattaattttattttatttttttgttaattgtatgttagaaagtatttttataaaatagattaatattataatttatttaaaatatttttatttatttatttatttaaaaatatgtaagtatatatataaaaatcgataaatgtatttgaaaaaggaattaaatatttaggtttgttttgaatttatttttttttttaatagaggatattcgtgagattagaattatattgattaggagttatatgtttggtagttttaattttatataattaaaaatattttagtggtggtggtgttgttttgaatttgtttttattaatagttatgagtatgattttgaattttagtgtattaattggaagttagtttagtaaagttttttgtggtaaatattaaagtttatggagggttgtgtaaaataagtaaatagtgtttaattagtgtttttataataatattttgagtttattatgtaatattaatttgagtaaaataaaagttgtttaatttttttgttgtggtttttgagtttttgagtttggaatatttagaaatgggttattgaagaggaaagaggaagtttttttttttttttagttaagagtttagttatattagtaggtaagtaagtgaaggtgattagtttttattttaatataatagtattattgttttagttataaattttatttaaaattggtattaagaatgaggtaattttagattattttggttaatatggtgaaattttatttttattgaaaatataaaaattagttgggcgtggtggtaggtgtttgtagttttagttatttgggaggttgaggtaggagaatggcgtgaattcgggaggcggagttcgtagtgagttgagatcgtattatttttttttagttagggtgatagagcgagatttcgttttaaaaaaaaaaaaaaaaaaaaaagaatgaggtaattttttaatagtttttatatttttagattataaaaagttaaattaagaataatttttggtatgtaatggtttttaaaattgttgaataaattttattttaaaataattttgttttgatgggattttgagaatgggtatttttgggttttggtatatttatttattattaaaaggtagtaataaaattggataaaattataaaaataatttttagaaattggttaaagagtatattgttgggaaatatttattttagaaagtttatataaattttagtaaaaaagagtggatgtttttatttatttttgttttatagtttagttttgtggtttagaagttgaattttgggtaggtaagtagtttgtgtggattggaaattttgttgttttattggaggggagtgattttatagcgtggaaaattttttgtttaaggattttattgaatataaagaggttatagtgggaagtaagtagagaagattagtatgtgtagaggatattagttggggtaagtaataaagtggttagttagttaaaaatttaatggtaaaatttggagaaagggatagtttaaggatttttattaagatgaaatttattgatggtggtttagaagttaatgggaatgtatatagttatgtttaattaagaaattagagaagtttttgtgagttattagtttttattattgattttagtttatttaaattttattatttttaattaaattatttaaattatttaaagtgttatattttagattattttaataatttttttagtttatttattttattaaatttgttttaattatttaatgatattgatgtttttttattatttttttttttttattttttttttttttattatatttaaattagatttaatggtttattattgtaagttaattttttgtatatatttttttgtttatttttttttttttatttgtaatttaagttttagaaaattttaaatttttgtaaataaattttttgtttgttttgtttttgaattgaagtagtagagtgtgtttataagaaaaataaatgcggttatcgttttaagatggttgaataggaatagttttggtttgtagtttttagcgtgattagcgtagaggatgggagatttttgtatttttaattgaggtatttggtttattttattgggattggttggatagtgggtatagtatatggagggggagtcgaaattgggcggggtattgttttattttggaagtgtaaggggttaggggattttttttttttagttaagggaagttatggtagattgtatttgggaaaaatgggatatttttgtttaaatattgtattttttcgagggttttagtaaacggtagattaggagatatttttttgtttttggttcggtgggttttatatttacggagttttgttgattgttagtgtagtagtttgagattaatttgtgaggtaatagtttggtggggggaggggtattcgttattgttgaggtttgagtaggtaaataaagtggtttgaaagtttgaattgggtggagtttattgtagtatagttaggtttgttgtttttgtagattttatttttgggggtagggtatagttaaataaaaggtagtaaattttaaacgtttttgtttgatagttttgaagagtgaggtggtttttttagtatggtatttgagttttgagaatagatagattgtttttttaagtgggtttttgatttttatgtagtttaattgggagataattttttagtaggcgacgatttatattttatataggtaagtgtttttttgggataaagtttttagaggaaggattaggtagtaatatttgttgttttgtaatatttgttattttatagtttttgttggtgatatttaggaaatagggtttggagtggatttttagtaaaatttaatagatttgtagttgagggatttgattgttagaaggaaaattaataaatagaaaggaatagtattaatattaataaaaaggatatttatattaaaattttatttgaaggttattaatattaaagattaaaggtaggtaaaaattataaagatggggagaaattagagtagaaaagttgaaaatttgaaagaattaataaaattaatatatttttagtaatattaataaagaagaaaagagaaaggaattaaatagatgtaataaaaaatgataaaggggatattattatcgattttatagaaatataaattattattagagaatattataaatatttttatgtaaataaattagataatttagaagaaatggataaatttttgaatatatatatttttttaagattaaattaggaagaatttgaatgtttgaatagattaataataggttttgaaattgaggtaataattaatgttttattaattaaaaaaagtttaggagtagatggatttatagttgaattttattaaaggtataaagaggagttggtattattttttttgaaattattttaattaatataaaaagcgggatttttttttaatttattttatgaggttaatattattttgatattaaaatttggtagagatataataaaaaaatagaattttagattaatatttttgatgaatattgatgcgaaaatttttaataaaatattggtaaacggaatttagtagtatattaaaaagtttatttattacgattaagtcggttttatttttaggatgtaaggttggttaaatatatgtaaattaatatatatattttattatataaatagaattaaagataaaaattatatgattatttcgatagatgtagaaaaggtttttaataaaatttaatagttttttatgttaaaaattttcggggaattaggtattgatggaatgtattttaaaataataagagttatttatgataaatttttagcgaatattattttaaatgggtaaaaattggaagtattttttttgaaaattgatatacgatagggatgtttttttttattatttttatttaatatagttttggaagttttggtcggggattttcgttaagagaaagaaataaagggtatttaattaggaaaagaggaagttaaattgtttttgtttgtagatgatatgattgtgtatttagaaaattttatcgttttagtttaaaatttttttaggttggtaagtaattttagtaaagttttaggatataaagttaatgtgtaaaaattataagtttttttatatattaataatagataagtagaaagttaaattatgagtgaatttttatttataattgttataaggagaataaaatatttaggaatttaatttataagggatgtgaaggacggatttttttatggagaattatgatttattgtttaacgaaataaaaaaggatataaataaatggaagaatattttatgtttatggataggaagaattaatattgtgaaaatggttatattgtttaaggtgatttatagatttaatgttatttttattaagttattaatgtttttttttatagaattggattaaattattttaaagtttatatggaattaaaaaagagtttttattattaaagtaattttaagtaaaaagaataaagttggaggttttaagttatttgattttaaattatgttatagtaattaaaatagtatggtatagtatggtatcggtattaaaatagagatatagattaatggattagaatagaggttttagaaataatattatatatttataattatttgatttttgataaatttgagaaaaataagaaatggagaaaggattttttattttttaaatggtgttgggaaaattggttagttatatatagaaagttgaaattggattttttttttatattttatataaaaattaatttaagatggattaaagatttaaatgttagatttaaaattataaaaatttaaaaagaaaatttaagttatattatttaggatataggtacgggtaaggattttattattaaaatattaaaagtaatggtaataaaagttaaaatagataaatgggatttaattatattgaagaatttgtgtatagtaaaagaaattattattagggtgaacgggtaatttatagaatgggagaaaatttttgtaatttatttatttgataaacggttgatagttagaatttataaagaatttaataaatttagaagaaaaaaataaatttattaaaaagtgggtaaaggataagaatagattttttttaaaagaagatatttatttagttaatagatatatgaaaaaatgtttattattattggttattagagaaatgtaaattaaaatggtaatgagatattatttta

SEQ ID NO: 867 - DNA, 11729 bp, Artificial Sequence
  chemically treated genomic DNA (Homo sapiens)
tttgtaagttttttttgattgtagataattttgatgggtttcggaagtatggagattttgtttaggggtttgtttgtagttagaattttgttattgttatggtgttttagtttatgttatggtgtttttggtttatggtgttaggggaagaatatagtttaaacggttgtaatgtatttgaggaaatgtatagggaagatagtgtttgggatagttttgttattgaggattaaggtttagggaaggacgtgttaagaggaagttgtaagtattgcgtttttataggagagaagtattgttttatggagaggtttaggggaatgaattttttattttttatttgtatttttttttttttttttttttttgagatagggtttttgttttgttgtttaggttggaatgtagtgggggcgattacggtttattgtaatttttgtttgttgggtttaagcgatttttttattttaatttttttagtagttgggattatagttgtgtattattatatttggttaatttttgtattttttgtagagatagggttttattatgttgttcgggttgattttaaaattttggttttaagcgatttttttattttagttttttaaagtgttggttagagatttttttttgattgtttttacgtttattttgtagagttaacgattgtgtttaggagagttttaaattatgtgttgtaggggaagtatcgtatgttatttttgtttttttagaggattttatttgatggggaaaggattttgtaattagttttttggggttgttaataaatttttattaattgggtggttgtatttttttatcgttttgtaaggtagggtaatattgtttttgaaagttttaggaaaggttttatttttttttttttttttgagagtttcgttttgttatttaggttggagtgtagtggcgtgattattgtttattgtatttttaattttttgggtttaagtaatttatttgttttaatttttttaatagttaggattataggtatatattattatatttagttaatttttgtattttttagtagagatacggtttcgttgtgttggttaggttggttttgaatttttgattttaggtgattttttcgtttttgttttttaaagtgttgggatgataggtgtgagttattgcgttcggtcgggaaggattttttttagtttttcgtggtcgttggttgtttttggtattttttggtttgtagatttattatttatttttgttttattttatgtagtattttttttgtgtgtttttggatttttatatttttttcgaggattattagttatattatattttataatatgattttattttagtgtgattttattttaattaattatatttgtaaatgttttatttgtaaataagattatatttataggtacggggtggggggggttgggcgtgattatatatttttgtggggcgggggtatataatttaatttataatagaggttatattgtttaaaaattaagtttggttaggagaagaaaatatataaggagatatgaatttaagaatatatttattagttgggcgtggtggtaggcgtttgtagttttagttattcgggaggttgaggtgagagaatcgtttgaatttaggaggtagaggttgtagtgagtcgaggttacgttattgtattttagtttggtgatagagcgagatttcgttttaaaaaaaaaaaaaaaaaaaaaaaaaaagagtatatttgagaatttagaaaaatagtagttggatgtggtagtgtgtagttatagttttagttatttgagaggttgaggtaggaggattattggaatttaagtgtttaagtttcgttagtttgggtaatatagtaagatagcgaaattttattttttttgaaaaaaaaaaaaaaaaaaaaaaaaaaaaagttggttaggtgttgtggtttacgtttgtaattttagtattttgtgaggtcgaggcgggtggattatttgaggttaggagttcgagattaggatggttaatatagcgaaattttgtttttattaaaaatataaaaattagttaggtatggtggtatgcgtttgtagttttagttatttgggaggttgaggtaggagaatcgtttgaatttaggaggcggagtttgtagtgagttgagattatgttattgtattttagtttgggtaatagagtgagattttgtttaaatagaaaaaaaaaaaaaaagtttttatttttaaaggatagatttttaggagtgagattattgggttaaagtttttttttttaattttttattatagaaaagtttaaacgtatataaatatgaagattagtttaagaagttttggtatagttttagtattaataaggaatttgtggttaaatatatattttatggataaggggttagtattttttgtaaagagttagttagtaaatattttaggttttgtaggtcgtatggtttttatcgtaattatttaattttgtttttgtaatgtagaagtagttttagttgatattaaatgaatacgtaaatgtatgagagtgggtgaattttaataagattttttttttttttttttttttttttttttttttttttgttgttgttgttgagagttttgttgtcgttgagagtttttttagttaggttggagtgtaattgtggaatttcggtttattgtaatttttgttttttaggtttaagtaatttttttgttttagtttttcgagtagtaagtagttgggattataggcgttcgttattacgtttagttaatttttgtatttttagtagagatggggttttattatgttggttaggttggttttaaatttttgattttaggtgatttatttattttggttttttaaagtgttgggattataggtatgagttattgtgttcggttataagttttatttttaaaattaggtgttagtttggtttggttgtggtttgtaattgtagtttgttgattcgtgggtttatattattaattattagattttttattttttagattatttgaagtaaattttagatattgtattattttgttagtaaatattttagaatgaatttgtttaaaaaaaaaataaattttttaaaaattaattataatatatttattatatttaaaagtttaaaggtaatttttggttggggatagtggtttatgtttgtaattttagtgttttgggaggttgaggtgggaggattatttgaagttaggagtttgagattagtttgggtaatatagtgagatttcgtttttattaaaaatgaaaataattgagtatggtgttattcgttagtaattttagttatttaggaggttgaggtaggagaatcgttagagtttaggagttggaggttgtggtgagttatgattgtgttattgtatattagtttaggggatagaaaaagattttgttttaggacgaaaaataataataataataataaaaattagagtttttttagtttttttgtagaatttttcgggagatatatttaagaaaattaagatgtagagaagtttatatatgataatttaatttttgtagaataatggtaaaattaatttttttagtatgtaggtatttatgtgtatgtgtgggtgtatgtatgtgatatataataggtttttaatatgggttatagggatagaatgatattaaaatagaaaaaggagaaaatttgtatttaagaaaatagtttatatgatataattttttttttgtgtttgtgtaaatggtatttttatgtatatgtattttgtaaaattaaaaagagttatgatttggtcgggtatagtggtttacgtttgtaattttagtattttgggaggtagaggtgggaggattatttgaggttagaagttcgagattagtttggttaatatggcgaaatttcgtttgtattaaaaatataaaaattagttgggtatggtagtgtatatttgtaattttagttattcgggaggttgaggtaggagaattgttttaatataggaggtaggggttgtagtgagttacgattatattattgtattttagtttgggcgatagagtaagatttcgtttaaaagagaaaaaaataaggtttgtaattttagaattttggggttcgtaaattatttgaggttaggatttcgagattagtttggttaattaatatggtgaaattacgtttttattaaaaatataaaaattagtcgggtttgatggcgggtgtttgtaggtttagttattcgggaggttgaggcgggagaatcgtttgaattcgggaggtagaggttgtagtgagttaagatcgggttattgtattttagtttgggtgatagagcgagattttttaaaaaaaaaaaaaaaaaagttaacgattttaaaaacgattgagagggaatgtttaatgttttttgatgttattaaggaagtataagggaatttgtttagaagttggaaaatgtttaagagtgtgggaaaataaagatttagtgattatcgtcggtgttggttagtcggagaaggttttgtggaaggtttggaggggagagaggggtagttggatgtttttgggttacggtcgttttttgatttttgcgttttttttttttgtttcgggagaaataatgtttttttgggggatgaaaagtatttttttgtgcgggttttaattgttatgttgttgtgttaagggagtgagtggtaggcgggagtagtagttgggtatagttaatgttaggtagtggtgtttatttttttaggacggtttagttagttggtttttgggagcgttgtttatttttgtttttagttgggcgtttgtagaggaatcgattattcgtggggttgggggaggttggttggaggaggagaaaggggcgggtatttgggagggttttagttatttttagaggtttatttattttattttttttttttttttttttttttgttttttagattgttagtattaataaggttattaatacgtaggaagtggttgtaaaggaaaaatacgttagaaatatttttttggatgttgtttggaagatcgattttgagggaggttagtttatggggattgaggttagggttaggttgttttgtttagttttaggaaggggtaattttgtataggttaggtttttgtagtttttgatgacggtagttttttagagagggttggttgtagagattatagatttttagggtggtagatattaaaaaggttgtggagtttaggttttttaatttgttaaagattttgtttttttttttaaggatttaagtatttttttttttttttttttaaaaggggttttgtcgtgttgtttaggttggagtgtaatggcgtgattatagtttattgtagttttaaatttttgggtttacgtaattttttcgttttagtttttcgagtagttgggattataggtgtgtattattatgtttggttaatttattttatgatttttagagatggggtattgtttattgtttaagttggttttaagtaatttttttttttttgtaattttaaagtgttggaattataggggagagttattgtatttggtcgatttaagttttgtagaattttatagttatttgaaagttatttttttttgagagattttttgggggttaggagggatttttatttatatttaaagttttttaggttttttttttgtttttataggaatatagggattatttttttgggggttgtataattaatagttatttttttttttgagtatgaaagtaaaaaaaaaagaaaaagagagtttttttttttttttttttttgagatagagttttattttgttgtttaggttggagggtagtggtatgttttcggtttattgtaatttttgttttttggatttaagcgatttttgtgttttagttttttaagtagttgggatgataggcgtgtgttattatattcggttaatttttgtaattttagtaggatcggggttttgttatgttggttaggttggttttgaacgtttggttttagttttttaaagtgttgagattataggtatgagttattatgtttggtcgaaaaaaagaaagttttagttttagaggttggttggttttaaattgaggtaggggttttttattttcgtgaataggtttaatttatgttagggggaagaagataagagttttgaagtggattagggaatgggtgatttgaaagttttttgtaagtttattatatttaggagtagtttgtggttttgtagagaggtgtaggattatgttggttgatgaatttttaggaatttgtttttgagttgtagaatttaggaattggagcgtttaatttttaaaggttgaaggagagagtttgttaggggggtggttaagtttttaattttttgtgtgttgggttagagtaaggtggagtttcgggtaagtagagttgggatttttttttttttttttttgagatagagttttgttttgtcgtttaggttggagtgtagtggtatgattttagtttatcgtaattttcgttttttaggtttaagagatttatttgttttaattttttaagtagttgggattataggtgtgtattattatttttagttaatttttgtatttttagtagagacggggttttgttatgttgtttaggttggttttaaatttttgagtttaagtaatttttttgttttggttttttaaagtgttggaattataggtatgagttatcgcgtttaatttcggaggtcgtatttagttttagaggttggatttttgtttgtagtgggaagtttttttttatttgggtttttggttattgtgttatagttaggtaagttagagtagtttgtttcgaagttttttagttttaatttttagaggcgattttttaggttagatagttagagaagtttagtattgtttagtgtgatatatgaattgttgtttgttagagggaaagtagtttgtttttagtgggaagatgttttggttggaattaggatggcggttgtagaatttttttggggtaatttagaagtttagttttgtgcgagtttagttagattttgttttttttttttttagaaagatataggttttttggttttttgtattacgtttggtatttttgcgatgatttaaagtaaattaagaaaagtttttattttaaacggtttagtggatttttttagaggaaatgatttagttttgatttttatttacgaataatttgtgattaatttgataaaagatatgagtaagggagagatagttattattaggtagtgtgttgtttaggataagatatgggtgtagagaggttaggtttgtagcggtagggttaggttatatgttgtcgggaggttttttgggaggagggaaggggttttgtaaggagattttgatattttgttattggaattttcgggtttattttgggattttgagtggggtttttatgagttttaggttattttttgtttaattaaaggttggataaagaagattttaggttaggtgtggtggtttatgtttataattttagtattttggaaggtggaggcggatggatgatttgaggttaggagttcgagattagtttggttaatatggtaaaatttcgttttattgaaaaaataaaaattagttaggtgtggtggtaggtatttgtaattttagttatttgggaggttgtggtaggagaattatttgaatttgggaggtagaggttgtagtgagtcgagatcgtattattgtattttagtttgggtaataagagtaaaattttgttttaaaaagaaaaagattttaaagatttaatagtttagttttaatattttatgagtttttgatttataatttttaaatggtgaataaatgttgaaaaattaattttatatagtagggtttgaaatgtttaattaaagatattttaaagtttttttttttttttttttttttgaggtagggttatgtattgttatttaggttggagtgtagtgatataattagttggaggtttattgtagtttttaatttttaggtttaagtgatttttttattttagttttttgagtagttgggattataggtatatgttattatgtttggttaattttttatagagatggggttttattgtggtttaggttggttttgaatttttagttaggtttaagtagttttttcgttgggttttttaaagtgttgtaattataggcgtgagttattatgtttagcgtatttatttattattaggttttttattagttgttttagatataaattgaataagtattaggaagtttgattttagaaatgttgtttatatatttattatagatgtttaaatggtgaataggttggttcgttattttggtatttatttttggagggttggggattgagttttattttttttatttttttttttttttttttgaatggattttataggttttgatatatatttggggtataaaaatgtttatatgtgaaagaatgttagaaaggtattatttttgaattattttagaaatcgtttttatattaaggttaggtatagtggtttatatttgtaattttagaattttgggaggttaaggtgggtggattttttgaggttaggagttcgagattagtttgagtattatggtgaaatttcgtttttattaaaaaaaataaaaattagtcgggtatggtggcgggtgtttgtgattttagttatttgggaggttgaggtacgagaattatttgaatttgggaggtggaggttgtagtgagttaagattgtgttattgtattttagtttgggtaatagagcgagattttgtttaaaaaaaaaatagaaagaaagaacgaacgagagagagagggagggaaggaaggaagggagagagagaaagaaagaaaggaaggaaggaaggaaggaaggaaggaaggaagaaagaaagaaagaaagaaagaaagaaagaaagaaagaaagaaagaaagaaagaaagaaagaaaggatttttatattaaaagttgattttagtttttagatttaaatatttgtttaagtttatttttttttaaatgaagatgttatcgaggaaaggagttttatggtattttttagtttagaagtaaaataatatgtgttttgggtgagttatttagttttttatttgagatgagtttttttgttttaaatgatagtgtatttgcgatttagttttgttgagtaaagtttaaagtttcgggtatagagttgttttaataattgatagtgtttagttattgggtttgtgaattttgttgaagtatataattataaaagtggaaattttttttttattttaaaaagagtttattaatgatagagatttggaatagtcgaatttaaaattatgtgaggttagagggatatttgtttatttttgagatggagtttcgttttgtcgtttaggttggagtgtagtggtgtaattttggtttattgtaatttttattttttaggtttaagtgatttttttgttttagtttttcgagtaggtgggattataggtatgtattattatgttcggttaatttttgtatttttagtagagacggggttttattatgttggttaggttggttttgattttttgatttcgtgatttgtttatttcggttttttagagttttgtgattatagtcgtgagttattacgtttaattttgatggatatttattatatgtaaattgataattatttgtagagggtgggtgtgtttggaattaggtttggggagaagtggttttaggattttatatatggggaatttaaggtgtggagagattgaaggtgattttgaatagggttaggtaggtttatggaagaagtcgggtgtttaggtttatggaaagggtttttgttgttgttgttgttgttgaggtagagttttgttcgttgtttaggttggagtgtaatggtatgatttcggtttattgtaatttttgtttttcgggtttaagtaatttttttgttttagttttttgagtagttgggattataggtatgcgttattatattgggttaattttgtatttttagtagagacggggttttattatattggttaggttgattttaaattttgattttaggtgattcgttcgttttagttttttaaagtgttgggattggaggtgtgagttatcgcgttttattttgatggatatttattatatgtaaattgacgattatttgtagggagtgggtgtgtttggaattaggtttggggagaagcggttttaggattttatatatggggaatttaaggtgtggagagattgaaggtgtttttgaatagggttaggtgggtttacggaagaagtggggtgttgaggtttatagaaagggtattttaaataaagattgttgttgttaaggtaagtaaaaggttggttaaatggaaaggggttgggagatgttgtttggaggaggagttaaggggttaaggtgtaggattttttgtagggattaaggtttttgatgaggagtagaagtatatttttattttttttttttttttttttttgagatggagttttgttttgttatttaggttggagtgtagtggcgtgattttggtttattgtaatttttatttttcggatttaagtaatttttttgttttagttttttgagaagttgggattataggcgtttatcgttacgtttagttaattttgtatttttagtagagatggagtttcgtcgtgttggttaggttgattttaaatttttgagtttaggtgatttatttattttggttttttaaagtgttgggattataggcgtgagtttttgtatttggtttgtatatttttatttttaataatgtataagaaagaatttgaggaagtttttaaatgttgtttaaaagttaggtgttataaggttagatatagtggtttatgtttgtaattttagtattttgcgaggttaagaggggaggattatttgaggttaggagtttgagattagtttgggtaatatagtaagattttatttttattaaaaatttaaaaattagttaggtatagtggtgtatgtttatagttttagttatttgggaggttgaggtaggaggattgtttgagtttaggagtttgaggttatagtgagttatgattatattattgtattttagtttgggtgatagagtaagattttattttaattattataataaatagttgtagttattttcgaaggatatattattaatttagtattttcgtagaaaggataatttaatattatcgtggtttatagggtatttgtgtaaattagaaaaagatatattttttttttaagacgtttatatttcgggaaattgtttatttaagtggattttattaaaataagtatttttatttgttttaaaatttttagaaggaatgtatagttttgtggtgttttagttttgagcggcgttttttttaaggtattgttaattacgatttgtattattgttcggttttttgtagtggttgtgtgtaggtttggttttttgtagtggttgggtgtagtttttattttttgtgatggttgggtgtaggtttagttttttgtagtggttgggtgtaggtttagttttttgtagtgattggtagagtttattcgttgttttttataatttttttttatt

SEQ ID NO: 868 - DNA, 11729 bp, Artificial Sequence
  chemically treated genomic DNA (Homo sapiens)
ggtgagggggggttatggaaaataacggatgggttttgttagttattgtaggggattgagtttgtatttagttattgtaggggattgagtttgtatttagttattataggggatagaggttgtatttagttattgtaggggattaagtttgtatatagttattgtaggggatcgagtagtagtgtaagtcgtggttggtagtgttttggagggagcgtcgtttagagttaagatattatagaattgtatattttttttgggagttttagggtagatgggaatatttattttaataaaatttatttgagtagataatttttcgagatgtaagcgttttgagagagaggtgtgtttttttttaatttgtataaatattttgtaggttacggtggtattgggttgttttttttacgagaatgttgagttgatgatgtgtttttcgggaataattatagttatttgttgtggtggttaagatagggttttattttgttatttagattggagtgtagtggtgtgattatagtttattgtaattttaaatttttgggtttaggtaatttttttattttagttttttaagtagttggggttataggtatgtattattgtgtttggttaatttttaaatttttggtagagatgagattttgttatgttgtttaggttggttttaagtttttggttttaagtggttttttttttttggtttcgtaaagtgttggggttataggtatgaattattgtgtttggttttatgatatttaatttttaaataatatttgagggtttttttaggtttttttttatgtattattaaaagtaagggtgtgtaagttaggtgtagagatttacgtttataattttagtattttggggggttaaggtgggtggattatttgagtttaggagtttaagattagtttgattaatacggcgaaattttatttttattaaaaatataaaattagttgggcgtggcggtgggcgtttgtaattttagttttttaggaggttgaggtaagagaattgtttgaattcgggaggtggaggttgtagtgagttaggattacgttattgtattttagtttgggtgatagagtaagattttattttaaaaaaaaaaaaaaaaaaaaagtgagagtgtgtttttgttttttattaaggattttggtttttgtagggagttttgtattttgattttttggttttttttttaggtagtattttttagtttttttttatttagttagttttttgtttgttttgatagtagtaatttttgtttaaaatgttttttttgtaaattttaatattttatttttttcgtaaatttatttggttttgtttaggggtatttttaatttttttatattttaaattttttatatatggaattttggaatcgtttttttttaggtttaattttaaatatatttattttttgtagatagtcgttagtttgtatgtaataaatgtttattagggtggagcgcggtggtttatatttttaattttagtattttgggaggttgaggcgggcggattatttgaggttagagtttgagattagtttgattaatgtggtgaaatttcgtttttattaaaaatataaaattagtttagtgtggtggcgtatgtttgtaattttagttatttaggaggttgaggtaggagaattgtttgaattcgggaggtagagattgtagtgagtcgagattatgttattgtattttagtttgggtaacgagtaaaattttgttttaataataatagtaataataaaagttttttttataaatttgaatattcgattttttttataaatttgtttggttttgtttagggttatttttaatttttttatattttgaattttttatatatgggattttggaattatttttttttaggtttgattttaaatatatttattttttgtagatagttgttagtttgtatgtaataaatgtttattagggttgggcgtggtggtttacggttgtaattataggattttgggaggtcgaggtgggtagattacgaggttaggagattaagattagtttggttaatatggtgaaatttcgtttttattaaaagtataaaaattagtcgggtatggtggtgtatgtttgtaattttatttattcgggaggttgaggtaggagaattatttgaatttgggagatggaggttgtagtgagttaagattgtattattgtattttagtttgggcgatagagcgagattttattttaaaaataaataaatgtttttttggttttatatgattttaagttcggttattttagatttttgttattagtgagttttttttggagtgaggagagaatttttatttttgtaattgtgtgttttaataagatttatagatttagtaattgggtattgttagttgttaggataattttgtgttcggaattttaggttttatttagtaaggttaggtcgtaagtgtattgttatttagggtagaaggatttattttaggtaggaaattaaatgatttatttagagtatatgttattttgtttttgaattggaagatattataaagttttttttttcgatgatatttttatttagagaggggtgggtttaaatagatgtttgggtttggaagttaaaattagtttttggtgtaggagtttttttttttttttttttttttttttttttttttttttttttttttttttttttttttttttttttttttttttttttttttttttttttttttttttttttttttttttttttttttttttttttttttttttttttttttttttcgttcgttttttttttttattttttttttagatagggtttcgttttgttgtttaggttggagtgtagtggtataattttggtttattgtaatttttattttttaggtttaagtgattttcgtgttttagttttttaagtagttgggattataggtattcgttattatgttcggttaatttttgttttttttagtagagacggggttttattatgatgtttaggttggtttcgaatttttggttttaagagatttatttattttggttttttaaagttttgggattataggtgtgagttattgtgtttggttttggtgtaggagcgatttttgaaataatttagaaataatgtttttttggtatttttttatatataagtatttttatgttttaagtatgtgttaaagtttgtaaaatttatttagggagaaaaaaaagaaaataagaaaaataagatttagtttttagttttttaggagtgaatattaaggtggcgggttaatttgtttattatttaggtatttgtgataaatgtgtaagtagtatttttgaagttagattttttaatgtttatttagtttgtatttaaggtagttgataaaagatttgataatagataaatgcgttgggtatggtggtttacgtttgtaattgtagtattttgggaggtttagcgggaggattgtttgagtttagttaggagtttaagattagtttgggttatagtgagattttatttttataaaaaattagttaggtatgatggtatgtgtttatagttttagttatttaggaggttgaggtgggaggattatttgagtttaaaagttggaggttgtagtgagtttttaattgattgtgttattgtattttagtttgggtgatagtgtatgattttgttttaaaaaaaaaaaaaaaaaaaaaagttttgggatatttttaattaggtattttaaattttattgtatggagttgattttttaatatttatttattatttagaaattatgaattagagatttatagaatgttagggttggattgttaaatttttgaaatttttttttttttgaaatagagttttgtttttgttgtttaggttggagtatagtggtacgatttcggtttattgtaatttttgttttttaggtttaagtgatttttttgttatagttttttaagtagttgggattataggtatttgttattatatttggttaatttttgtttttttagtaggacggggttttattatgttggttaggttggtttcgaatttttgattttaggttatttattcgtttttattttttaaagtgttgggattataggtatgagttattatatttggtttgaaattttttttgtttaatttttgattgaatagaaagtgatttaagatttatggaggttttatttaaggttttagagtgagttcgagagttttagtggtagaatgttagaatttttttgtagggttttttttttttttttagggagtttttcggtagtatgtgatttgattttgtcgttgtaggtttggtttttttgtatttatgttttgttttgaatagtatattgtttgatgataattgttttttttttatttatattttttattagattgattataaattattcgtaggtaagggttagggttgagttattttttttgagaaaatttattgggtcgtttaaaataaaggttttttttggtttgttttgaattatcgtaagggtattaaacgtgatgtaggaaattaaggggtttgtgtttttttggggaaaaaaagagtaagatttagttaggttcgtatagggttggatttttgggttattttagagaggttttgtagtcgttattttaattttagttaaagtatttttttattaaaggtaagttgttttttttttagtaaatagtagtttatatattatattaagtaatgttgggtttttttggttatttaatttggagggtcgtttttaggggttgaggttagaaggtttcgggataagttgttttggtttgtttggttgtgatatagtaattaagagtttaggtgaggagaagttttttattgtagatagaagtttagtttttgaggttgggtgcggttttcgaagttgggcgcggtggtttatgtttgtaattttagtattttgggaggttaaggtaggaggattgtttgagtttaggagtttgaaattagtttgagtaatatggtaaaatttcgtttttattaaaaatataaaaattagttaggggtagtgatatatatttgtggttttagttatttgggaggttgaggtaggtggattttttgagtttggaaggcggaggttgcggtgagttgagattatgttattgtattttagtttaggcgatagagtaagattttgttttaaaaaaaaaaaaaaaaaagttttaattttgtttgttcggaattttattttgttttggtttagtatatagagagttaaaagtttagttatttttttggtagatttttttttttagtttttggggattaagcgttttagtttttggattttgtaatttaaaggtagatttttagggatttattagttagtatggttttgtatttttttataaagttataggttgtttttgggtgtggtgggtttatagagggtttttaagttatttattttttaatttattttaaggtttttgtttttttttttttggtataggttgaatttgtttacgaaggtagagagtttttgttttagtttaaggttaattaatttttgaagttaagattttttttttttcggttaggtatggtggtttatgtttgtgattttagtattttaggaggttgaggttaggcgtttaaggttagtttggttaatatggtaaaatttcggttttattaaaattataaaaattagtcgggtgtggtggtatacgtttgttattttagttatttgggaagttgaggtataagaatcgtttgaatttaggaggtagaggttatagtgagtcgagaatatgttattgttttttagtttgggtaatagagtgggattttgttttaaaaaagaaaaaaaaaaaaaatttttttttttttttttttttgtttttatgtttagaaaaggagataattattgattatgtaatttttaggggagtggtttttgtgtttttgtaaaggtaaagaaaggatttggagggttttgaatataggtgaagattttttttgatttttaggaggttttttaaaggaaagtaatttttaagtgattatgaggttttataaagtttgagtcggttaggtgtagtggtttttttttgtaattttagtattttggggttatagaggagggaggattgtttgaggttagtttgggtaatgagtaatattttatttttaaaaattataaaataaattagttaggtatagtggtgtatatttgtagttttagttattcgggaggttgagacgagaggattgcgtgaatttaggagtttgaggttgtagtgagttatgattacgttattgtattttagtttgggtaatacggtaagattttttttggaaaaagaaaaaaaggagtgtttaagtttttaaggaaaggagtaggatttttggtaagttgaaaggtttgggttttatagtttttttggtgtttgttattttgaaggtttgtggtttttgtagttagttttttttgagaagttgtcgttattagaagttgtagggatttggtttgtgtagggttgtttttttttggagttgagtaaggtagtttggttttgattttagtttttatgagttgattttttttagggtcggttttttaagtaatatttaaaaggatatttttggcgtgttttttttttatagttattttttgcgtattaatggttttattgatgttgatagtttgaaaaataagaaggggggagggaaaggaggatgagatgaataagtttttgagagtggttgagatttttttagatgttcgtttttttttttttttttagttaattttttttagttttacgggtggtcggtttttttgtaggcgtttagttgggggtagaggtgggtagcgtttttaggagttagttggttgggtcgttttgagggagtgggtattattgtttggtattggttgtgtttagttgttgttttcgtttgttatttatttttttggtataataatatggtaattaaagttcgtataaagagatgttttttattttttagggaaatattatttttttcggagtaggaggaagaggcgtagagattagggagcgatcgtggtttaagagtatttagttgttttttttttttttttaaattttttatagagtttttttcggttggttagtatcggcggtggttattaagtttttgtttttttatatttttgggtattttttaatttttaagtaaatttttttgtatttttttaatgatattaagggatattaaatatttttttttaatcgtttttaaaatcgttaatttttttttttttttttttgaggagtttcgttttgttatttaggttggagtgtagtggttcgattttggtttattgtaatttttgtttttcgggtttaagcgattttttcgttttagtttttcgagtagttgggtttataggtattcgttattaaattcggttaatttttgtatttttagtagagacgtggttttattatgttggttggttaggttggtttcgagattttgattttaggtgatttgcgaattttaaagttttgggattataggttttgttttttttttttttgagcggagttttattttgtcgtttaggttagagtgtagtggtgtgatcgtggtttattgtaatttttgttttttgtgttaaagtaatttttttgttttagtttttcgagtagttgggattataggtgtgtattattatgtttaattaatttttgtatttttagtatagacggggtttcgttatgttggttaggttggtttcgaatttttgattttaaatgatttttttatttttgttttttaaagtgttgagattataggcgtgagttattgtgttcggttaaattataattttttttaattttgtaaagtgtatatatataggagtattatttgtataaatatagaaaagggattatattatgtaggttgtttttttaggtatagatttttttttttttttgttttgatgttattttatttttataatttatgttaaaaatttgttatgtattatatatatatatttatatatatatataaatatttatatattgaagaggttaattttgttattgttttataaaaattagattgttatatatagatttttttatattttggtttttttgaatgtatttttcggaaaattttgtaaaggggttgaaaaaattttagtttttattattattattattatttttcgttttgagatagggtttttttttgttttttaagttgatgtgtagtggtataattatggtttattatagtttttaatttttgggttttagcgatttttttgttttagttttttgagtagttgggattattggcgaatgatattatgtttagttatttttatttttggtagagacggggttttattatgttgtttaggttggttttaaatttttggttttaagtgatttttttattttagttttttaaaatattgggattataggtatgagttattgtttttagttaggaattatttttaaatttttaggtgtgataaatatgttgtggttaatttttaaagagtttgttttttttttaaataggtttattttgaaatatttattggtaagatgatataatgtttaagatttattttaaataatttggagaataaaaagtttggtggttgatggtatagatttacggattagtaaattatagttataagttataattagattagattaatatttggttttgaaaataaagtttatggtcgggtatagtggtttatgtttgtaattttagtattttgggaggttaaggtgggtggattatttgaggttaggagtttgagattagtttggttaatatggtgaaattttatttttattaaaaatataaaaattagttgggcgtggtgacgggcgtttgtaattttagttatttgttattcgggaggttgaggtaggagaattgtttgaatttgggaggtagaggttgtagtgagtcgagattttataattgtattttagtttggttgagagagtttttagcgataataaaatttttaataataataataaaaaaaaaaagaaaaagaaagaaagaaagaaaagaaattttattagaatttatttatttttatgtatttacgtatttatttaatattagttgaggttgtttttgtattataaaggtagagttgaatggttgcgatggagattatgcggtttgtaaagtttaaaatatttattaattggttttttgtagaaaatgttgattttttgtttataggatatatgtttggttataagttttttgttgatgttggggttatattagggttttttggattagtttttatatttgtatacgtttgaatttttttataatgaaaggttaaaaaaaaaaattttgatttagtaattttatttttaggaatttattttttggaaataaaaattttttttttttttttttgtttagatagagttttattttgttgtttaggttggagtgtagtggtatgattttagtttattgtaaatttcgttttttgggtttaagcgatttttttgttttagttttttaagtagttgggattataggcgtatgttattatgtttggttaatttttatatttttagtagagatagggtttcgttatgttgattattttggtttcgaatttttgattttaagtgatttattcgtttcggttttataaagtgttgggattataggcgtgagttatagtatttggttagtttttttttttttttttttttttttttttttaaaagagatagggtttcgttgttttgttatgttgtttaggttggcgggatttgaatatttggattttagtgatttttttattttagttttttaagtagttgggattatagttgtatattgttatatttagttgttgtttttttaaatttttagatatgttttttttttttttttttttttttttttttgagacggagtttcgttttgttattaggttggagtgtagtggcgtgatttcggtttattgtaatttttgttttttgagtttaagcgatttttttattttagtttttcgagtagttgggattataggcgtttgttattacgtttagttaatgaatatgtttttaaatttatatttttttatatattttttttttttgattagatttgatttttaaatagtataatttttgttgtaagttgaattgtatattttcgttttataaaaatatataattacgtttaattttttttatttcgtatttatgaatatgattttatttataaatagggtatttgtagatgtaattagttaagatgaggttatattggagtagggttatattatggaatgtaatatgattggtgattttcgaagaagatgtagggatttagagatatatagggaggatgttgtatgaaatgagatagagatgagtgatgagtttataagttaaggaatgttaaggatagttagcggttacgagaagttagaaagaatttttttcggtcgggcgtagtgatttatatttgttattttagtattttgagaggtagaggcgggaggattatttgaggttaggagtttaagattagtttggttaatatagcgaaatcgtgtttttattaaaaaatataaaaattagttgggtgtggtggtgtgtgtttgtagttttagttattagggaggttgaggtaggtggattgtttaagtttaggaggttgagagtgtagtaagtagtaattacgttattgtattttagtttgggtgatagagcgagatttttaaaaaaaaaaaaaaaaatggagttttttttagagtttttagagatagtattgttttattttgtaagacggtgagagaatgtagttatttaattagtgggaatttgttgatagttttaggaaattaattatagggttttttttttattagatggggttttttgggaggataagaatgatatgcgatgttttttttatagtatatgatttggggtttttttgagtatagtcgttggttttgtagggtgagcgtaagagtagttaggaaggaatttttggttagtattttgggaagttgaggtgggaggatcgtttaaggttaggattttgagattagttcggataatatggtgaaattttgtttttataaaaaatataaaaattagttaggtgtggtggtgtataattgtagttttagttattagggaggttgaggtgggaggatcgtttaagtttagtaggtagaggttgtagtgagtcgtgatcgtttttattgtattttagtttgggtaatagagtaaaaattttgttttaaaaaaaaggaaaaaaaaaaagatgtaagtaagaagtgaaaagtttatttttttaaatttttttatgaagtagtattttttttttatggagacgtagtgtttatagtttttttttagtacgtttttttttggattttagtttttagtgatagaattgttttaagtattgttttttttgtatatttttttaagtgtattatagtcgtttaaattatgttttttttttggtattataggttaggggtattatgatataggttggggtattatgataatggtaaaattttggttgtagatagatttttgggtaaagtttttatattttcggagtttattaaggttgtttgtagttagaaaggatttataag

SEQ ID NO: 869 - DNA, 8131 bp, Artificial Sequence
  chemically treated genomic DNA (Homo sapiens)
aaattgatttgaagttgtaatgaaaaattgggggaggtggttgttgattaggaaaggattttgggataggataaataggtatatttaagatttttttaatttttgattttgtttaaagttatttttttttttaatatgaaaacgaggtatgtgttagattggggagttagtagatagttgggatggaagatagtataaatattaaggttttgtttttgtttaggtttttttgtatataattttttgagttagaagaaggtaagatggtagttttattgttttttttttttatagataatgttttgttgttggatggtattgatttagtggttagtagtatataagaaatagttgttattttttgagtaattattacggtttaggtaatgtatgtggtttttatttaatttttatagtaattttatggggtataggtattattattttaatttttagatgaggaagtaaaggtttagagtaataaataagttattttttgtttatggtagtggaattatagtgtttttattttttatttttgaagaaaatgttatattttgattttagtattgattatttttttgttttttttttagtgaaaagtagtttattagttatgttttataagtttaattttcgtttgtttttttttttattaaatggtaatttattggaggtagcgttgtataaataggggatagtgtgtgtatttgtttgtttgaagataagaaaagggaaagggtatttttggaaagtgaattatttagtttaaaattgagtagtttttttaaaatatgagttagtagtaggagggtatggattagttagattaggaattataggtttaattattagttaatggggagttaagggaagaatagttatttattttttttatcgtttttttataatcgttttgtttgtttatagttttattttttttatgttgtgattttgtgagaggagtattagtgaaagagtgaagagataaagtataaaatgtgtgagattagtttatatttgtattttgtttttgataaaagttaatttttttgagatttggtttttttgtttataaaatgggaaaaaattatattaatagggttttaaggattattataatgtggataaagttttgatttagtataatgttattatatagaagaatgagttagtggtagtagttattaatgtgatgttagtttatgtgttataaatgatgttgtattgaggggtggagggatgggggacgggtgtagatgtaagaggagatagtttttagaggaatgtgtatttaggagggattattcgggttttattaattattaggtttttataggaaatttgggttttaggtatttagagtttttttagggtttttggattttttttatttttgaaagatgagaaatagttgttttgttgatgttgttaatttacggagagttgggaagttttataaattttataagttattgtcgtaaattggaagagatagagggggatttttttttgttaggcgttgtagttgtgtttttttatttagtttttatagtagttttagtagaggttgtgtttcgtttattttttttaggtattcgttattttgttgtatatttatagagttttgttgtaagtatttgagattttgtttgaggattttttttggtttgtgttggtataagttgagagtattagggagttagtgtttttgggatagtttttagttagtggaagtgggaggatagatattttagtttttttatttagtgagggataattttaaggtatattttatttattttttagggttttttgtgggagtgaatttttttaagtttttagtaataattaacgtatatttttttggtttttttttttttttatttggtttttagttttttttttgtatttttttgattaggattgggattagggtgatgagtttttatttttgggtttatttaagtgtaaggttggtattcgtatgaatttgagagggtttttttatattttgtattttaggtatattatttgtattgttttgattttggttttgttttggattattttttaaataaagttatttgtatttaaattaggtttgtttttgggtttatttaatttaaagtaaattttatgaagatattagtttttaagttttatataaggaaaatcgaggtttagaggaataagaaatttgtttaaggttttttagttggtaatgagatgggattttgaaattaggtttgtttgattttagagttgaagttttttgtattatagtatattattttttattttttattttagttataaaattaatgatttaagggaaattttaggtttggatgagtttatttttgtttgtgaattagggtagttattggttttaaggttgttagtagatgggaatttggggaggggaaggtaggtagtaagtggatgagagggttgtagttgttagtggaaagatggattagtggaaagattgttgaaattatatgtattaggaagatagtaagagtttgtttgtttttttttagttttaaaagttttggattttttttttttttgagatagttttgttttgttatttaggttggagtatagtggcgtgatttcggtttattgtaatttattttgttttttaggttcgagtaatttttttgttttagtttttcgagtagttgggattataggtgtatattattacgttcggttaatttttttaatttttagtagagacggggttttattgtattggttaggttgattatgaatttttgattttaagtgattcgtttatttcggttttttaaagtgttgggattataggcgtgagttattatgtttggttagtcgtggattattgagattgtgggagggttttttaatttaataaaaattaattgatatttgttttttgttagataaagaattgaggtttgaggttgtacgggtgaataagaaatattttttgggagtttatagtataatggggaagaagaatatataaatagatgtttttaataaatagatataaatgtagtgatataagaatatgtattataatacggaattaataagtagattatatttagttggggtcggttaggaggagttttttagagaagggttttttattgtcgttgatgattataatttaagggatgaggaaaaatgaggtgaaaaggtgggagaggttaaagggagggttattttagataagttagtgtaaataaagatataatagaagtagttcgatgtgtgtaggagagttgtaaggtatatttacggtataaagggtgtggaataaattgggggagtttattgaggatttttgtgtttggtatgggtattgtgagtggtgagaagtttgtgagtaagcgtagagggaaggtttgattttttagtttatcggtagtgttttggttgtgtttattttttttttagtaaattgtttttttttattttttagttttatttttatagttggagattggtattaaggggttatgagggaatttcgtgaggatttgtttttttttttgttggttagtggttatttggtgtttgaagagaatcgttggtagttgtagtgtttttgttatagttaggttgttttagttgtttatagattttaagtttagttatttttttttttttattggttttgatttagattttttttggtattttgattagggaattaggatttttgtttttgggggtttggatatagattttttagaaacgtagatgaagagttttggttatgtttgttaggggtatatttttattttggtttaagaaatggtaggttatttgtatgaattatagttgggttttttatagttagttttatattttttttttttaattgaataaagttgaaagggattgggattttaggttaggtaggatgttgtgttgtttgtgatagttattttattttttgttattttattttttatttttttgttttttatagtttatatgtttggttggtatttagtaaattttatagtaggattgatgtttggtatgttttttggtttttttatgttattattgatagaggagttattatttttggtttttattttgatgttatgtggaggtttattatttgtggatagagttattgttgataaggtagtttgaagttttaaagtgtatttatgtttttaataaagattgttgtaggttgtttagtattttatattggtgttttaaggttttgtgtttttgaggagaaatttttatagaaaaatagtttgttcgttaatagttttatagtagtttaatatttttttttttttagtagagaagatttaagatgtgaatttattttttttgcgtagtttatagattaaaggttagatttcgtagtttgtttgttatttttttttttattatatatttttattttggtgtattttttttaggcgtttggagttgtattttattgttgtgtgtgtgtgatttgtggttgtgtatatgttttttattttgttaaggattatttttgttagtatattgttgttttttttttaagatttagtttttttagttagttttgtttattttttgtagagttagtttttttcgtttgtgtttttatattgttttttgtttaaaagtatttattataatttttttaggttaggcgtttttagttttttttaggggcgagttattattttagaatttattatatttgtaaaataaatagtttttagtattgtagagggaatggtttaaaattttagatttagtttaacgttttatttcgcggtaattattttgtttaagtttttattatagttttgtttagtttgggttatttttagggtaggtttggaaggaagtgtagttttttgaattagttgatgtttggtaagtggtggtggaggaaaagggtggggtttgaggatattataattcgggttatttttgagtgttgtttttggttattggggtgttttatattgttagataagagtttagatttgaggagagtgattagtttttttgtgttttaggtaagtatttcggtttaaattacgtgttgttttttttatagttgttttgttttttattttttcgtttggttaatattaggtgaagtggatatcggaaagattaagttagtggtttttttttttgtttgagatggggtttttttttttattatttagattggagtatagggtatagttaggtttattttagttttgattttttgggtttaagtgatttttttattttagttttcggagtagttgagattataggcgtatattattatatttagttaatttttgttatttttttttagcgatggcgttttgttatgttgtttaggttagttttatatttttgggtttaagtagtttgtttgttttagttttttaaagtgttgggattataggtgtaagttattatatttagtttgttagttggttttcgatggtagtttttaatattagtagaggtttttggggtattttttaggaggaaaatttatttcgtgtagtttatttagttaagggaagttacggggtttttaggtaaatagattttgggttttggggatattgtagtgaaggagatatgtttttttttatagggaattttagtgggaagagatagagttgaatatatttatttagtatataaatattagggttatttggggattgttttatagattttgttatgtaaaaatgttgaataaatattgaatggatgagggaatgaatgagtgagtgaatgaataaatgaattagttgggttttgagaaagatacgtgtgtagtttttagtttttttcgaaggtaattgttttagttattttattttatttttgaaatagatttgtagtatagaataagaattttatatttttatttgatagatttggaaatttagtataggtatgtatggtttggggagatttattagaagttgatttgttgttttattaaataaaaaattatttattttttttgtttttaattttggaaaggtatattagtatatatttatattagattttgtgtcggttatgagtgtagaggtgattaagttgggtggggtaaggaggtgaagaaattagaagtagagttgttagtttaggaggttgttgtaataattaggtcggaggatggtttggtgtagtgtgtgggaatggggaggaggggatgtagaggagagtttttagagagtttgagatttaattgtatagaggaggtgagggtgagggatgcgcgtaggtagttcgaacggtcgtgtgagtgagtatatttcgatgtttttagttaaggtggagaatagaagagttttgtgggggtaaggtgatggaaaaatgagtatggtttgttgaatttgaggagtttttttattatttagatagtgatgtttaatagattattgggatttaggattaggttgaggttaaacggtagaatttgggagttttgatatagttattaatgaaattttgggaatgggcgagataaagggagtgtagagggagggtatgaacgaaatttgggaattttattgtttgaacggaacgagaaattatttgatgatagattatagagagatttaggaaggagatttaggagtagattgtcgtgaaagttataggatagggggaattttgtattaagagaatgattattggggttttgtatgtttgagagagggtagtagagttggggattgaggaaaaggtttgggatttggttgttagggaggttatcgtgtattacgtggaggttaaatttagtgagtatagtgggagtaggtaaggaggggagtgtagggttgggaaggtattatatttttagaagttttgttgttgtaaggaagggaggtaaagtgatttagtggatagatgtttttttttatattgggttttttgttgtgtttttttttttttttatttttaaagagtatttgatttattgagggtttttttgggattatggaaatagtaatattatttttagttcggatgagcgaagtatttgatatttttatagttttttatagtgtgtaaggattttaatttttttaatttttatagaattgagttttttatgttatagaggaaatggagaattatagagttttagtttagatttaattatataaatttgaatgtatatttgagtaagtttttttgttttcgtgattttattgttttatataattttttgatatatgttggttttattttatagatgaaaagtttggaggttgagatggggtgtagttgttttgtggagagtagggtttttatttttgagtatagggttttttttgttttgtattattttattgttaaaatttatttgatgtttatgttgtatattatattttataaagtatttttttaggtgttattttatttagtgtttataataattttgtgagggtagatattatttttttttgttttatggatggaagttgaaatttaaagaagttataaatgacgtttaaggttaggttattagtggaatttttttttgaagtatagatttatttttgtttatgatttttgttgtttttaggatgaaatttatgtgttttagtttggtataatggttgttttttttttagtttgtttgtttttttggtaggtttttggttttttttttgttttaagtttttagtatgtttttgattttttaattatagtagtatgtttatttattatatgtggttattttgtttattgtttgtgttaattatattgtgattgttgatgagattgtgaggtttttgagggtagggtttaggtttgttttatttgtattataacgtttagtatagtaggtattaggaattggtgaatgttaatgaatgatagaattaacgaatggtatttggattgaaattagtttttttagtgtttttttattagatatgtttgtgaaaaataagggttttttggttgattgttataggatttttgatggttggaggttttgaattttgtttttagttttttttttggttttttttaaaaggaaggaagttggtttgggttatagatttttagggtttatagagtaaatggttgatttaggttgtttttttttttttatagg

SEQ ID NO: 870 - DNA, 8131 bp, Artificial Sequence
  chemically treated genomic DNA (Homo sapiens)
tttatgggagaaaagggataatttgggttaattatttattttataggttttaggagtttgtaatttagattaatttttttttttttgaaggggattaggaaggaagttgggagtagaatttagaatttttaattattaaagattttgtagtagttaattagaaggtttttgttttttataagtatgtttaatgagagagtattggaaaggttgattttagtttaaatgttattcgttaattttgttatttattgatatttattagtttttgatgtttgttatgttggacgttgtggtatagatgaagtagatttaggttttgtttttagggattttatagttttattaataattatagtatgattagtataggtagtgagtaagatggttatatgtaatagatggatatgttgttgtggttgggaggttagggatatgttagaggtttggaataaagagggaattaaagatttgttagagaagtaggtaggttggaaaagggatagttattgtgttaggttaaggtatatgaattttattttgaaggtaataggggttatggataggggtggatttgtgttttagaaaggggttttattagtgatttgattttggacgttatttatgatttttttgaattttagtttttatttataaaataggaggaaataatatttatttttataaggttgttgtgagtattaaatagaataatatttggggaaatgttttatgagatgtagtgtgtaatataaatattaggtgggttttaatagtgaagtgatgtagagtagaaagagttttgtatttagaggtgggaattttgttttttataaggtagttgtattttattttaatttttaggttttttatttgtgaaatgggattaatatgtattaaagggttgtgtggggtaatgagattacgagagtaaaggaatttgtttagatgtgtatttagatttatgtagttgaatttgaattgaaattttatgattttttattttttttataatatgaaaagtttagttttgtgaggattaaaggagttagggtttttgtatattgtaaggaattgtagaaatgttagatatttcgtttattcgagttggaggtggtattgttgtttttatagttttaagggagtttttagtgagttaggtgttttttaggggtgggggaaaagggaaatatagtagagggtttaatatgggaagagatatttgtttattgagttattttattttttttttttgtaatagtagaatttttggaaatatagtatttttttaattttatatttttttttttgtttatttttattatgtttattaaatttggtttttacgtggtatacggtgatttttttaatagttaaattttaagttttttttttagtttttaattttgttgtttttttttaggtatgtaaagttttagtagttatttttttgatatagaattttttttgttttgtggtttttacggtagtttgtttttaggttttttttttgagtttttttgtagtttgttattaagtaatttttcgtttcgtttagataatggggtttttaagtttcgtttatgttttttttttatattttttttatttcgtttatttttaaggttttattaatagttgtgttagggtttttaaattttatcgtttggttttagtttaattttaaattttagtggtttgttagatattattatttggatggtggagaagttttttaaatttaataagttatatttatttttttattattttatttttataaagtttttttgttttttattttgattggagatatcgaagtgtgtttatttatacggtcgttcgggttgtttgcgcgtattttttatttttattttttttatgtaattggattttaggttttttaagagtttttttttgtatttttttttttttatttttatatattgtattagattatttttcggtttgattattataatagttttttaaattgatagttttgtttttagtttttttatttttttattttatttaatttgattatttttgtatttatggtcggtatagggtttggtataggtatgtgttaatgtgtttttttaaaattggaagtaaggggagtgggtagttttttatttaataaagtaataaattagtttttgataaatttttttaaattatatatatttatgttgagtttttaaatttgttaaataggggtgtggaatttttgttttatgttgtaggtttattttaaggataaaatgaggtaattggggtaattattttcgaaaaggattaagggttatatacgtgttttttttaaggtttagttagtttatttatttatttatttatttatttatttttttatttatttaatatttatttagtatttttatatgatagaatttgtgaagtaatttttaagtagttttaatatttatatgttaggtaaatgtatttagttttgtttttttttattgagattttttgtggggagggatatgttttttttattgtagtatttttagagtttagggtttgtttgtttaagggtttcgtggttttttttagttgaatgggttatacgaagtgagttttttttttgaaaagtattttagggatttttattgatgttgggagttgttatcgagaattagttggtaggttgggtgtggtggtttgtatttgtaattttagtattttgggaggttgaggtagatagattgtttgagtttaggaatgtgagattagtttgggtaatatggtaaaacgttatcgttagaaaaaaataataaaaattagttgggtgtggtggtgtgcgtttgtagttttagttatttcggaggttgaggtgggaggattatttgaatttaggaggttaaggttggagtgagtttgattgtgttttgtattttagtttgggtgatagagagagagattttattttaaataagaaagagaattattggtttaattttttcggtgtttattttatttggtgttgattaaacggagggatgaggaataagatagttgtggaaggaatagtacgtaatttagatcgaagtgtttatttgggatatagagaagttagttattttttttaggtttgagtttttgtttggtaatatgaggtattttaatgattaaaagtaatatttaggggtgattcgagttataatatttttaagttttattttttttttttattattatttattaaatattagttaatttaggaagttgtatttttttttaagtttgttttaagagtagtttaggttaggtaaggttgtggtgaaaatttgagtaagatgattatcgcgaagtggagcgttgaattgggtttaagattttgggttattttttttataatgttgagggttgtttattttgtaaatatagtgagttttgaggtggtggttcgtttttagaaggagttggaggcgtttagtttggaaaggttatggtaagtatttttgagtaagaggtaatgtgggagtataagcggaagggattgattttgtagagagtgggtagggttagttgaagaagttgagttttgaagaaagaatagtagtatgttgataaaagtggtttttgataaagtggagagtatgtgtataattataaattatatatatatagtaatgaggtgtagttttaggcgtttgaagagggtatattaaggtaggaatatatagtgggagaggaggtgataggtagattgcggagtttagtttttagtttgtaggttgcgtagggagagtaggtttatattttaggttttttttattggaagaaggggagtgttaggttgttgtggagttattggcgaataagttgtttttttgtgggaatttttttttaaaggtatagaattttggggtattaatgtagaatattagatagtttgtaataatttttgttgaaggtatggatatattttaaagttttaggttgttttgttagtagtaattttatttatagatagtaggtttttatatgatattaggatggagattagagatagtggtttttttattagtagtggtatgaagaggttaggaaatatgttaaatattagttttgttgtgaagtttattgggtattaattaggtatataggttgtgaaaggtagggaagtgggggatggggtggtagagggtagagtggttgttataaataatatagtattttgtttagtttgggattttagttttttttaattttgtttagttgggagaggagaatgtggaattgattatgaaaggtttagttgtgatttatgtagatagtttgttattttttgagttagggtgaggatatgtttttgataagtatggttagggttttttatttgcgtttttggaaggtttgtgtttagatttttaggagtaggggttttggttttttagttagaatgttagggaaagtttgggttaaggttaatggagggagaaggatggttgagtttgaggtttgtgagtagttgggatagtttggttgtagtagaggtattgtagttgttagcggttttttttagatattagatggttattgattaataaagggaaggataagtttttacgaggtttttttatagttttttagtgttaatttttaattgtagagatggagttaaggaatgaggaaaggtagtttgttgggggagaggtgggtataattagagtattgtcgatgggttgggaggttaggttttttttttgcgtttgtttataggttttttattatttatagtgtttatgttaggtatagagatttttaataagtttttttaatttgttttatattttttatatcgtgaatgtgttttgtagtttttttatatatatcgagttatttttgttgtgtttttgtttgtattgatttgtttggaatgattttttttttggttttttttatttttttattttatttttttttattttttaaattataattattaacgataatgaggagtttttttttgaaaagttttttttggtcgattttagttgagtgtggtttgtttattggtttcgtattatgatgtatgtttttgtattattgtatttatatttgtttattaaaggtatttgtttatgtgttttttttttttattgtattatgggtttttagagaatgttttttatttattcgtgtagttttagattttagttttttatttggtaaggaataagtattaattaatttttgttaaattgaagagtttttttataattttaatagtttacggttggttaagtatgatggtttacgtttgtaattttaatattttgggaagtcgaggtggacggattatttgaggttaggaatttatgattagtttggttaatatagtgaaatttcgtttttattaaaaattaaaaaaattagtcgggcgtggtggtgtgtatttgtaattttagttattcgggaggttgaggtaagagaattgttcgaatttgggaggtagggtaagttgtagtgagtcgagattacgttattgtattttagtttgggtgatagagtaagattgttttaaaaaaaaaaaaagtttagggtttttgaaattgagaggaagtaagtaagtttttattgtttttttggtgtatatggttttagtagtttttttattagtttatttttttattgataattataatttttttatttatttattatttgtttttttttttttaaatttttatttgttaataattttaaggttaatagttattttgatttataggtaaaaatgagtttatttaaatttgaaattttttttgagttattagttttgtgattgaaatgagaagtaggaagtagtgtgttatagtatagaaagttttagttttggggttaggtagatttggttttaaaattttattttattattaattgaaagattttagataaattttttatttttttgagtttcggttttttttgtataaaatttggagattgatgtttttataggatttgttttaggttaggtaaatttagaggtagatttaatttgaatgtaaataattttatttgggaagtgatttaggatagggttagaattagggtaatgtaaatgatatgtttagggtatagaatgtaaagagatttttttaggtttatacgggtgttaattttgtatttagatgaatttaagaataaaggtttattattttagttttagttttgattaggaaaatatagaagaggagttggaagttaggtaggaagagaaagaagttaaggaagtgtacgttaattgttattgggagtttagagaggtttatttttatagggaattttgagaaataggtagaatgtgttttagagttgttttttattgagtgaggaagttggggtatttatttttttatttttattggttgagagttgttttaggggtattaattttttggtatttttagtttgtgttaatataaattaagagaagtttttaggtagagttttaggtatttgtaataggattttgtgggtatatagtagaatggcgaatgtttgggggaaatgggcgaggtataatttttgttggggttgttgtaaggattaaatgaaaaagtataattatagcgtttaataaagagaagtttttttttattttttttaatttacggtaatagtttgtgaagtttatggagttttttagtttttcgtgagttggtagtattagtagaatagttattttttattttttagaagtaaaagaaatttaggggttttaggagaattttagatgtttgggatttaagttttttgtggaagtttgatggttgatggagttcgagtagttttttttgagtatatatttttttgaaaattatttttttttgtatttgtattcgttttttatttttttattttttagtgtaatattatttgtgatatatagattagtattatattaataattgttgttattaatttatttttttatgtgatgatattgtgttggattaaagttttatttatattatggtaatttttagaattttgttagtatgatttttttttattttatggataagaaagttaggttttagagaggttaatttttattagaagtagggtgtagatgtaggttgattttatatattttatattttgtttttttatttttttattaatgttttttttataggattatagtatggggagaataagattgtgggtaaataagacggttgtgaggaggcgatgggggaagtgggtagttgttttttttttgattttttattagttaataattaagtttgtggtttttggtttggttgatttatatttttttgttgttgatttatgttttagggaaattgtttaattttaagttaaataatttattttttagaagtattttttttttttttttatttttaggtaaatagatatatatattgttttttgtttatatagcgttatttttaataaattgttatttaatgaaagagaaaataagcgagagttaagtttatgggatataattgataaattattttttattagaagaaaaataggaaaataattaatattggagttaaaatatagtattttttttaggaatgaagagtaggggtattgtggttttattgttatggataaaaagtggtttatttgttattttaagtttttgtttttttatttggaaattgagatgataatatttatattttatagggttgttatgaggattaaatgaaggttatatatattgtttggatcgtagtagttgtttaaaaaataatagttattttttatgtgttgttagttattaggttagtgttatttaatagtaagatattatttatggaaggaaaagatagtgagattgttattttgtttttttttaatttaaaaggttgtgtgtaaagggatttaggtaggaataaggttttaatgtttgtgttgttttttattttagttatttgttaattttttagtttaatatatatttcgtttttatgttaaaagaaaagataattttggataaaattagaagttaggagagttttgagtgtgtttgtttattttgttttaagatttttttttggttaatagttattttttttagttttttattataattttaaattagttt

SEQ ID NO: 871 - DNA, 5204 bp, Artificial Sequence
  chemically treated genomic DNA (Homo sapiens)
tatagaatgggagaaaaattttgttatttgtttatttgataaaagtttagtatttagaatttataaagaatttaagtaaatttatatgaaaaaaaattttattaaaaagtggataaagaatatgaatagatatttttaaagaagatatatatgtggttaataaaaatatgaaaaagaaagtttttattattgattattagagaaatgtaaattaaaacgataaatgagatattattttatgttagttagaatggtaattattaaatagttaagaaataatagatgttggtaaggttgcggagaaataggaatgtttttatattgttggtggaaaagtaaatggttaatttattgtggaagatagtgatagtgtggcgattttttaaagatttagaattagaaatattatttgatttagtaattttattgtagggtatatatttaaaggaatataaattattttattataaagatatatgtatgtttatatttatggtagtattatttataatagtaaagatatggaattaatttaaatgtttattaatgatggtttggataaagaaaatatggtatatatatattatggaatattatgtagttataaaaaggaaggagattaagttttttgtagggatatggatgaagttggaagttattatttttagtaaatttatataggaatagaaaattaaatattatatgtttttatatataattgggaattgagtaatgagaatatatggatatagggagaggaataatatatattggggtttgttgggggagggtggtgatgggaggattattagtaaaaatagttaatgtatgttagggttaatatttaggtgatgagttgataggtgtagtaaattaatatggtatatatttatttatgtaataaatttgtatattttatatatgtattttggaatttaaaaaaaaattaaattaaaagataagtttaaagagttaatgaaaaataattagatataagaagattttgatttttagaaatttgaaataatagttataattttgtttttaatatatatttaaattttttgatattgtttttttttagaggtgtagtttaatttttttttttgagtgtggtttggatttaatgaggtatttttgaaatggtttggttttgtgtttttatttaaattttattttgagttgttatgtaaattgtaatttttatttattgggggagggattttatgggagttgattggattatggggacggtgtttttatgttgtttttttgatgttgagggaatttttatgagatttgatggttttataaggggtttttttttgttttattgtgtattttttttttttgttattatatgaagaaggacgggtttgtttttatttttgttatgattgtaagttttttggggtagtttttttagttatgtagaattgtgggttaattaaattttttttttttataaattatttagttttaggtatttttttatagtagtgtgagaatggattaatataatttttaatttatagaatagtgttaatataatagtttgtgattttgggtgtagaatataaaattaattgcggtttttattttttttttttttgaatttgggattatgagttttgggggaagttagtcgttgtgttataagtagttttgtaggaaggtttatatgattgagaattgaggttttttgggaatagataataaggaattaggttttttttaatagttatgtgattgatttatgttttttgtgaatttttagttttagcgaagtttttagatgttgcggtttttggttgataattggagtgtaattttgtgagaggttttgagtaggaagtatttagggaaattttttttggatttttgacgattggaaattgtgggagatgagaaatatttgttgtttcgagttaagttttacgtaatttgttatgtaatagtaaataatatatttttataagagaggatgtattattatatattaaattgtatttgttttaaatgtgttattattattattattatttttgagatagggttttgttttgttatttaggttggaatgtagtggtatgattattatgtattgtagtgtcgaacgtttggggttaagggattttttgattttagttttttgagtagttgcgattattattatgaattattatgtttggttaattttttaattttttgtatagatggaggttttgtttaggttgattttgaatttttggagttaataaatttttatttttttgttttttatagtgttaggatgatagatgtgagttattatatttggtttaaattaattataagatattaaatatgtaatttagttttaaaaagtaaggataatttttatggttgaagaggatgtattttatgattatttataatgattacgttatttgaattttattttttaattgtgttttaattaaatataaaaggaagatttaatttttgttaggttgattttatgatggttttaataagtagtttttggttatttatttttttttagttatttaattaattttaatgtaggtgttgttgtgaagggatttagtagatataattaagggttttaattagttgattttatgttgggtttattttgtttggattgttttaattaggtgagtttttgaaaggattgggttttttatgagtatagagatttatagtgtgaaagggatttagtatgaggggttttttttattatgggttttgaaaaggaaggggttatgggtcgggcgcggtggtttacgtttgtaatttcgatattttgggaggtcgaggcgggcggattatgaggttaggaggtcgagataattttggttaataaggtgaaattttgtttttattaagaaaaaaaaaattagagtatagtggtgggcgtttgtagttttagttatttgggattgagataggagaatggtgtgaatttaggaggcggagtttgtagtgagtagagattattgggttattgtattttagtttgggttatagagttagatttcgttttaaaaaaaaaaaaaaaaagaaaaattaaggggttgtgtaggaaagaacgttggtgagtatcgggaattgagttttttttagttttttatattgatagttagttaggaatagggattttagttttataattgtaagaaattgtattttgttatttttgtataaattcgaaggaggatttaaaatgaaaatatagtttttggaagtttagaatggagattttatttatattttgtttagatttttgattaaggaattataagtagataaatgtgtgttgttttgttaggtatggtagtgtgcgaatgaattgatgaattgatatatatattagttgtataaaataaaatttttttgaatttttttagtgttttatagtttataattatttgtgatgtaatttaatatatttatattttatttattaagttaataaaaattaatttagtttttataatgaacgaggtatttttttatatgtttaagtgtttgatattttagaagttttataagatcgaggtggagatattggagtgttttaagtggagaaatgatatatttcgatttataggagtagggttattgtgaaaagaatagttacgtagtaggttatgggatagtgttagtgttataatttatgagtgatagtgtggtgggaattaaggggagaggagggtttgaaggatgagaaggatggagggaagggttggagaagtaggaggtgaggaaaaggagtagaggaaagaatttgaaagtagtagaatttttaggtttaaagatattgttttatggattttaatatattaatttatagagtttaggagggtgtttttggtagttgttttttaatattttatgtgggtttgtttaaaaattattttttatgttaattaggtttaaaaattattaagtgtttttataaaatatatataatatttagaagtggatattttttaaaaataggtagtgtatgagtattagtgaggggtattgtgattgttttgaatagttgtaattttgaggtgaataaagtttgtaatggtttttggttgtaatatataggaatatagtggttattttgtattgaggagatgtcgtggatttatatagaaatttagagttaaggaatgatggtaaatttaaagtaagataagtaggagttatagatatattgtttgggaaagtgtaatttagtagttttgtgagttttgttgtaatgtttttggatatatttatatattaaggggttaaagttatattttttatttattagatttttgattatttaggggttattaagattttgttatttattgtagttaataaataaagagtaaattggtttttattttgttttatgtatttaggtataattttttcggattaaaaataaaaataataataataaaaatttatatttttatttttagattaagtttattttttggtattaaattttatggggtgattttttttttagaagagtttaggtggataggtaaggagtgggagttagggagtttagtttagggatagagataatgggatgaaaagtgaaaggagagggacggggtttatgtcgagggttttttttttgttttttagatagtttttgggttaagatttagggagatattgagatagagcgtttcgtataggagtagaggggttagggcgaagttttagggttttaggcgtggtttttagagttttaggtttcgaaggcggtgtatggattggggagttttagttttggggattttttaatttcgtagtttttttttttttttttttaatttacgtagggttttttattttggatatttacgacgcggatttagtttttatttttattgggtgtcgggtttttagagaagttaattagtgtcgtcgcggtcgttgttttaaagttcgtacgtatttatcgggatttagattttttttagacgtcgaggatggtcgttatggcgtttcgaattttttttttgttattttcgggggttttggttttgatttagatttgggcgggtgagtgcggggtcgggagggaaatcgtttttgcggggagaagtaaggggtttttttggcgggggcgtaggatcgggggagtcgcgtcgggacgagggtcgggtaggttttagttattgttcgtttttagg

SEQ ID NO: 872 - DNA, 5204 bp, Artificial Sequence
  chemically treated genomic DNA (Homo sapiens)
tttgggggcgagtagtggttgagatttgttcgattttcgtttcggcgcggttttttcggttttgcgttttcgttaggagggttttttgttttttttcgtagaggcggtttttttttcgatttcgtatttattcgtttaggtttgggttagggttagggttttcgagagtagtaggaggagggttcggggcgttatgacggttattttcggcgtttggggagaatttgagtttcggtgggtgcgtgcgggttttagaatagcgatcgcgacgatattgattggtttttttggaaattcgatatttaatgggagtgagaattgggttcgcgtcgtgagtatttaggatgaaggattttacgtaggttgggagagggagaaaagaaattgcggagttggggaatttttaaggttgggattttttaatttatatatcgttttcggggtttgagattttgagagttacgtttggggttttgggatttcgttttgatttttttgtttttgtgcgaagcgttttgttttaatgtttttttgagttttggtttaggagttgtttgagaaataagggagaaattttcggtatgggtttcgtttttttttttttattttttattttattatttttgtttttgaattggattttttgatttttattttttatttgtttatttggatttttttagaagaaaaattattttatggagtttggtgttagagagtaagtttgatttgggaatggaggtgtagatttttgttgttgttgtttttgtttttaattcggaaaagttgtgtttgagtgtatgagatagaatagagattaatttgttttttgtttattaattatagtgggtagtagaattttggtaatttttgaatgattaggaatttaataggtaaaaaatgtgattttggttttttaatgtataaatgtgtttaaaagtattataataggatttataaagttattaagttgtatttttttagataatgtatttgtgatttttgtttgttttattttaaatttgttattattttttagttttgagtttttgtgtgagtttacgatatttttttaatataaagtagttattgtgtttttatatgttgtaattagaagttattataggttttatttattttaaagttgtaattgtttaaggtagttataatgttttttattagtgtttatgtattgtttgtttttaggaagtatttatttttaagtgttgtgtatattttataggaatatttagtaatttttaaatttgattaatataaaaaatagtttttaggtagatttatatgaggtattaaaagataattgttaaggatatttttttaggttttgtagattgatgtattaaaatttataaaataatgtttttaaatttaagaattttgttgtttttaaatttttttttttgttttttttttttattttttgtttttttagtttttttttttattttttttattttttaggtttttttttttttttagtttttattatattgttatttatgaattgtgatattagtattgttttatgatttgttacgtaattgttttttttatagtggttttgtttttgtgagtcggagtgtgttatttttttatttaaaatattttagtgtttttatttcggttttgtgaagtttttggagtgttaggtatttgagtatatgaggggatatttcgtttattgtagggattaagttaatttttgttgatttaatgaatgaaatatgagtgtattaaattgtattatagataattataaattgtaaaatattgaaaaagtttagaaagattttattttatgtaattagtgtgtatattaatttattaatttattcgtatattattatgtttggtaaaataatatatatttatttgtttatagttttttggttagaaatttgggtaagatgtggatagaatttttattttgggtttttaaaagttgtgtttttattttgaattttttttcgggtttatatagaggtggtagaatgtagttttttgtagttgtaagattgaggtttttgtttttggttagttgttaatgtagagaattgggaggggtttaattttcggtgtttattagcgtttttttttatatagttttttaatttttttttttttttttttttttgagacggagtttggttttgtagtttaggttggggtatagtggtttaatgatttttgtttattataagtttcgttttttgggtttatattatttttttgttttagttttaagtagttgggattataggcgtttattattatgttttaatttttttttttttagtagagatagggttttattttgttagttaggattgtttcgattttttgattttatgattcgttcgtttcggttttttaaagtgtcgggattataggcgtgagttatcgcgttcggtttatagtttttttttttttaaagtttatggtggaggaaattttttatgttgagttttttttatattgtaagtttttatgtttatgaagaatttagtttttttaaggatttatttgattaggatagtttaagtaggataaatttagtataaagttaattaattgagatttttaattatatttgttaaatttttttatagtagtatttatattagagttggttgaataattggaggaaggtgaatgattaggagttgtttgttgaggttattatagaattagtttagtaagggttggattttttttttgtgtttaattgggatatagttggaaagtgaagtttaagtaacgtgattattgtgaatggttataaaatatattttttttagttatggaaattgtttttattttttaaaattaagttatatgtttaatattttataattaatttaggttaggtgtggtggtttatatttgttattttagtattgtggaaggtagaggaatggagatttgttgattttagaagtttaagattagtttgggtaaaatttttatttatataaaaaattagaaaattagttaggtatggtagtttatgatggtagtcgtagttatttaggaggttgaggttagagagttttttgattttaggcgttcgatattgtagtgtatggtgattatgttattgtattttagtttgggtgatagagtaagattttgttttaaaaataataatgatgatgatgatatatttagagtaaatgtaatttgatgtgtaataatatatttttttttgtgaaaatatattatttattgttgtataataaattacgtaaaatttagttcgaaataataaatgttttttattttttatagtttttaatcgttaggaatttaggagaggtttttttgagtgttttttgtttagggttttttataaggttgtattttagttgttagttaggggtcgtagtatttgagggtttcgttggggttgggaatttataagaaatatggattagttatatggttgttggaaaaggtttggttttttgttgtttgtttttagaaggttttagtttttagttatgtggatttttttgtagggttgtttatggtatagcggttggttttttttagagtttatgattttagatttagagagagagaaggtggaagtcgtagttagttttatgttttatatttagagttataaattgttatgttggtattattttataagttagaagttgtattagtttatttttatattgttataaagaaatatttgagattgggtaatttataaaggaaagaggtttaattgatttatagttttgtatgattgaggaggttgttttaggaaatttatagttatggtagaagtggaagtaaattcgtttttttttatgtggtgataggagagagaaatgtataatgaagtagggaaaagttttttataaaattattagattttatgagaatttttttagtattaggagaatagtatgggggtatcgtttttatgatttaattaatttttatgaggttttttttttaataggtagggattataatttgtataataatttaagatgagatttgggtgggaatatagaattaggttattttagaagtgttttattaagtttaagttatatttaagagagggaattaagttgtatttttagaaaggaatagtattaaaggatttgaatatatgttaaaagtaaaattataattattgttttaggtttttgaaaattaaagtttttttgtatttaattattttttattaattttttaagtttgttttttaatttaatttttttttaagttttagggtatatgtgtaggatgtgtaggtttgttatataggtaaatgtgtgttatgttggtttgttgtatttgttaatttattatttaggtattaattttggtatgtattagttatttttgttaatgatttttttattattatttttttttaataggttttagtgtgtgttgtttttttttttgtgtttatgtgtttttattgtttagtttttagttatatatgagaatatgtggtgtttggttttttgtttttgtgtgagtttgttgaggataatggtttttagttttatttatatttttgtaaaggatttgattttttttttttttatggttgtataatattttatggtgtatatgtattatattttttttatttagattattattgatgggtatttgggttgattttatgtttttgttattgtgaatagtgttgttatgaatgtaaatatgtatatgtttttataatagaatgatttatatttttttgggtatatattttgtaatgggattgttgggttaaatggtatttttggttttaaatttttgaggaatcgttatattgttattgttttttataatggattaattatttatttttttattaatagtgtaaaagtatttttattttttcgtaattttgttagtatttgttgttttttgattatttaataattgttattttgattggtataaaatggtattttatttgtcgttttgatttgtatttttttaatgattagtgatgggagtttttttttttatatttttgttggttatatgtatgttttttttagaagtgtttgtttatgttttttgtttattttttaatgaagtttttttttatgtaaatttgtttaagttttttgtggattttgaatattagatttttgttagatgaatagatggtaaaattttttttttattttgta

SEQ ID NO: 873 - DNA, 5204 bp, Artificial Sequence
  chemically treated genomic DNA (Homo sapiens)
atttttattttgtttttttatttttgttatttttttgtttttttttgttgagatttttttatttatttttttggtttgtttacgtttttttttttttatttttttttttgttttttgttgtttttgtgtaattttattttttttagttttttgtttttttttggttttttgttcgtgtttttttttttttagtttttttttgttttttttgttgttttttttgaagtttttttttttgtttgtttttttttattagaagagtagtttttgtatgaatatgagttttttttttatttgttaatatgagagttggagaggaaattattggtttggcggaataattaggaataatttttttattttgaggagattgttgtttatgatttgtatttttagatttgattatatgttttttaggtaatttgattgttagttttttagtatgattaatttgtggaatattttttatgttaggtattggttgaatgatgggtgaaatattagatttagaagtagtaattgatttaattggaattgatatatttagtggttttgtttttttattttgattattattatttatttgattatttattaattttatgtttttatttatttttataggtggaggtggtatttcggtagtaggtttagaaggaattgatttttttaatgagggataagtaaaatttaatgagatagataattttttattttggtgttgtgggggtggagtgattttagtatttgttgtatattgggaatagtaaaggaattagtttttatagtttttttttaaaattaaagtttaaggtttattgtataggatagttttatttttttatttgaaaagtgtattttttagatgttagagagttgttttaatttgtaaattttttgtagaattaaattagttaagaagtattatatattttatattttttttttttttttatgtgtttatagaattatttgggaggtgtgttttaatttaattagtagtgattattggattgatggtttttttaggaatattgagagaatgtaaaatataggaattttgataattttgtattttttgagtatttattataattaagttgatgtttttatttattattattgtgtatagtttttttgttgtgattgtttttttttttttggttttatattttttattttttttattattgtttttttgggttttgtttttggaatttaatataatttttaaagaatttttagttaacgtgttgttattttttttttttgttttttgttttttttgttgtagttattgtgtttttttttgtttgtttttttttttaagttttttttagattttaatttttttatattttagtttaaggtttttagagagtcgtttagtttttttagtggtttttttgatgtttgtaggtttaagtattgaatggaagtaatattgttgttgtttgaaattagtttttttttggataggattataaatagttacgttttatatacgtgtgtgagtttttttttatatgttttttggttacgtaaatgtttttttttgagaagtgtttgtttatattttttgtttattttttgatggggatgggttttttttttgtaaatttgtttaagttttttgtaaataaatatgtgagtttttattatttttgtttaaatatttaatagttattttaattagtgtaataaggattaggtatggtggtttatgtttgtaatttttgtattttgggaggttgaggtgggaggattatttgagattaggagtttgagattagtttgataagtgagattttatttttattaaataataataattttaaaagaaaaaagattaatggataagaaaggaagaaatgaaagtttttttttgttattagttttattgtatatgtagaaaatattagggaattttgaaaaagtttttggaattaattattgaatttgtaaaatagtttataaaatatatgtaataagtcgtttagatgaatatgaaaagatagtaaataatattagttattaaagaagtgtaagttaaaattataatgagaaattattatatattatttagagtagataaagttaaaaagatatatgataagttttaatattggtaagaatatggaaaaaataggaatgtttgatattgttggtaggaatgtaaaaaatgtggtagttaatttgtaaagcggtatggtaattttttatatagttatttatttattattatatggtttagtaattttataaatacgtatttatttaaaagaaataaaaatgtaagtttatatttgtaagtagttatttatagtggttttattaataataagttttaattggaggaatttatatgtttattaattggagatatagaaattaatgaataaattgggattttagtaatattcggtagttgtttagtaataaaaatgaatgaatggtattattttaaatatcgttatgttaagggagagattaaataaaagattatataatatatgattgtatgtttatgaaattttagaaatgttattattgtagtgatagaaagtatagtagtggttgaatgaagggaaggggtgagggtgggaggtaaggattaaatagaaagggggataaagaaagtttttagggaaaagaaattgttttttatagcgttataatttaggagtgattgggagggggaggtaaggggagaagaaggtttgagggataaggggtagagagaagggttggggaagtaggaggtgaggataaggagtaggggaaaggattttaaagtagtggaggggtttagtaggaggatttttgtatttggtgtttttttattgggtagtgtggtagttatattataaataattattaatatttattaaaaagtgtagttaaaattggtgaatttttttatacgtaaacgttttaataagtaaaaaaaaaaaaaaaaaaaaaaaaaaaaaggggggggggaggggggaggaaagaaggtaaaaataaagatattgttagattattaaatttataaaatttattttttaggggttttgtattatatgtaattttaaaggacgttttataggttgaagggaaatgatattagatggtgatttagatatatagaaaggaataattaataatagaaatgatgtatatatatatattatatatatatttatttttttaattttttgaagatacgtgattgtttgtttaaaataaaaagtattatattgtatcgttgagtttataacgtatattgatgtaatatatataataataatagtataatgatagtttaaatgaaattatattatttgaagtgttttttattttgttggatgtagtttaatattatttgaattttattgtgaaaagttaaggaattgggttttaatttttataataataaaaaattaatgtaaagaaatatagttaaaagttattaggagaattaaaattataagttaaaaaatgtttatttgatatataagaaagtagtaaaggaggaatagaaataaaaagatacgagataaattgaaaacgtatagtaaaatggtagattaaaatttaattattataagtgaagaaatgatacgatttgagttatattagtaggattgttgagtattgtggggagaatagatatgggtaggaggtgagggatagtgttagtgttataatttaggagtgatagggtggcggggattaaaggggaaagagggtgtgagggatgagaggggtagagagaagggttggagaagtaggaggtgaggaaaaggagtagaggaaagaattttaaagtagtagaagagtttggtagggggttttttgtattcggtatttaatatattttgtgtgattgttttaaaattaatgggttttttatgatttttttttaaaaaggggttataaaaatattaagtgtttaaataaaatatgtatattgtttagatgtgtatagtttacgaaaacgggtagtgttggagcgttggtgaagagtattgggattgtatggagttttcgtaattttgaggtgatgattataggttttcggttgtaatagatagtaataaattttgtttttttgtatttaggagatgttttggatttatatagggaaattttggttagagaatgaggataattttaaatgtaataatttagagttatagatttatagtttgcgaaagtaaaataggagttttgagaatttaattgtaatgtagttttgatataggttttttatagattggaattttaattatttagggattattaatattgtgttatttattgtattaataaataaaaaggaaattggtttttatgagaatttttatttggtgtttttagataaaattttattaggtttaaagagaaaatttttgattttatacgtttatttttagggcgagtttattgtttggtattaagttttttatggtgagtttttttgtataagagtttaaggggagaggtaagtgttttttattttgttggatgtagtttaatattatttgaggtgaggtaaggtaaggtaaagggtgggaggtagggagtttagtttagggacggggattttaggaggagaagtgaaggggaaggggttgggcgtagttttggggtttttttttggtttttatagatagatttttgtttaggatttaggtatatagtgtgataaagatgtttggtgtaggagaagagggattaggacgaagttttaggtttcgggcggggtttttagggttttaggttttaagggtcgtgtttgtattggggaggcgtcgcgttggggattttttatttttttgagttttattttttttaatttgcgtcgggtttttttttttgaatatttatgacgcgtttttaatttttatttttattgggtgtcgggttttagagaagttaattagcgttttcgtagtttcggttttaaagtttttagttatttattcggatttatattttttttagaggtcgagatgcgggttatggcgtttcgagttttttttttgttgttttcgggaggtttggttttgatcgagatttgggtttgtgagtgcggggttgggagggaagcggtttttgcggagaggagcgaggggttcgttcggcgagggcgtaggattcggggagtcgcgtagggaggtgggtcgggcgggttttagttttttttcgtttttagg

SEQ ID NO: 874 - DNA, 5204 bp, Artificial Sequence
  chemically treated genomic DNA (Homo sapiens)
tttgggggcgaggaggggttgagattcgttcgatttatttttttgcgcggtttttcgggttttgcgttttcgtcgggcgggtttttcgttttttttcgtagaggtcgttttttttttaatttcgtatttataggtttaggtttcggttagggttaggtttttcgagagtagtaggaggagggttcggggcgttatgattcgtatttcggtttttggggagaatgtgagttcgggtgggtgattggggattttagaatcgggattgcggagacgttgattggtttttttagaattcgatatttaatgggagtgggaattggggacgcgttatgagtatttaggaagaaggattcgacgtaggttgggagaagtgaaatttaggggagtggagaatttttaacgcggcgtttttttaatgtagatacggtttttggagtttgagattttgagagtttcgttcgggatttgggatttcgttttgatttttttttttttatattaagtatttttgttatattgtgtgtttgagttttggataaggatttgtttgtggaaattagggagagattttaaggttgcgtttagtttttttttttttatttttttttttggaattttcgtttttgaattggattttttgttttttattttttgttttattttattttattttaggtaatattaaattatatttagtaaaataaaggatatttatttttttttttggatttttgtatagggaaatttattatggggaatttgatgttagatagtgagttcgttttgggaatggacgtgtagagttaggagttttttttttaaatttggtgaagttttgtttgaaagtattaggtagagatttttatagagattagttttttttttgtttattgatatagtaggtagtataatattggtaatttttgaatgattagaattttaatttgtgaaagatttgtgttaaaattgtattataattaaatttttaaagtttttgttttattttcgtagattatggatttgtgattttgggttgttgtatttaaagttatttttattttttagttagagtttttttgtgtgagtttagaatattttttgaatataaagaagtagggtttgttattgtttattgtaatcgggagtttgtagttattattttaaagttgcgagggttttatgtagttttaatgttttttattagcgttttagtattgttcgttttcgtgaattatgtatatttaagtagtgtgtatattttatttggatatttgatatttttgtaatttttttttaaaaaaaaattataaggagtttattagttttaaggtagttatataaaatgtattaaatatcgaatgtaaagaattttttgttaggtttttttattgttttagaatttttttttttgttttttttttttattttttgtttttttagtttttttttttgttttttttattttttatatttttttttttttttagttttcgttattttgttatttttgaattgtggtattaatattgttttttattttttgtttatgtttgttttttttatagtgtttagtagttttgttaatgtgatttaggtcgtgttatttttttatttataatggttggattttggtttattattttgttatacgtttttaatttgtttcgtatttttttgtttttgttttttttttgttatttttttatgtgttaagtaaatattttttagtttatggttttaatttttttagtggtttttagttatatttttttatattaattttttattgttgtaagaattgaaatttaattttttgattttttatagtgaaatttaggtaatattaagttgtatttagtaaaataaaggatattttaaatggtgtagttttatttaaattattattatgttattattattgtatatgttatattaatatacgttataaatttaacgatatagtgtaatattttttgttttagataagtagttacgtatttttaggaaattaagaaaatgagtgtgtatgtgatatgtgtatgtgtattatttttgttgttaattgtttttttttgtatatttgggttattatttagtattatttttttttagtttgtagaacgttttttaaaattatatgtagtataggatttttaggaaatgaattttatgggtttgatgatttaataatgtttttatttttgtttttttttttttttttttttttttttttttttttttttttttttttttttttttttgtttattagggcgtttacgtgtaaaaaaatttattagttttagttgtattttttggtggatattggtaattatttatagtgtaattattatattgtttagtagagaaatattaaatgtaaagatttttttattaggtttttttattgttttagagtttttttttttgttttttgtttttattttttgtttttttagtttttttttttgttttttattttttagatttttttttttttttattttttttttttagttatttttgagttgtggcgttgtagagaatagttttttttttttaaaaattttttttatttttttttttatttaatttttgttttttatttttattttttttttttatttaattattgttgtgttttttgttattgtaatagtgatatttttagaattttatggatatgtaattatatgttatgtagttttttgtttggttttttttttagtataacgatgtttgagatgatgttatttatttatttttgttgttgagtagttgtcgagtattgttggaattttagtttatttattggtttttgtgtttttagttgatagatatgtggatttttttagttagggtttgttattaatgaagttattataaataattgtttataagtgtggatttatatttttattttttttggataaatacgtatttgtggaattgttgggttatgtggtaatagatgggtaattgtataagaaattgttatatcgttttataaattggttgttatattttttgtatttttattagtaatattagatatttttattttttttatatttttgttagtgttaagatttattatatgtttttttaattttatttgttttaggtgatgtgtgatggttttttattgtggttttaatttgtatttttttgatgattagtattgtttgttatttttttatgtttatttaagcgatttattatatatattttatgaattattttgtaaatttaatgattaattttagagatttttttagaattttttagtgttttttatatatataatgaagttggtgataaagaaagatttttattttttttttttttatttattgatttttttttttttaaaattattattatttggtagagatgaggttttatttattaggttggttttaaatttttgattttaagtgatttttttattttagttttttaaaatgtagggattataggtatgagttattatgtttggtttttgttgtattggttaggatgattgttaggtgtttaaataagaatgatgagagtttatatgtttgtttataaggaatttaaataaatttataagaaaaaaatttatttttattaaaaagtgggtaaaggatataaatagatattttttagaggaagatatttacgtggttaagaaatatatgaaaaaaagtttatatacgtatatgaaacgtgattgtttataattttatttaaaaaagaattgattttaagtaatagtagtattatttttatttaatatttggatttgtaaatattaaaaaagttattggagaaattgaacgattttttgaaagttttaaattaagatatgaagaagttgaaatttggaaaaaatttgaggaaaaggataagtagggggaagtatagtggttataataaaaaaggtaggaaataggaagagaggatggtagtacgttggttaaaggttttttggagattgtattggattttaaagataaaatttaaaagagtaatggtgaaaagaatgaaaaatgtgagattaaagagaaaggagtaattatagtaaaggaattatatataatgatgatggataaaaatattagtttgattataatggatgtttaaagaatgtaggattattaggatttttgtattttatatttttttagtgtttttgaagaagttattagtttagtagttattgttagttggattgaagtatattttttagataattttatagatatatggaagaagagggggaatgtggagtatatggtattttttgattggtttagttttgtaaaagatttatagattagaataattttttggtatttgaaagatgtattttttaagtgggaaagtaagattgttttgtgtaatgggttttgggttttggttttagagggaggttataaaaattggtttttttgttatttttagtatataataaatgttaaggttattttatttttataatattagaatgaagagttgtttattttattggattttatttattttttattggaagaattaattttttttaaatttgttgtcgagatgttatttttatttatagaagtggatgaagatatagaattgataagtgattaaataagtgataatgattaaaatgagaggataggattattgaatatattaattttagttgaattagttgttgtttttaaatttgatgttttatttattatttagttagtgtttagtataaagaatgttttatagattgattatattaaaaaattggtagttaaattgtttgaagagtatataattaaatttgaaagtataaattatgagtaatagtttttttagaatgaaaaagttatttttgattgtttcgttaagttagtagttttttttttaatttttatgttaatagatgaagaaaaggtttatatttatgtagaaattgtttttttaatggagaaaaataaataagaaaaagaattttaggaaagatagtaagggaaatagaaagaaattgaggagggaagaatacgagtaaaaagttaaaaagaaataagaagttgaagaaaatgaaattatatagaagtaataaaaagtaaaagaagaaatggagaagaaagaacgtgaataggttaagaaagtggataaagaaattttagtaaagaagggtaaagaaataataagagtaaaaagataaagtaaaagt

SEQ ID NO: 875 - DNA, 7276 bp, Artificial Sequence
  chemically treated genomic DNA (Homo sapiens)
taaaggttgaggataaaattttagggaatattaatatttaaagggttgttgaaagaaaggagttttaaagggattgaaaaggggacgttagaaaagtaggagggaaaattaggagagagtgttattagggatgttagaaatttgattaatttaggagatagggtatggttaatagtgttagatgttgtagagattagtttatttgatttggtaatataaaagtattggtgaataattgtattgttgagagttaaaagattaaatggtaagaatgggagcggggttatagttgtttatgatttttttaagaaatttgattttgttaggggaaaaaaaatagagttttttttatatatttatttatttattttttgagatggagttttgttttgttatttaggttggagtgtaatggtacgattttagtttattgtaatttttatttttcgaatttaagtgatttttttgttttagttttttgagtagtttggattataggtattcgttattacgtttggttaatttttttttttttttgtatttttagtagagatgggattttattattaattaggatggttttgattttttgatttcgtgatttatttttttcggttttttaaagtgttgggattataggcgtgaattattgcgtttggttaaatagagtttatttttaaatgttagaaagggatggtagagttgagtgttagaaagttagagttttttggatttatcggtgttgtgttattatttttagaggtatttatagttaatgataaagtagatagtgaattattgtaaagtagaattggttgttttgtttattttttgtttataattattattttttaaattgatgagagattatttttgagatatttatgatggaggtagttgggaggttttggtggggaaggattatatggagggaagagtagttataagtgtttgaatttgttattatttaaattgagattatagaaggggagaatggagttaattattttttattatagttttggtgagggatggttatgtttgtttttattttggttttgtttatattgtgttttttatggagaatttggatttttttgttttgttttttttatttagagaaattgtagtgtttgttgtatttatttttatgtttttttatttagtttagttttttttgtttttttttagatttttttttaaatagattggtgtaattggtataaagtgtttgttaattgattgttaatttaataataaggggattgaggtttttttttgaagggtgggtttaatttggggttttcgtattaattttgattacgtgtagagtattatttagtatattatgggttgtgagtataattttgtttattatttgtttttaaatggtttaaaagttaagaatggtttttatatttttaaatggttagggaaaaaaaaagtaaatgaagaatatttcgtgatatatgaaaattatatgaaatttgaattttagtgtttataaataaaaagagggttgaggataaaaattttagggaatattagtatttaaagagtagttgaaaggaaggagtttatgaaggagattgagaaggagatgtttaagaagtgggaggaaaagttaggaggaaattaggaatatagttatttttttttatttatatattgtgtatggaggttttcgtgttatagttgagtatttatgatagagatttgatagtttataatgtttaaaatatttgttatttggttttttatagaaaaagtttgttaatttttggtttaggattttaggtggttgtgttttatatgtttttttattggtagttttataaattttttttttattgtttaggggtttgaatttttttattgttagaatcgttgatgggttagtgtataaatgttgggatattgggaaatgtttttttgttttttggagggttattatgatttttaaattttagtttttttttggtattttgtttttattatatagatatatatatatatatatatattgttgttttagaatatttaggaggttatagagttgtttttgtttttggttattattgttgttattatttgtttattaaaagaggatatgaagttaggtatagtggtatgtgtttatagtttttagttattgaggcgggaggatcgtttgaattcgggggtttaagattggagtgagttatgattgtatttgtaagtagttattgtattttagtttgggtaataggggaaattttgttttaaaaaaaaaaaaaaaaaaggtggaaggtatgaattttgaaagttttagaaatattgttggataatatttatatatattaattttttagattatttgattgttatattagagtttttttattgtttttttttttattttttttgttttttttttttttttgtttaataaatttgaagtatgtatattgatagttttttttttattttttatttattttttagtttattataatttggagttgatttttattataatattgaaattgtttttaataaatttgttagttattttataattattaaatttaaggatattttttaatttttttttgatttttgagtagtatttaaaaatgttgattttgtttttttttatggtatattttttttttatttttttgatttgtttttattttggtttttttttagtgttttggatggttttcgtgttattagatttttataaattagggtattttagtgtattcgttattatttttgttttagtgatatatatatttttttttattgtgttttgaattgtttagtttaggagttagttaggtgtgtattttttagtttttttggatatttggttttttttttgattttgttagtaggaggtattgatgggagattagaaggtaagagaaattgagaagtattttgttttagtttttaaatagtggcggtggttggtaatagttggtagttattggttgtagttgtagtagtaggaagaatgggagatttaggattttagttttttgagtagaagtatttttttaaggattttagttttgaaggaggtggtatttttttagtagattggaattgattatgatagtgttttttataaggtaatgagtagatttatagattttagtttagggatgatggtagtttttgatttttagatagtaatttttttttaaaatgtatatttttaggatttttttttttttttttttttgtattttttgtttttttaatatttttgtaattaattttttatattaaatttttttagtttgaagtatataaagtagttaaatgtttttgattggattttggataattggtatgaggtttggggtttgagtttatgtatgtttttgtttttgttttattttttattttttttgtatagtttatttgggtgattttatttatggtttttgtttcgatatttgtgttgatgatttttaaattagggtttttagattatatttggggtttatatttatacgttttattgcgtttttatgtagttttagttggttgttttattggtattttaaatttaatatgtataaaattaagttttttttttttgtaaatttgtttttatggtatttttttttgttttaatttagtttatttttgattatttatttagttatttatgttggaaatttgagatatttttgatttttttatttttttatttttatagttaattagtagttaaattttttagattttattttttaattattttgatattttattttttttgttttttttaattatgatttaatttaggtttttattatttgttatttaaattattgttgtattgttataggagtggtgtgtatatgtgtaattgtttattttggtatgttatagatttttgtttagtagttttgttttaattttttaaaagttttagtttattgtttgaaatattaattagaatattttttttaaaatgttaaaatgattgttattttttagttttaatatttttattatttgttaagtaaaagtaagtttttttttgtggcgtagtagggtttacgtgatttggtttttgttcgaatttgtagtttattataatatttttttattttttattattttttattatataggaatatttaagcgatttttataatatttatattaattagtatatagggtttttaaagaggatttttggatgtttgtgatttttgtatttttgtttattttttgttttggcgtgtttttttttttttttatgttttgttggttaaattgttttttttttaagttttaggagtttgtttgattatgttttttttatttcgtatttttataaaattattgcgatttttaaaatatttggtatatttttatttgaatatattatattgttgtgtaattattttttggtttttttttttagtattagattttaagttttttgaaggtagattatgtttatttatttttgtatttttagttttgggtttaatatttagaattttttgtatttttaatatatgtttgttaaatgaattagagttaatgtttgaaggagaataagtttttttgagaaagaggaagagttaggagggaggagaaggtagggttcgaagagttttgggggtttatttggggaagatgcggttttttattgtagtattttgttaggaggtggtattgttttgaagagttagttggtcgtttatagattgaggttgatagtttgaaattaaagagggaattttattaggaagtaatatttttttattgggttttttagtttagttatatgttatattttgttttggttaaatagttaagtttttaggaggttattggttttaggcgtttttttagtgattgatgatgttaaattttacgtttttttgattggtttagataaaatgataagggtatttattggaaatgatttggtaaaatatgatttaaggttattttttcggggagggagttggggaagttgggttggttgggttggtagtttttatttattgtgtggtaagaaggtatgggttatgaatagaattaaggagttgcgttgttatagatgttattatttttgtggttgttattttatttttgggtcgtttttgaaggtaagatggtatttttatttatttttattttgaatttagggagtttatttagttttgtgaggaaaagcgttgtgttttgtgagtggtgggaagttttatgaggtagtggaaataataggggagtggggaaagatagttgttatgtgtggttggtaaacgatattagtgatgttttgtatgttttatttaagataattttttgaagcggagattgttttttttattttataaatgaagaaaatgagatttagagttatttgtgtaagtttatattattggaaagtggtagagttgggatttgaataaagtgaatgttatttttatttttttatttaagattttattttgttttttattattaatttattttgtgatttttgaaaagtgttttagtttttttttttgtagaggatggggtagaatggaagaataatttggaagatttttttttttttaaatgtttgtttttttgggtattgggttaaaggttttttgttggttgagcgatttttgttaagagttttaaagaagagggattattttatgtagttatggggttattttttttattgttgtttttgggaggtttggtaggttaaggaatagaagatattttgagagacgtttggtgttaatgaagtggttgaagaaatgtttggatataggttttttaatttattatttgtgtttggggatagtgggaggtagttttatttatggtttggggaggttgtagttatttttttttttttttttttaagagtgagaaatttatttatggttttttttagttaatatagtggtttggtatgaattagataaaggaattttttttgggaggatatagttttatgttaggatgtatggtatggtgagtagaatgtaggtttttatttgtttttttggttaggtgtttttgtgtagtttttaaatatataatgaatagtgattttgaatttgttattttattttatatatatatatttttaaattttttatttgatttaatttattttttttgatacggtatttcgttttgttatttaggttagagtgtagtgacgtgatttcggttttttgtaatttttgtttttggggtttaagagatttttttgttttagttttttaagtagttgggattataggcgtatgttattatatttagttgatttttgtatttttagtagagatggggttttattatgtttgttaggttggttttaaatttttgattttaggtgatttattcgttttggttttttaaagtgttgggattataagtttgagttatcgcgttcggtttttatatatatattttttgagacgggtttattttgttatttgggttggagtttagtggtataattatggtttattgtagttttaattttttaggtataagtaatttttttgttttagtttttagagtagttgagattataggtgtttgttattatatttggttaagtttttgtattttttgtagagacggtttcgttgtgttgtttaggttggttttgaatttttgggtttaagtaatttgtttgttttagttttttaaagtgttgggattataggtatgagttattatgtttggtttgaatttgttattttagaaagtagaattttttatttttgttaattggtttttttataggtaggggaagtttggagagatgttataatttgttttttattttttttgggagggggagtttaaataatagatataggaaagggttttattttagtttacgttttttaagtaggttttgtttgtttttgttgttttgttttgagatagagttttattttgttatttaggttggagtgtagtggtttaattttagttttcggtaatttttgtttttttggtttaagtaattttttttttttagtttttcgagtagttataggcgtatgttaatatgtttagttatttttttgtatttttagtagagatggagttttattatgttggttaggttggttttaaatttttgattttatgatttatttattttggttttttaaagtgttgggattataggtatgagttattgcgtttagttttattttgttgttttttaagttggaggagaaggtttttatttttttgaattttattttgtgttttttgtagt

SEQ ID NO: 876 - DNA, 7276 bp, Artificial Sequence
  chemically treated genomic DNA (Homo sapiens)
gttgtaaaggatatagggtgaggtttagggaggtgggagtttttttttttaatttaaaaaatagtaaggtggggttaggcgtagtggtttatgtttgtaattttagtattttgggaggttaaggtgggtggattatgaggttaggagtttgagattagtttggttagtatggtgaaattttatttttattaaaaatataaaaaagtagttgggtatgttggtatgcgtttgtagttattcgggaggttgagggaggagaattgtttgaattagggaggtagaggttgtcgggagttaagattaagttattgtattttagtttgggtgatagagtgagattttgttttaaaataaaataataaaaataagtaaggtttgtttaaggagcgtgggttgaggtgagatttttttttgtgtttgttatttagatttttttttttaaagggggtgaagaataaattatggtatttttttaagttttttttgtttataaaaaggttagttggtaaaagtaaagagttttattttttaaagtgatagatttaggttaggtatggtggtttatgtttgtaattttagtattttgggaggttgaggtaggtagattgtttgagtttaggagtttaagattaatttgggtaatatagcgagatcgtttttataaaaaatataaaaatttagttaggtgtggtggtaaatatttgtggttttagttattttggaggttgaggtaggaggattgtttgtgtttaggaagttggggttgtagtgagttatgattgtgttattggattttagtttaggtgatagaatgagttcgttttaaaaaatatatatataaaggtcgggcgcggtggtttaagtttgtaattttagtattttgggaggttaaggcgggtggattatttgaggttaggagtttgagattagtttggtaaatataatgaaattttatttttattaaaaatataaaaattagttgggtgtggtggtatgcgtttgtaattttagttatttgggaggttgaggtaggagagttttttgaattttagaggtaggggttgtagggagtcgagattacgttattgtattttagtttgggtgatagagcgagatgtcgtgttaaaaaaaataaattaaattaaataaaaaatttaaaaatgtatatatataaaataaagtgatagatttagagttattgtttattgtgtgtttgggggttgtataaagatatttagttaaagaagtaagtgaaagtttgtattttgtttattatgttatatattttggtatagggttgtatttttttaaaggggatttttttgtttaatttatattaggttattgtattgattagagaaggttatggatgggttttttatttttagaagggaaagaggaggaatggttatagtttttttaagttatagatgggattgttttttattatttttagatataaatggtaaattggaaaatttgtatttagatatttttttagttattttattggtattaagcgttttttaaaatgttttttgttttttaatttattaggttttttaaagatagtaatgggagaagtgattttataattgtataaaataattttttttttttgaagtttttggtaggaatcgtttagttagtaggaaatttttaatttaatatttagaaaaatagatatttggaggaagagggattttttagattatttttttattttgttttattttttatagagaaggaaattaagatattttttaagaattataagataagttaatgatagaaagtagagtagaattttgagtggaggagtgaaaataatatttattttgtttaaattttagttttattattttttaatggtgtgaatttgtataaataattttgagttttattttttttatttgtaaaatggagagaataattttcgttttaagagattgttttaaatggaatatgtaaagtattattgatatcgtttattaattatatatagtagttgtttttttttatttttttgttgtttttattgttttataagattttttattatttataaagtatagcgtttttttttataaagttgagtgggttttttaggtttaggatggaagtaaataggagtattattttatttttagggacggtttaggagtggggtagtagttatagaagtggtaatatttgtagtagcgtagttttttggttttgtttatgatttatatttttttgttatatagtaggtaggagttattaatttagttaatttagtttttttaatttttttttcgagagggtggttttagattatgttttgttagattatttttaataggtgtttttgttattttgtttaaattaattagagaagcgtagggtttaatattattagttattggggagacgtttggggttagtaattttttgaagatttggttgtttgattagggtagagtatggtatgtaattgggttgggaagtttagtggaggaatgttgttttttggtggagttttttttttggttttaagttgttagttttagtttgtaagcgattagttggttttttagagtagtgttattttttggtagaatgttgtaatggggaatcgtattttttttaagtaaatttttagggtttttcggattttgttttttttttttttttggtttttttttttttttaaaaaaatttatttttttttaggtattagttttaatttatttggtagatatatattgaaaatataagaaattttgggtgttgggtttagggttagaaatataaagatgaataggtatagtttgtttttaaagagtttagagtttagtgttgggggagggggttaagggataattatataataatgtaatgtatttaaataagaatgtgttaagtgttttggaagtcgtagtaattttatgaggatgcggaataggaggaatataattaggtaggtttttaagatttgaaggaaaaataatttggttagtagaatatgaaggaagagaaaaatacgttagggtaaagggtaggtagaagtataaagattataggtatttagaggttttttttggagattttgtgtattagttgatatgaatgttgtgaaggtcgtttgggtgtttttgtataataggaggtaatggggggtagaaggatgttgtgataagttataaattcgggtaagggttagattacgtgggttttgttacgttataaggaggagtttgtttttatttagtagatgatagagatattaaaattggggaatgataattattttagtattttggaaaaaatgttttgattgatattttaaataatgaattggagtttttaaagaattgaggtaaaattgttgggtaagagtttatagtatattaagatgaatagttgtatatatatatattatttttgtagtaatatagtaataatttaaatgatagataataagagtttgaattaagttataattagaggaggtagaggagatagaatattaagataattaggaagtagaatttaaagggtttggttattgattagttgtgggagtgggaaggtggaggagttaaagatattttagatttttagtatgggtggttgggtgggtggttagggatggattgaattgaagtagaaaagaatgttatgggagtaggtttatagagagaaagagtttgattttgtatatgttgaatttgaaatgttagtggaatagttagttgaaattgtatgggagcgtagtgaggcgtgtgggtatggattttaggtatggtttgaagattttgatttgagagttattagtataaatgtcgaagtagaggttatgaataagattatttaagtaaattgtgtagaaggagtgggaagtgaaataaggataaaagtatgtatgggtttaaattttaaattttatattagttatttaggatttagttaggagtatttaattattttatgtgttttagattgaaagaatttaatatagagaattggttataaaggtgttaaaagggtaagaagtataaaaaaaaaaaaaaaggagagttttagaaatgtatattttaaaaaaagattgttatttggaaattagaagttgttattatttttgagttggaatttgtaaatttatttattgttttgtgagagatattgttatagttagttttaatttattagaaaggtgttattttttttaaggttagaatttttgagaaggtatttttgtttaggaggttggagttttgagttttttattttttttgttgttatagttatagttaatagttattagttattgttagttatcgttattgtttagaggttgaagtaggatgttttttagttttttttgttttttgattttttattagtgttttttattggtagaattaaaaaggaagttagatgtttaggaaggttgggaaatatatatttggttgatttttaagttaagtagtttaaaatatagtagaggagggtgtgtgtgttattgagataaagataataacgagtatattgaaatattttggtttgtaagaatttggtggtacgaggattatttagagtattaagaaaagattaaggtagaagtagattagagaaataaaaaagaggtgtgttatgaaggagggtaaggttagtatttttaaatgttatttaaaagttaagaaaggattgaaaagtgtttttagatttggtgattatgagatggttgataaatttattgagagtagttttagtgttgtagtgggagttaattttagattgtggtgggttgagaagtaagtgggaggtgaggaagaaattgttagtgtatatgttttaagtttgttagataaaagaaagagaaagatagaaggggtgggggaagaggtagtgagaaagttttaatgtggtaattaagtaatttgagaaattaatatatgtgaatattgtttaatagtgtttttgaggtttttaaaatttatattttttattttttttttttttttttttaagataaagttttttttgttgtttagattggagtgtagtggttatttataggtgtaattataatttattttagttttgaattttcgagtttaagcgattttttcgttttagtagttggggattataggtatatgttattgtgtttggttttatatttttttttgataaataagtaatagtagtagtaatagttaaaaataaaaataattttatgattttttagatattttggaatagtaatgtgtatatatgtgtgtgtgtttgtgtggtggaggtagggtgttagggaaggattagggtttggaaattatggtaattttttagaaaataaaagaatattttttagtattttaatatttatgtattaatttattagcggttttggtagtggggagatttaggtttttggatagtagaaaagaagtttatgagattattagtggggagatatatgggatatagttatttagagttttaaattaggggttagtaaattttttttgtaaagggttagatggtaaatattttagatattgtgggttattagatttttgttatgagtatttaattgtggtacgaaagtttttatgtataatatgtaaatgaaggagagtggttgtgtttttagtttttttttagtttttttttttattttttgagtattttttttttagttttttttatagattttttttttttagttattttttaaatattggtgttttttggagtttttgtttttaattttttttttatttatggatattaaaatttaaattttatgtaatttttatgtgttacgaaatattttttatttgttttttttttttttaattatttaaaaatgtgaagattatttttagtttttaggttatttaaaaataggtggtaggtaagattgtgtttatagtttatagtgtgttgaatgatgttttatacgtggttagaattggtacgaaagttttaaattaaatttattttttaaagaggaattttagtttttttattattggattggtaattagttaataaatattttgtgttagttatattagtttatttggaaggagatttggggaagaataggagaaattagattgggtggaagggtataggaataggtatagtagatattgtaatttttttgggtgagaggaataaggtagaggggtttaagttttttatagggagtatagtgtagataagattaaggtgaggataaatataattattttttattaagattgtggtgaggggtggttaattttattttttttttttataattttagtttaaatggtaataagtttaaatatttataattatttttttttttatgtaatttttttttattaggattttttaattatttttattataagtattttaggaatagttttttattagtttggaaagtaataattgtgggtaagagatgagtaaggtagttagttttgttttgtagtagtttattgtttattttgttattagttatgaatgtttttgaaaataatggtatagtatcggtaaatttaggaggttttggttttttaatatttagttttgttatttttttttagtatttaaaaatggattttatttggttaggcgtagtgatttacgtttgtaattttagtattttgggaggtcgaggggggtggattacgaggttaggagattaaggttattttggttaatggtaaaattttatttttattaaaaatataaaaaaaaaaaaaaattagttaggcgtgatggcgggtgtttgtaatttaagttatttaggaggttgaggtaggagaattatttgaattcgggaggtggaggttgtagtgagttgagatcgtgttattgtattttagtttgggtgatagagtaagattttattttaaaaaataaataaataaatatataaaaaggattttatttttttttttttagtagagttagattttttggaaaagttatgggtaattgtggtttcgtttttatttttattatttaattttttaatttttaataatgtaattgtttattaatatttttgtgttgttaaattaaatgaattagtttttgtaatatttgatattgttggttatattttattttttaaattggttaaatttttggtatttttgatggtatttttttttagtttttttttttatttttttggcgttttttttttagtttttttgggattttttttttttagtaattttttaagtattggtgttttttggagttttgtttttaattttta

SEQ ID NO: 877 - DNA, 6352 bp, Artificial Sequence
  chemically treated genomic DNA (Homo sapiens)
agggtattttatatttagagttttttttggtttaatagttataggtggtttgtggttattgtataggatagtatagtttttgaggaaggggattatgttttgtttttttgtgtttttagagtagtatatagtgtttaagttatattaggtgttttataaatatgtatttaatgaagaatattttttaatatttatttgaatttgttatgttttaaagaatatgatagatataattttattttaaagttagtattttagataatttagaataattggatttgtgttatttttaaaggatattttagtaagtttttgtcgaatttgtgtttgttttattattagattttagttttaataatagtatttttttttagagttagggttatttattttatttatttttatttgttattattgatttatttatttaataacgtgttagcgtttagggggaaaaggaagattgtgtaataaagatttaattatttatgatttttttttataggttttttttatttaggagggaatgtggattatatatatatattttaagaaaataaataatgaggaagttttggtgagattgaaaggtgttttgaattgggttgtttgttggttgtggttatgagaaggtttttggaattttttgtttttgttttttcggtgttggttttgagtaattattgtttgttttttgttgtaaaaaacgatggtaagattttgattgtttgtttagttgttgaggggtgggtgagaaaatttaagttgaaattttgttggagtgggaggagttggggattgttttagttattgttttttttgttattttagttattagtgttttttacgttttttagtgtttttattttgaagttttgatttgaagtgatatttaaagggtagtgattatggttttgcgttggtttaggattttagttggtttttttttttttttatatatatgatattaatatagatggttattagtgggttaaaataatatttttagggagtgtcgatattttaaaagaaaaatagtaaataggattatttatgtttttgaaagaagtggtagaaaatatagattagtcgtttaaaatgagtattaaaagtgtattttaaaagttagaagttattataatatgaaaaaatagagaatatagggaaaatatttagaagttttaggtgtaaaaaatatatataatagttaaagtaaaagttatattaatgggataaatagtgggagagatgtaattgaaaaataaaatagaaagatggaggattatattgaggagttagtttagaataaaagagggaagaattgagaagttattaatagaaaagttaggggaaaaggaggagagaattatttaaatatagattatatgagttttataaagataaaaaatagaggagaaaaatagttaaagaaataaaaagatgaatttttagaattaaaagatagagaagatttataatgttttatagagagaaggaaaaatttattttagatatattagtaaaatttaaaaatattaaagataatgagaaaattttagaagattttagtatgaaagattgatatgggattttttaattgtgatattggatgtaaaaaaaaaaatttggaatgatgttatttagaatattaaaggggaaaatattttaaatagtatgtaatatatagttaaattttatttaaaagtgttggtataattttaaaaaattattaagtatataagattttagaaggtttgttatgtaaatttttatatttgaaaggttttggaagaagaattttaattagagaacgtattttagaaggtgttaaaagatatgaaaagtaatgttgattaaataatttggtgaaggagaaaatatgtgaataaatttgaaagtatgttaaagtttttatttagttagagggaagatggagaaggtatcggtaatatttaaaaaaaaaaaaggtaatgaagattaaaaaagaaaatttggtcgggtgtgatggtttacgtttgtaattttagtagtttgtgaggtcgagttaggtagattgtttgagtttaggaggataagtttgggtaatacggtgaaatttcgtttttattaaaatataaaaaaaaaaaaaaaaaaatagttaagtatggtggtatgtatttggagttttagttattcgggaagttgaggagaatcgtttgaattcgggaagtagaggttgtagtgagttagtttagattatgttattatattttagtttggtaatagagcgagatttcgttttaaaaataaataaataaataaataaaaaaattttaaaaaatagaaatattgaaataaataaggtattataaataagtttaagtgtattaatatttataataaatataattagaatgtagtaaagatagggttatgtgtttattaaattattatatttttttgtatatataggtaacgtatatttttttattttcgtgcgtttatgtggggttattgtttattttttgttaatggaatgtgagtagagatggtaaatagtttttggtttaaaattatggaaataatgtgttttttttaggtttttttttttatttgtaaagttaggagtttatgaagtgttttttaataatagagatgtaaagtggagtttagttattttgaggtatgttttggaaaagagttatagagtgtttaatttgttttgaattatacgtggttaaaaaataaatttgtgttttgttaaattattgaggttttagtgtttgttttttgtagaaataagtttgtttattttgattattatatgaattgaatataggttagaagatagagatcgttagattgaattagaagtaaaaatttatatttatgatattttaagggttatatttaaagtataagtataaaggaagagtaaaaataaaagagtagaaaaagatatagtgaataaatatttaaagatagttgtagaatttattattattagataagatagagtaggatagaaagatttttaggataaattgggaaaaggtttagtttattaagattgtaataatttttaagagtaaatattttaataatttaaatgtagagagggtaaaagttgatttaaaaattagaaataagttgaaaaatttatagttatagttagagatttaaatatattatttataggttaggaattgtggggtatgtttatagttttagttattttgggaggttgaggtaggaggatcgtttaagtttagttgtttgaggttgtagcgagttatgattattttattgttttttagtttgagtaatagagtaaggttttgtttttaaaaaataaataaataaatgtattatttttagttatgtataggttagtttaaagataaagaaaatcgtaataaattagaatgataaaatttatatgtttgatttaataaatatgtatatgtataaaattttgtattatatttattagagtttatgtgaaatatttatagaagtttattatattttaagttatagaggattattatgtaattaaattataagttaataataaaaaatatattttaaaaaatttatgtatgtttttaaataaaaaaaaatattcgatattcgattgttattaattaaagaagtaatattttttattatgagttttttatggttttttcgttttttattttatggttttagtttttattttatttggggggaggtgaaggtggtaagggttttaattagggtaggattaaagtagtgaagatattgtttatttatgcgtaggtgttttttaggcgtttatgatgtgttaggtattacgtagatattgtggattagaaacgaaaaaattaagattagggttttttataaatcgggttatgtaaattaattattagttgttatttgattaatttgaagttagaagttgtgtttgttttatttaaaataggtattttttatttattgaggaaagagtattggagtaggttttattagtttatagattattcgagaattatttggggagtatgttgaaaatataggttttttggttttgttttggaaaggttaatttaatttattaagtaaagaggaaatttaggaatacgtattataacgaattttttaggtgatttttatttggaattagagattcgtatgattttttagttttttttaagttgaaaattatcgattttatggtttttgatatatggtttaatttggttagatttttttttatatagacgttagttttacgttgttgttgttttgttttgttttgttttttaaatatatatattggattaaatttttttagtgttttttattagtcgagtttaattagaagttaaaggtaagggtgatgtcgttttttagtttgtgttagtttggaggaggtgttcgggttttggagggattaatagagaggattagtatttttgtttttttcggggagtttacgggagttttttatattttgttttagattaaataattttaataattatatatttttttttatataatgaaattaaataataataaaagaaaaataaaataatatttttgaaagtgatttaaagttttaagaggtttttattttattgtgtagttaatgttttttttttaaagattattggtaaagtttattttattttttaatttaaaatttgtttacggaaattttttgggaaagtaggattttttgtatcgtagatggatatagagagaggatttgttggagtttagttgcgcggtgttttgacggttttttttttttttttagggggtttttttttggaggacgtggtaatagttggtttaagttttttttattttttaaaattttttttggttttttttgggggtttagtgaatttttttatttttttatttcggttttttttttttttatttagtaatagatatatttatttagagaatttttgtgattggttgaagatagaaggggtcgtttttattttcgaatttgttttttttttttttattttcgttttgtttttgtttttattatacggattgagattgatttgattaaagtattagagtgtaatggtttttagagtagggttggttttggggttttatattttgatgatttttttgagttcgtaggaggtaggggttattaagggtgagtgcgagggcgaggagggtgcggcggggagtagagatttacggagttgggttatatgaggaggtggtatggaggatgtttgtttttttcgttttttggtttatgggtaattttttttattaagagatatttaattttttttatttttgttatatttattttggatttaaatgaagatgtagttcggttagttgcgtaggtgttttagttagtttttgttgacgtttagatttttttttattttttttttttttttgagatttaaatttttatttaatagatgttagtaagtattttgatttttttattatttttggtttggaatgtgttcgattaagtttagttttgttgtagtatttatgtttatgtcggtagttaattatttatttgtttttgtttttcgggagatatgagttggggtgcgggtttatagatggtttatttttttttttttttatttttttggttttttattgtgttgggtgtatgttagttttttaataattgttgtttaaataattttatagagttttataagaattaaaatttaatttttaatttttagaaaattagataatagttatggaagagttatatttagttataatgttttgagatggaggaattgggatatgaattttgatttttgatttttcgtttagtgttttttgtaatgttttgagttgtttttttttatttttttggtttttgggttattaattttaatttttatttttgttagtcgtggtttgtttttttttatatttatttgtattgtatttttgtgtaaagttttatatttttttgtttttaattatttttttttattttatttttatagttttattagtttataatatagggtttgataatatagttagggtagatgattatagttaagatttaaattttggaattttaagtatgattttaggtagttttttttttttttattttgatatgttagattgtattgtttttgtgtcgattgtagtgtgttgggatgagtttttttttttttgtttttttttttttttttttttttagggttagtttagtgttagaataggattttgtttttatatagaatttaggacggggtttaggtttagggatttaataattatatattgtggatgagatagatatatttttttttttttttttgattttgaattcgttaaatatagt

SEQ ID NO: 878 - DNA, 6352 bp, Artificial Sequence
  chemically treated genomic DNA (Homo sapiens)
gttgtgtttggcgagtttagggttaaggagagagaaaaaaatgtgtttgttttatttataatatgtgattgttgagtttttgagtttgggtttcgttttgggttttgtgtggggatagagttttgttttgatattgggttggttttgggagagagaaagggagagagaataggaagaaagaggtttattttagtatattgtagtcggtatagagatagtgtagtttggtatattaggatgggaagaggagggattgtttaaaattatgtttggggttttagaatttaaattttggttgtggttatttgttttggttgtgttgttaggttttgtgttgtgagttggtgggattgtgggggtgggatgaggaggaatgattaaggataggagagtatggagttttgtatagagatgtagtgtaggtgggtgtgaggggaaataggttacggttggtaggggtaagaattaaggttagtgatttagagattaaggggatagggagaggtaatttaaggtattataaagagtattggacgaggagttagaagttaaggtttatgttttaatttttttattttagagtattatgattgagtgtggtttttttataattgttgtttagttttttggaagttagggattaagttttaatttttgtagaattttatgaagttgtttgagtaatagttattgaggaattagtatgtatttagtataatggggggttagggaaataaaagaaaaaaaagatgaattatttgtagattcgtattttagtttatgtttttcgaagaataaagataggtaaatagttaattatcggtatgggtataaatattgtaatagaattggatttgatcgggtatattttaggttaggggtggtagagaaattagggtgtttgttggtatttgttgggtggaggtttgggttttaggaaggaggaaggaatgaggagaaatttgaacgttagtaaaggttgattggggtatttgcgtagttgatcgagttgtatttttatttaggtttagagtggatgtgatagagatgagggggattgggtgttttttggtgaaggaagttgtttataaattagagagcgagaggaataagtattttttatgttatttttttatgtaatttaatttcgtaaatttttgtttttcgtcgtatttttttcgttttcgtatttatttttggtggtttttgttttttgcgggtttaggagggttattagggtgtggaattttaggattagttttgttttgagggttattatattttggtgttttaattaaattagttttagttcgtgtggtgaggataggaataaggcggaggtaaagaagaagaaaatagattcgaggatgggggcgattttttttgtttttagttaattatagaaattttttgagtgaatgtatttgttgttgggtaaagagggaaagagtcggggtgagaaggtggaaggatttattgggtttttaggagaggttaaaggaagttttggaggatgggaggggtttggattaattattattacgttttttaagaagggattttttgaagagagagaaaaggtcgttagagtatcgcgtagttgagttttaataaattttttttttatgtttatttgcgatgtagggaattttatttttttaagaagttttcgtggataaattttgagttagaaagtaaaataaattttattaataatttttaaaaggaaaatattggttatataatggaataaaaattttttaaaattttaaattatttttaaaaatgttattttattttttttttattattatttaattttattgtgtaagaaaaaatgtgtaattgttggagttgtttggtttaaagtaaagtgtaaagagttttcgtggatttttcgaggagggtagaggtgttggttttttttgttggtttttttaggattcgggtattttttttaggttgatataggttggaggacggtattatttttgtttttggtttttggttgggttcggttaataagaggtattgggagaatttagtttagtatatatatttaaaaaataaaataaaataaaataataataacgtaaagttaacgtttgtgtaaagagaaatttaattaaattaggttatgtgttaaagattatgaaatcgatgatttttaatttggagggagttaggaaattatgcgggtttttggttttaaatgagaattatttggggggttcgttataatacgtgtttttgagttttttttttatttaatgggttagattagtttttttaaggtagggttagggaatttgtgtttttagtatgttttttaggtggttttcgggtagtttgtggattggtaaaatttgttttaatgttttttttttaatgaataagggatgtttattttaagtggggtagatatagtttttgattttaaattaattaaatgatagttagtaattgatttgtatggttcggtttatggggagttttaattttagttttttcgtttttagtttatagtgtttacgtaatgtttagtatattataggcgtttaggagatatttgcgtatgaatgaatagtgtttttattgttttggttttgttttggttaggatttttgttatttttatttttttttaagtgaggtgggagttggagttatgagatgaaagacgggaaagttatgaaaaatttatgataaagaatgttgtttttttggttaataatagtcgagtatcgggtgtttttttttatttgaaaatatatatagattttttaaagtatgttttttgttattaatttataatttaattatatgataattttttatggtttggagtgtggtgaatttttgtaaatattttatatgggttttaataaatgtgatgtagaattttatatatgtatatgtttattggattaagtatgtggattttgttattttaatttattacggttttttttatttttggattggtttatatataattaagagtggtgtatttatttatttattttttagagatagggttttgttttgttgtttaggttggagggtagtgaagtaattatggttcgttgtagttttaaatagttgggtttaagcgatttttttgttttagttttttagagtagttgggattataggtatgttttataatttttggtttatgaatggtatatttaaatttttaattgtgattgtaggttttttaatttgtttttaatttttaaattaatttttgttttttttgtatttaggttattaaggtgtttatttttgggaattattatagttttggtgaattgagtttttttttaatttgttttgagaatttttttgttttattttgttttgtttgatagtaataagttttatagttgtttttgggtatttgtttattgtatttttttttatttttttgtttttattttttttttgtatttatgttttagatgtagtttttgaaatgttataaatatagatttttgtttttgatttaatttgacgatttttgttttttaatttatgtttaatttatatggtagttaaagtgagtaaatttgtttttgtaagagataaatattgaagttttagtggtttaataaaatataggtttattttttagttacgtgtagtttaaggtaggttgggtattttgtagtttttttttaaaatatgttttaaggtggttaagttttattttgtatttttattattgaaaagtattttatgaatttttagttttgtaggtaggagagagaatttgggaaaggtatattgtttttatggttttggattagaaattatttgttatttttgtttatattttattggtaagaagtaaataatgattttatataggcgtacggggatggaaaaatgtacgttatttatgtgtgtaggaagatataatggtttggtgagtatatggttttgtttttgttgtattttgattgtgtttattgtgaatattgatgtatttgggtttgtttgtaatattttatttattttaatatttttattttttaaagtttttttgtttgtttgtttgtttgtttttgagacggagtttcgttttgttgttaggttggagtgtagtggtatgatttgggttggtttattgtaatttttgtttttcgggtttaagcgattttttttagtttttcgagtggttgggattttaggtgtatgttattatgtttggttatttttttttttttttttttgtattttagtagagacggggttttatcgtgttgtttaggtttatttttttgagtttaggtaatttgtttggttcggttttataaattgttaggattataggcgtgagttattatattcggttaagtttttttttttaatttttattgttttttttttttttaagtgttatcgatattttttttattttttttttgattggataagaattttagtatgtttttaaatttatttatatatttttttttttattaaattatttggttaatattattttttatattttttggtattttttagaatgcgttttttgattagaattttttttttaaaattttttagatgtgggaatttgtatagtaaattttttaaagttttgtatgtttgataattttttaaaattatattagtatttttgaataaagtttagttgtgtattatatattatttgaagtatttttttttttaatattttaaataatattattttaaatttttttttttgtatttaatgttatagttagaaaattttatgttagttttttatgttggaattttttagaatttttttattgtttttgatatttttaaattttgttagtgtgtttagagtgggtttttttttttttttgtaagatattatggattttttttattttttaattttgggaatttatttttttatttttttaattattttttttttttattttttgtttttgtgaaatttatataatttatatttggataattttttttttttttttttttgatttttttattgatgattttttaattttttttttttttgttttgaattagttttttagtgtagttttttatttttttgttttgttttttagttgtattttttttattatttattttattaatgtggtttttattttgattattatatatattttttatatttagaatttttaggtgttttttttatattttttatttttttatattataatagtttttgatttttaaagtgtatttttaatgtttattttaagcggttggtttatattttttattattttttttaaggatatagatggttttgtttgttgttttttttttgaggtgtcggtattttttaaaggtattattttgatttattagtggttatttgtgttggtgttatgtgtgtaaagagaaaggagggttagttggagttttaggttagcgtaaaattatagttattattttttgggtgttattttaggttaggattttagggtgggagtattaggaggcgtagggagtattgatagttggggtggtagaggaggtaatgattagggtagtttttagttttttttattttagtaggattttagtttggatttttttatttattttttaatagttggataggtaattaggattttgttatcgttttttgtagtagggagtaggtagtgattgtttaaggttaatatcggggaggtaagagtagaaggttttaggaatttttttatagttatagttagtaagtaatttagtttagaatattttttagttttattagggtttttttattatttgtttttttggaatgtatatgtatggtttatatttttttttagatggaaagggtttgtaagaagggattatggatgattgaatttttgttatataattttttttttttttttaaacgttagtacgttattaaataaataagttaatgataataaataaaagtgaataaagtggataattttgattttagggagaggtattgttattgggattagagtttaataatgaggtaaatatagattcgataaaaatttattaaagtgttttttaaaaatgatataaatttagttgttttaaattgtttaaaatgttgattttgaggtaaagttgtatttgttatgttttttggagtatgataagtttaggtaggtgttgggggatattttttattaaatatatgtttataggatatttgatgtgatttaggtattgtgtgttgttttgggagtatagaagagtaggatatgatttttttttttaaggattgtgttgttttgtgtagtagttataagttatttgtagttattaagttaaaaaaaattttaagtataaaatgtttt

SEQ ID NO: 879 - DNA, 6685 bp, Artificial Sequence
  chemically treated genomic DNA (Homo sapiens)
ttaattattttttttgttttttatatttttttttttttttttagttttttttttttatgttatattttttgttggtttgagacgttaattattattgagaaagaattaaattagtattttgagttggtaaaatttttagtttagtataatttttttaattaaattgtagtttaataatgtgttttttaaaagtatgatttaatattttatttagaaatttagaatattttttataatttttttagggtagtgtggattatgttgatgtgttaggaggaagtagaaggaagaaaatgaattgagatgtacgttttatttttatgttaaagttattaaaatagtagttgaagggatatttgtgttaggtaatagggagaataataattttatgttatttttaaaaaataattatatatatatttaaatttttttattttttagagaaaggggaaggaaagaaaagagagaagtaaaatatgagtttgagtgaaaaattatagaggagtttgtagttatttagggagggttgttggttgaagttaggtaggaaaaaaagattaaaatattttgttttattttttaggttcgtttaagtagaagataaaaatataaatataggagaaaggaagaaaattatatttttttttttttgtttttttagaattgaatagtgtttttgataagtttaggtttttttatcgtagatattgatattatgtatagaaaatgatttaaaaacgtttttaatgggggtgaatttgatgttttagtttatttaagatgtattagaggttatttaaggagatttatagtttgttaattgaagtttattgttttttttttttagtttttatgttaggttttatgttattttttgtttgttatgtgagattattgattttttttggttaggtaggatatgatttttttatagagatttgttttgatattaaatagttatgatgaaattttttggttattttttttttttgtgtattttattattatcggaatgttaaagttgtaggaataaagtttttttggttttttaagaaatatagtgtgatagaaaaagtatagtttagggatttattagttatgtgaattttggtttattttatttttattttatttgtaaaagggagattatgatagtatttattgtaaagggttttgtgtgatgatttttttttttttttttttttttatatatatatacgtatatatttatataatgtttagaaaatgaatttataataagtaattgataaatattagttattattatgtaggtaagttagattttagagtttgtgagttttagatatatttatagagaagaaagagtagtttttttaattttttggtttagcgttatattttttattttttttttatttttatattttttgttatttattaatttttttttttttttaaatttaaatataggttttcgtttgatttatattgtttaggtttttttttttttttttatatggttttttttttagttttgagggaagttgtagaagttagttatggtgttgtttataaagaaggggatatacgttttttttattcgtttatgttgttattgtatttgattattttcgtgtcgtgtttttgtttatttagtttgtgttgagtgtttgtttttatttttaaatgtaataaaatatttgggaaagattaaggtaggtgtgggtaggaagaagggaggaagttagatttagtggtttgagtgttttttgatgtttttttattttcggttttatataagttttcgttagtgtgagttttatagttatttatttggaggaggagtatttaaaattagggttaaatgttttgtattcgggggtttattagtaagtttgtggttagttttttattttatgaatcgttatatttatatgagagatgtggagggagaggggttagttttttagtttttgttttgtagtagttaagttaagttaggttaggttgtggtaattaagttagtattttttttaaagaatagttgttttttatttatatagagtgtgttgtaggtgtgagtgattttttggggtagttgttttttatggtgatttagttaattagattgtttttttattgggattgtgttattttaatataaggttgttttggttgatttggtaggggaggaggagaagagttatgtacgaggagttaaattttttgattaggaattttttgtttattttttattggtgagaacgagttatatagttttaggagagtaggaagtttagtttttcgttttttatgggtttaggaattagaggatgaatattagcgatgttttttacgttttgttttttttttttttatttgttataattttttatggagaagaaattatttttttgattggtttgatttaggtttttaattaagggtatttattaagggttatagaatagtaaaaggttgtataattgtattttattttttttttttgaattttgtttaattaaaattttaaaaatttatttatagattattttttgttttttttagttattaaatatatttttttttaatttttttttgatagattttgttttgtttttagttgatttttttgtaattatttaaatggaatttttttatttttttttattttttgttaatcgttttgtttttatttttttatttgaagaagtgtatttttttttttttaagttttatgttttttgttttagtttatttgtgttagtgtaataagatatacgagatagggtaatttatgaagaatagaaatttattttttatagttttggaagttagaagtttaaggttatggttttggaagatttgatgttttggttatcgatttgaaaaaagttattgaagtgaatttgtggttattatgatattttgggtttatttttaatatgtatagtataggtaaattaggggtatattttatgttgaaagatgatgtgaaatgatgagtaaatattgttttttaaataataataatatagatggtgaattataatttgtatttttggttttatttgtttaaagatagtgttttattgtttaggttttattgaaagaatatttaattaaatatttgagttaaattattttagtgtaatagtttttataaggaggaaggtagaagggtaaaagtgttaagttattgtttttagtttttttatttttattgattgattgattgattgattgagatagggtttcgttttgttatttatgttggagtatagtggtgtatttatggtttattgtaattttgaatttttgggtttaagtagtttttttattttagtttttaaagtaattaagattataggtgtatgttattatgtttatttttttaattttttaaattttatttggatatgggggttttattatgttttttaggtaggtttttaatttttagttttaagtaatttttttttttagttttttaaagtgttgggattataggtatgagttattatttttgttttttttagttttttttaaagtttttaattttatttaggaggtttttgtatttatgatttaattattttttaaagggtttattttttgatattattatattggtgattaaattgtaatatttgaattttgagtgatatttagattatagtattttggagaaaatgttttttttttttttttttttttttttagttttttttttttatagatattttgtattttatttgtaattttgttgaagttttttttgttttaaaagtttttttttttaaaatattagaatttattttttttgtttaattgtaattttgtatttgttattaatttttatttatttttatttttgattttttagtttttggtaatttttaacgtattttttatttcgatgaggttaatttttttagattttatatatgagtgaaattacgtaatatagtttttttgtttttggtttattttatttaatatagagttttttaggtttatttatgttgttgaaaatgataggattttatgtttttttatggcggaatagtattttattatgtatatatattatatattaattattttgatttgattaatatataatgtataggtgtgttggaatattatgttgtattttataaatatgtataattattacgtgttaatttaaaaaatttaagaaaagtatttttttttagtgttgtttttttttaaagtgtattttatttttttttttgtttttatttttaaaatttttgaaagattattttaatttgcggtttttgtttttttgtttttaatttatttttttgaaatatggtttttatttttaatattttgttgtttttttgaaggttattggtgttttattaattataaaatataataatgtttttttagattgtattttggtgagtttttttgtaaaattttattttttgagaattttttttttatgttttttttttttttttttttttgtggttattttggtttataggaaatcgtattttttaaatgttttttatgttttttattttttttttgataatttttttattaaatttttttgaggtatatgttttagaatgtttaatttatatatttttaatttttttttaatttatatattgtttgtcggtaatgttaatatttaataagaagggagatttattggttagaataggttagggaatagaagaatatataataaatagtttgtttagtttttttagggttttataatatgttaaatatatatttttatttttttttttagtttatttttagtatatttaaattattgttagtgattttgtaggtaaataatggttgagttgtatgatataattttgtgaaagtattttatttagtatttgatgatgtaaaatttttttattttgattggttgttaatttgaggagtttttaattttggggaagttagaaaaatagcgatttatatttttaatgggtattttttgattgaattttatgagtttattttgaagaggttgacgattttattattttattttttttttttttttagaatgggttttgggtgggttttttgggtggtggttttgttagtgaatttgattcgattggatttttttatgatttaaggtatagattttttaggtaagaatagagtaattgtttttttttagtgtgtatgtaagaattggtatgggggagtgatgtttttttttgtaagtttaggttatagattagattggaagtggtttttggttttaaagaatagtgtttttttttttggtagaaaggtacgttttgtttttttatatgggatggattttatatattagagttatttatttaaggggtagggaggtaggaagagggaaatattgtgttttgtttaggatttttattgtgtgtattaattttagttagtgtttgggcgtgttgaaggttttggtttgggttcgagtttgttgggagaaataatttgtagtaggttgggttatagaggtaatttgtgattttttggttaggatacggaaataaattttagttggggtatatgtggataaatgaaattggaaataaaggttgttttttttgttatttattaagttattattatattgttagaattgtattaaatagttttgagaagtaagagaagttgaatagaatatattgtttttgtttttcgtttattaggtataagttatttgttattgttatttttttagtataggtgatagaatatgtagttatgaagtaatgtgagatgaaagtatatattaatgagtagaaataggatgtaatgtgttaagaatagaattttttttgtatgttagttttattaaatataaaagaggaataaatttggttaggagagattattatttttagagaatagaaatcgttttgagtttataatgtttattaaataatataattgaaaaaaaaattagtatagatgttaaatgatgatgaaaaatttagattttttttttagtttagattattagaggaaatagagaagagtatatatgttgagaaattataggttggaattttatttgaaattagttattgagtgagggataagtggggtttatttaggaaggttatttttatggtttagtttagagttggaggaggttaaaggaaaggtaaattataatttaatattaatagtaattattttttaagttttgatttagatgtaatgtttttaggacgttttttttgatttatttatattattaattttatttgaattttttttttattgtagttgttgtttttaagtgtataggattggtttaattttatttaatgagtttatagtatattgtaattattggtagtagtgtaagattttttcgtttttttttttgttttcgtttttatttttttttttttttagagaatttattttaaacgtgtttggtaagtttttaagtatgagagtggtttttagaaatatgtagtattattgttttttatgtgtttttaaaatttaataaatgttattttttgttgaattttattttgtttttttttttatttgatattgtgttttttgagtatattgaggttaaaggtttttttttagatttatgtggtttgacgtaatttattaggtatgggtttttttagaggagggggttggtttatggttttggttttggttttttaga

SEQ ID NO: 880 - DNA, 6685 bp, Artificial Sequence
  chemically treated genomic DNA (Homo sapiens)
tttggaaaattaaaattaaaattatgaattagtttttttttttgggaaaatttatgtttggtaaattacgttagattatatggatttaagaggaggtttttgattttagtatgtttaaaaagtatagtgttaagtgagaaaagaaatagaatgggatttaatagagaatgatatttattaaattttaaaaatatataaagagtaataatgttatatatttttaaaagttatttttatatttagagatttattagatacgtttagaatggattttttagggaggggagagaatgagaacggaggtaagagaagagacgagagagttttgtattattgttaataattataatgtgttgtgaatttattgggtaaaattaaattaattttatgtatttaagaataataattataataaaaaggaaatttaaatggagttaataatgtaggtaagttaggaaggacgttttgaagatattgtatttaagttaagatttgaaagataattgttattaatgttgggttgtaatttattttttttttagttttttttaattttgaattgagttataagaatgatttttttaggtgaattttatttattttttatttagtagttaattttagatgaagttttagtttgtaattttttagtatgtatatttttttttattttttttagtagtttaaattaggggggaaatttgaattttttattattatttaatatttgtgttgattttttttttagttgtattgtttaatggatattataaatttagggcggtttttattttttgagaataatgattttttttggttaggtttgttttttttttgtatttaatgaaattaatatgtaaaggggattttgtttttagtatattatattttgtttttgtttattaatatgtgtttttattttatattgttttatggttgtatattttgttatttgtgttagaaaaataatagtgataagtaatttgtatttggtgggcggaggataaggataatgtattttatttaattttttttattttttaaaattgtttagtataattttgataatataatagtggtttaataaatgatagaaggagtaatttttgtttttagttttatttgtttatatatattttaattgagatttgttttcgtgttttgattaaaaaattatagattgtttttgtgatttagtttattgtaggttgttttttttagtaggttcgaatttaagttaaggtttttaatacgtttaggtattgattgaggttgatatatataataaggattttaaataagatataatgtttttttttttttgtttttttattttttgaataggtggttttggtatatgaagtttattttatgtaaagaggtaaggcgtatttttttgttaaagggaagaatattgttttttgaaattaaaagttatttttagtttggtttgtggtttggatttataaagaaaggtattatttttttatgttaatttttgtatatatattggaaaaaaataattgttttgtttttatttggagagtttgtgttttgagttatggaggaatttagtcgggttagatttattagtagagttattatttaggggatttatttagaatttattttggagaaaggaaaaaaatgagatagtaaaatcgttagtttttttagaatgagtttataaaatttagttagaaagtatttattaagagtataaatcgttgtttttttggtttttttaggattggaaattttttagattgataattaattaagatagaagagttttgtattattaggtattgggtaggatatttttataaagttgtgttatataatttaattattgtttgtttgtagaattattgatagtaatttaggtatattaaaaatgggttgggagaagaagtaaaaatatatgtttgatatattatggggttttagaagaattaggtagattgtttattatgtatttttttattttttggtttgttttgattaataggtttttttttttattgggtgttgatattgtcgataggtagtgtgtaaattaagaaggaattaagagtatgtaaattaagtattttgaagtatatgttttaagaagatttagtaaagggattattagagaagaaatagaagatatagagaatatttggagagtacgattttttataagttaaaatgattataaaaaaagaaaagaaaagaaaatatggaaagagaatttttaaagaataaaattttgtaaaaaggtttattaggatataatttaagagagtattattgtgttttatggttagtagggtattaataatttttaagaggatagtagagtgttaaaggtagaagttatattttaaaagaatgaattggaaataagaaaataaaggtcgtagattaaaatagttttttaagaattttgaaagtgaaaataaaggaaaaaatgggatatattttagaaaaaaataatattaagaaaaaatattttttttgggttttttaaattgatacgtaataattgtatatatttatggggtatagtatgatgttttaatatatttatatattgtgtattgattaaattagggtaattagtatgtgatatatatatatgatggaatattatttcgttataaaaaagtatgaaattttgttatttttaataatatgggtgaatttggagggttttatgttaagtgaaataagttaagaatagaaggattatattacgtgattttatttatatgtggaatttaaaaaagttgattttatcgaagtaaagagtacgttaggagttattagaggttggggagttaggggtagaaatgggtagaggttggtaataagtataaagttatagttagatagaaggaatgagttttggtgttttgggaaaagaaatttttaagataggagagattttaataaggttgtaagtgaagtgtaaggtatttgtagaaaggagaaattgaagagaaaaaagagaagaaaggggatattttttttaaaatgttgtggtttgaatgttatttaaaatttaagtgttgtaatttaattattaatgtgatagtattaaaaggtgggttttttaggaggtgattaagttatgaatgtagaggttttttgaatgggattagagattttaaaaagggttagagagagtagggatgatggtttatgtttgtaattttagtattttgggaggttgaggaggaagattgtttgaggttaggagttagagatttgtttggaaaatatagtgagatttttatgtttaaataaaatttaaaaaattaaagaaataaatatggtggtatgtatttgtggttttagttattttggaggttgaggtgggaagattatttgagtttagaagtttaaagttgtagtgaattatgaatgtattattgtattttagtatgggtaatagaacgaggttttgttttaattaattaattagttaattaataaaaatagaagggttggaggtaatagtttggtatttttgtttttttgtttttttttttgtgaggattgttatattggaatgatttgatttaagtgtttagttaagtatttttttagtaaaatttagatagtaaaatattatttttaagtaaataaaattaaaagtgtaaattgtaatttattatttatgttattattatttaaagggtaatgtttatttattattttatattattttttagtatgaaatgtgtttttgatttgtttatattgtgtatgttaagaatgaatttagggtattatggtaattataagtttattttagtgattttttttaagtcgatggttaaggtattaaattttttagggttatgattttgaatttttagtttttagaattgtgagaaataaatttttgttttttataaattattttatttcgtgtattttgttatattaatataaatggattaagatagagagtataaggtttgggggaagaagggtatatttttttagataaaagaataaagataggacgattagtaggggataaaggggaatgaggaagttttatttagatggttgtaagggagttagttgagaataaggtaagatttgttaaaaaggagttggaagaaaatatatttgataattaagaagagtaagaagtggtttgtaagtgagtttttaaagttttaattaagtaggatttagaaaagagaggtgagatgtaattgtgtaattttttattgttttatgatttttagtaaatgtttttggttagaggtttggattagattaattagaaaaataattttttttttatgggagattataataggtaaagaaaaagagagtaagacgtggaagatatcgttagtgtttattttttaatttttaggtttatggaaaacgagaaattagattttttatttttttggagttgtgtgattcgtttttattaatggaaagtgaataaaaggtttttggttaaagaatttaatttttcgtgtatgattttttttttttttttttattaagttaattaagatagttttgtgttgagatggtataattttagtagaaaagtagtttaattagttgagttattatgaagagtagttgttttagggaattatttatatttataatatattttgtatgaatgagaaataattgttttttaaagaaggtattggtttggttattatagtttggtttgatttgatttaattgttataggataggagttaggaggttgatttttttttttttatattttttatgtaaatgtgacgatttatgaagtggaaggttggttataggtttattggtagattttcgagtataaggtatttgattttggttttgagtattttttttttaggtggatggttgtggagtttatattggcgagggtttgtgtggagtcgaggataaggaggtattagagggtatttaagttattgggtttaatttttttttttttttttgtttatatttattttagttttttttagatgttttattgtatttggaaatggagataaatatttaatataggttaagtgaataaggatacggtacggagatgattagatgtagtaatagtatgagcgggtggaagaggcgtgtgtttttttttttgtagatagtattatggttggtttttgtagttttttttagagttgaaggaagggttatgtggagaggagaggaagggtttagataatatggattaaacgggggtttgtatttagatttagaggagagagggggttgataaatggtaagggatgtggggatggggaggaagtggaggatatggcgttggattagaaagttaggagggttgtttttttttttttgtaaatgtgtttaaggtttataaattttaaaatttgatttgtttatataataatagttaatgtttgttaattgtttattatgagtttattttttaagtattatataaatgtgtgcgtgtgtgtgtatgagagagagagaaagagagagaattattatataaaattttttgtagtagatattattatgattttttttttatagatgaggtaaggatggaatgaattaaagtttatataattagtaagtttttaggttatattttttttgttatattgtattttttgggaagttagggaaattttatttttatagttttagtatttcggtaatgataaggtatataaaaagggaaaataattaaggaattttattatagttgtttggtgttaggatagatttttgtaaggaaattatattttatttaattaaaggaaattagtgattttatatgataagtaaggaatggtatagagtttggtatgggaattaagaagagaaagtaataagttttagttagtaagttatggatttttttagatggtttttggtatattttaaataaattgaagtattagatttatttttattagaagcgtttttgagttattttttgtgtatagtgttagtgtttacgatagaagggtttgggtttattagagatattgtttagttttggggagataagaggaaaaagatgtggtttttttttttttttttgtatttatgtttttgttttttatttgaacgagtttgaaaaatagggtagggtgttttgattttttttttttgtttgattttagttagtagttttttttaaatagttataggtttttttgtgattttttatttaagtttatattttgtttttttttttttttttttttttttttttttgaggagtgagagaatttgggtgtatgtgtggttgttttttgagggtggtataaaattattattttttttattgtttgatataaatatttttttaattgttattttggtgattttgatatggaagtaaaacgtatattttaatttatttttttttttttatttttttttaatatattaatataatttatattgttttggaggagttatgaaaaatattttgagtttttaggtagaatattaaattatatttttagagaatatattgttgagttatagtttaattgaaggaattgtattaggttaagaattttgttagtttaaaatattggtttaatttttttttagtggtgattgacgttttaaattagtaagaggtgtaatatgaggggaaggggttggggaagagggaaaggatgtaagaaataaaagaaatagttag

SEQ ID NO: 881 - DNA, 9652 bp, Artificial Sequence
  chemically treated genomic DNA (Homo sapiens)
tgataaatgtattagagtgagaaggaattacgggatttttttgtttttattttttaatttatagatttttttgtgagtttttagttttgatatgtggggatttagtttgtgtttggttatttatagtgataggagaatgattttttgttattgtaattgtaagtgtttagagggtatgatttgtgttttattttttattgagaatgattttttgatatagtaagtggttaagtaaagagtggtatttgaaattaaataaaataaattttataggtattttattaggaaatttagtttgttttttagtttaaaggatttaaaggatttattaggaaaaagagggtaaaataaaaagatataaagttttttagtagttattggaaatttatttttttaatatatgaatgttttttgtattttttaaaatgttttttaaaaaatatttttataagttttgtagtttaaagattagttagttatggaatagattatttttttttaaaatattatttttatttagataaaaatatgtattaaaagattattatatgttaaatattgttagatgttaaatatttaaataaaaataatatatacgttttgttttgtagacgcgtataagttatagaaggaaatataagtgataggataatagtaggtttagaaggataagtgtagatacgtaggtatatataagatgcgattaaatagtatattagggaaggttttttggggaatagatggttttaatgtaggtatttagaaaatagggtaaaagttattttttttagggaagatagtttgatcgggagaagatattgagtttattgtggggttattgtatttagaagatttgaaagttatttaaggagaaataatatatagatatttgtggattatgggtggttttaggagaggaatttaggttatagaattgagagttattagtggtaggtgtaggttaaataagattttttaggaagagtgttaaaaattagaattgtcgagattttagggtataatgagagaatatgatagttaagaggtggtttaaaagatgataaggaggatttaggtaaataggagaaaaataaggatagggtagtttattagaaagaagtggattatagtgtaaatgttattagtaatttaagttagaggtattgagaagaatttattgaatttgattttttgtagaggtttttgatggttaagatgagaggatttttagggatgtattagagataagttagaagtttagttttacgtgtgaggatataaagaaagtgtttttgggataggatgtagattgaaggtaaggttgttttttattagttggtttgtatttatgtttttaaggtaaatgatatgtttaaatgttaagagattgggtagggaagttttgaagagatagttgagtttattaggaatttttattaagaatattaaaaagtatttgtatttatgaagagaagtttattgtggtgtttattataatataatattagaaataatttaggtgatcgcgaatagggtaatagatatttttggttttatttagtttgattttttttttattttatatattttaaataaaattgtttgaagttagtgtgtattttgtacgttatggattttaattttttttattattagattttggaatgatagtattatgtataggtttgatgttattttttttgattttagttataggaaaaaggagtatttattacggtttatttttggttgagtttttgtagttattaaaagtttaggttttttttgtagttttgaattttttagaattcgaattataaggttattaagattatgtaattttgttgttttgagagaggaaagtttgtgattatttataaagatttaggaagagttttagggttttagaagagagggaggatatagaaatattttttgtatttcgttttttaatgtagagtttatagttcggagtttttgtaaagtagttataaaagatagaggttggggattttagagagataggagggttttgatagtaggttattgtgtgtaggaatttggggaaggtagtgtatgatttttagagttgggtttggattttaaatttggttcgttgatttgttgtgtaattttggaaaatttatttatttttttgagttttagtttttttaaaataatttttaaataaaaggaataatttttaaatgaatggaatattatttttattgaagatttttgtgagatgtaaatggggaaagaaattatgtaggagttttataaattttggttgttattgttgttattattatgagggttagagggaatatagattatgaggattagatagattaatgagtttttaaaatttgtgatttttgaagtagtaattgatgtgaattattttattatttatttcgacgtttttgcgtttttttgagtatttatttttgatggttttagtttttcggagatttagtaggaaagttaaggagagggtttttaagattatagttttgatatggaatattttgtttttagggcgtatgttgtggggtttataattgatgattgtgagtataggaatagtgatgaggaattgaggtcgagtggaggtagatgagattgaaattgtgggtttttagtattggaaatgggtggagaggaattagtatggttgggatttatttattagagaaattatagagttgatattttttgttgttgggtaaagaggacgttggaaggtgttggggaagagatgggagaattttaggtattagcgtggttaagagagttttagtttatagtttatttttagagttagagaaagagatgtaaaaagataagttatatttttttttgacggtaaatgttttttattatgttttttttttcgagttttatttttattttagatagttagatgattttcgatgttttttggttattatattttaaattatgttttatgttatgttgttaatattttataaaaatattttgttgataattaagaatgaatgtgttatttaataaaatatataattaattttttttttaggtttatttttttgagatattttttttttatttaattatttttgtagaagtgttataatttttatttagaggttttaattaatttgaatgaagttgatttttaattgtttatttatttttggttatttttgttagtgaaatttttagataatttttattttttagattttttagtatttgattttttttggtatttaaatagtgtaataatatttttatttttaaattattagttttgttattttatttttatataagaatatttaggatagtattatttgtggtaataatgtgcgtttatattttgattttgtttttaagaagggtttttttaatgtttttttgttataggtaatgttaattttttattttatattttttttattatatttaagaaatatttttttagttttattttaaatattttaattttgagttatttatttgatatttatagagaaggttataaaatatttattatttaatgtaatgatgaagtatatatattacgttaatattttattttatttgtggtagttttattttgtataaataataattattaatagattaggatatgagagattttgttattagtgttttgtatgtattattttatttaaattttatattaaatttgagggaggtattattaatgtttattgtaaaaataaattatttgagatatcgaggaagtatttgtttaattatttatggtaggtaaatgataaggagaaaagttttatttaggtagttattaaaaaaattgagtttttttttataatttttttttggttttttaattttattagatattttttattatataattattttttttttttgtattttatatgttagttttttatttatattttaatattgatttaaagaaatgatgttaatttgattttttttgaaattagaattggtggtttaataggattatatttataagtgtttaaagtaagaagtaatgttttttgaaagtttgtaaaaatatttattttaaataaaatagaattagatgttttgaaggaggtggggtttttgatgatttttttttatttttttttttatttattagttaatttatattttttatggattttatttttttaaagtaattttagatttattgattttatttgattttaagagttttgttataaggtaggttatattatttttatattgaagataaggaatcgaagtttaagagaggtagtgtcgttaaagttgtatatttatatggtagggtaggtggtgtgtttacgtttttagtgtaaggtttttagattgagtttttttgattttgatgatagttttgtggaagaatttggtaatttttgtatatcgtaggatttatagatttttgggagaaagtaaatatgaatgggtgttaattttaaatatatttttggataaaggtaagatagatagatttagattttatttgagttttgagatgggtattttaatttttttaagttatgttattgaatgattttttatatattaagatagtattttttttataatagattatgttttgtgggtgtgtgaggtgtggtagaattggggaaatgataatttttgtagatgggttagtagaatatttgagattatttttagagtaaagaaaacgtataatttcgttaaatattatgatttatttgattggttaaaatgagtattattgtttttttttcgttattttaagtgtattataggttttatatttttagattttttatattaattttttgtttagtgagtaatgatttatataaagtttagtgtttattggttttttttttagattttgtttaattttagggttatagaagattatttgggtttatggtttttaatattttaaataggagttttttttagcgagtttttttttttttgattgtagttttttttattttgttatttttttttagttttatgatggttttgtaggtttttgcggtttttcggatagtggttttgacggcgttattgatggtgttgtttatatttgtggtttagggtagggttattttaggtaagagtcgaattgttatttttggagggtttggtttagggaataatttttaggggacgttatttttaagggattaaattttgagataggttgcgggggtttttgttttaaggtagtgttttttttttttagttagagaaagaggtttattttttataggatagtttgttattttattggtttattttttttttaaggatatgggtatagtaaatagagagaggtgtttagtggttagtatgtttgtttttggggaaaatgggattaagaggttttggataattttggatagataaggtttgtagagagagaagttggtaagtgtaggtttttgggcgtgtttatgtttgtatttagtttggaggggatttaggtagagagttttaagttggagtgtttaggttttgaggattattgaggatttagtgtttacgaagaatgttttttattttttagggtggagtaggagtttatattttttggataattaaggagagaagggagggagggggataggttttagtttttgaaggtatttttattaaaggtattttttttagtttttttagaatttggttagggtattagagtgggttgcgatttgtaggaagaatgagatgaggttgtgtgggtgtatgatagggattgagtgtaggttattagatagttaaggaagtagtaattaagtgaaaaattttttttttttgttgtttttttgtggttggtgtaatattatggtatttatgatttattgttttttttttaggatatttttaggatatttttttttatatatatatatattttaagttttagggtatatgtgtataacgtgtaggtttgttatatatgtatatatgtgttatgttggtgtgttgtatttattaattcgttatttatattaggtatattttttaatgttattttttttttttttttttattttataataggtttcggtgtatgatgtttttttttttgtgtttatgtgtttttattgtttagtttttatttatgagtgagaatatgtggtttttggttttttgtttttgtaatagtttgttgtgaatgatggtttttagttttttttatgtttttataaaggatatgaatttatttttttttatggttgtatagtattttatggtgtatatgtgtgtatttttttaatttagtttattattgatggatagttgggttggttttaagtttttgttattgtgaatagtgtcgttataaatatatgtgtgtatgtgtttttatagtagtatgatttataattttttgggtatatatttagtaatgggatggttgggttaaatggtatttttagttttagatttttgaggaattgttatattgttttgagatattattttatattagttaaaatggcgattattaaaaagttaggaaataataggtgttggagaggatgtggagaaataggaatatttttattttgttggtgggattgtaaattagtttaattattgtatttttaggatatttttagtttaaatttatattaatattttgagaggaaggattgtaaagtaggtattttagttttttattgatttttattttttttgtttatatttttttttttagatttttttatattttttttaggatatatttaaaaggtattgatattatgttatttttttattttttagggtagtaaggttggaattttttgaatatagttttttaagttttaaaattttttatttattattttgggtttattgtttaggaaggggaggagaatttgaatttgtagttatagaagggtgttgagaattaattagtaggacggtttagttttgggaattgtagaggggtgaggttggggagagaggaggttggagtagtattggtgatattgaatagtgttaggaggaagtgacggatgtagcgtttttattttataggtagagttgttatgtgggatgagggatagtgttgggagttattaaggaaatttagaggtgggggagtagagagtagaagggagtatgtgatgttggatagtgaaagggaggataggtaaaggttgggttgaggtttgtagggggaatgagatgaggtagtggagttatgtgatagggattgagggtagattattggagttttttgcgtagaatgaatgtttaattaaaatttgttggagggagagttggagttataggggagtgggtaaagtgggtagggttgattttataattttttgtatgtttttttaattttatatatatttttaattttaaatagggtataagattaaagggttgaggagttaggttatagtttaaagaggttgggggagaaaagtttggttgagataatttatagggagttagaggtttttaatatattttattttgaataagagacgaatttatttagattagtggttttaaatcgtgttttgggtaatttaattgttaagggttttataaataggataaagttttttatatataaaaaaaaatgaaggttttaaattatattataaaattttttattgtttatgtttatttggtaggtaaaattttattttaaaagttaaatgtatttaaaaaattatttaagattgggtaaattaaaaaaattaaatgttgtaaagaaaaaatttaaaatttttatttttgaatgaaaaacgtttttttattggtgattgaggaggagaaataaagattaataaatgaaaatgggagaatttatatttagagtggggtaattgaataggtaggggcggatggatggtagaggaggaggaatttggattaaggagttggggggttttgggtttggaattttagggtttggggtttaatattaggagagaggtaggttaggatatttgagttaagatttgggattttgttttagtaatgatattggagattaaaggtggattttatggtgtttttgagtttagttttattttatttttattattttttgttattagttgtgtaatttttgttaggggtgaggttaataaattggagaagttaatttgtggagtatgaaatagatgagtagaataattatagtattttaatttttttagtgtgtttaagaatagagtaggtttgaagatatttaaatagaaataaatatgtgtcgtgttattgataattttgtgtagatatatatttgttagatattgtttatggtattttttaggaagaatagtatgtgggaaaggttgttaaaattgtttatgtaaaaattatattaatgttgtttttttcggtgttgtttatgtagttggtagttatttttttttttatattatggttttttttagattttttatgaaggataagatttttaaaaagaggattaataagtttatgaggtattaattagattgaaatgttaaaattaagtataattggcggaaatttagaggttttaatagtagggttcgtagaaggtttaagggttagattttgatgtttaatattgtttatgggagtaataataataataaaaaaaatatgttgtttagtggtttttagaagtttttggtttatagttttaaggagttgaaagtgttgttgatgtgtaataaattttattgtgttgagatcgtttataaaattttttttagaattgtaaagttattatggaaagagttatttagtcggttattagagttattaattttagtattagggtgtatagttaagaaaatgagtagaaagtttatgtttacgttttgtgtgtaaataaaattataaaaattgttaaaaaaaattatattaatgtttttaaatttaaaggattttatttttataggtttttggttgttgtggtgatttttattgtgtaaaatattttttatattttttgatattaagtttttttgtagttatgtttgaaaattaatttttaggttatagagttttttttatattaaagttgaagaaagttttaagaaatatatttttatattttttatatgtaaaataataggagtaagttgaggaatttttaagaaattggtcgagaagagagagcgtttagttatggaaaagagaaagaaggaagggagggttttttggaggaggtggtatttgaattaggattgatattaggatggaaatgttagttagggagttaagtagggggagtagtttcgttttttacgtttttagtttttttcgtttttgtttttttttttagtgattttacgtgaaacgttttcgttttttttagttattagtagaagggattgttttttttttagtgttcgtttttttttagtgattatttagtgtttttgagtttattttttttagtaaattttttttttgcgtggtgagaaaataggtttggagaggttttgcgattcgtttaggattatagaattcggtattaggaaaatttttattttaaaatttagttttgggtgggaagatttgggaagaatcgttaatattgagagagagagggagaaagaggattagatgagagtggcgttttcgtttatgttcgtttttttttcgtaga

SEQ ID NO: 882 - DNA, 9652 bp, Artificial Sequence
  chemically treated genomic DNA (Homo sapiens)
tttgcggggagggggcggatatgagcggaggcgttatttttatttaatttttttttttttttttttttttaatattaacgattttttttaaatttttttatttagggttggattttaaaataggagtttttttagtatcgagttttgtggttttaagcgggtcgtagagtttttttaggtttgtttttttattacgtagagagagaatttattgaaaagaatgagtttaggggtattgagtgattattagggaggggcgagtattgaggggaaggtagttttttttgttggtggttggaggaggcggagacgttttacgtggggttattgggagaaaaaataggggcgggaggagttggggacgtggagggcggagttgttttttttatttaattttttgattgatatttttattttgatgttagttttggtttaaatgttattttttttaggaagttttttttttttttttttttttttttatagttaagcgtttttttttttcgattagttttttgagaattttttaatttgtttttgttgttttgtatgtaggagatgtagaaatatattttttaaaattttttttaattttggtataagaaagattttgtagtttgaaagttaatttttaaatatggttgtagaaagatttggtgttaaaagatgtggaaagtattttatataatgaaaattattataataattagggatttgtgggggtagagttttttgggtttagaggtattgatgtaattttttttggtagtttttatggttttatttatatataaaacgtggatatgaattttttatttatttttttagttgtgtattttggtattggggttggtgattttgatggtcggttgggtgattttttttatgatgattttgtagttttggaggaaattttgtgagcgattttagtatagtaagatttgttgtatattagtagtatttttagttttttgaggttgtggattagaaatttttggaagttattgggtagtatgttttttttgttgttgttgttgtttttataagtaatgttgggtattaagatttggtttttggattttttacgaattttattgttaagatttttgggttttcgttagttatgtttaattttgatattttagtttgattggtgttttatgaatttgttggttttttttttgaggattttattttttatgaggagtttgagggaggttatgatgtggaggaagagatggttgttagttgtataggtagtatcgaggaagatagtattgatgtaatttttatatgaataattttggtagttttttttatatgttgttttttttagggagtgttatgagtagtgtttggtaggtgtgtgtttatatagaattattagtgatacggtatatgtttgtttttgtttgagtatttttaggtttgttttgtttttgggtatattggggaaattaaggtgttgtgattgttttgtttatttgttttatgttttataaattaatttttttagtttattaattttatttttagtagaagttgtatagttggtggtagaggatagtggagatggggtagggttgggtttaagggtattatggagtttatttttagtttttagtgttattgttaaggtaagattttaggttttgatttagatattttgatttgttttttttttggtgttgggttttagattttaaaattttaggtttagagttttttagttttttggtttagatttttttttttttgttatttattcgtttttgtttgtttagttgttttattttgagtgtggatttttttatttttatttgttagtttttgttttttttttttaattattagtaagagaacgttttttatttaagaataagaattttgaattttttttttgtaatatttaatttttttaatttatttagttttaggtaattttttaagtatatttaatttttgaaatggaattttatttgttaagtagatataagtaatgaggggttttatggtgtaatttgaaatttttatttttttttgtatataagaaattttattttgtttgtggaatttttagtaattgagttgtttagagtacggtttgaaattattgatttgaatgaattcgttttttatttagaataggatatattaaaaatttttagttttttatgggttgttttagttaagttttttttttttagtttttttaagttatagtttggttttttagttttttggttttgtgttttgtttgaggttggggatgtgtgtggagttgggggagtatgtagggaattgtggaattagttttgtttattttatttatttttttatggttttagttttttttttagtaaattttgattgaatatttattttacgtagggagttttagtaatttatttttagtttttgttatatggttttattgttttattttattttttttataaattttaatttagtttttgtttgtttttttttttattgtttagtattatatgtttttttttgttttttgtttttttatttttgggtttttttggtggtttttaatattgttttttattttatatgatagttttgtttatgggatgggggcgttgtattcgttatttttttttgatattgtttagtgttattagtgttgttttagttttttttttttttagttttatttttttgtagtttttagggttgagtcgttttgttggttagtttttagtatttttttgtgattataagtttaagttttttttttttttttggataatgaatttaaggtaatagataagaggttttagggtttgaggggttgtatttaggagattttaattttgttattttgaaagatgaggaggtgatatgatgttagtattttttaggtgtgttttaggaggggtgtggagaggtttaggaggaagggtgtaagtaggaaaagtggaagttagtggaaaattaaggtatttattttgtagtttttttttttagagtgttggtgtaaatttggattagaaatgttttgagagtataatggttgaattagtttatagttttattaatagagtaaaagtgtttttatttttttatattttttttagtatttgttgttttttgattttttaatgatcgttattttaattggtgtgagatggtattttaagatagtgtggtaattttttaaggatttagaattagaaatattatttgatttagttattttattattgggtatatatttaaaggattataaattatgttgttataaagatatatgtatatatatgtttatagcggtattatttataatagtaaagatttggaattaatttaattgtttattagtgatagattggattaagaaaatgtatatatatatattatggaatattgtgtagttataaaaaaggatgagtttatgttttttgtagggatatggaggaagttggaaattattatttatagtaaattattgtaaggataaaaaattaaagattatatgtttttatttataggtgggaattgaataatgagaatatatggatataggaaggggaatattatatatcggggtttgttgtggggtggggggaggggggagggatagtattaggaaatatatttaatgtaaatgacgagttaatgggtgtagtatattaatatggtatatgtatatatatgtaataaatttgtacgttgtgtatatgtattttagaatttaaagtatatatatatataaaaagaaatattttgagagtattttgagagaaaaataatggattatagatgttataatattatattagttatagggaggtagtaggaagaagagattttttatttggttattgtttttttggttgtttgataatttatatttaatttttgttatgtatttatataattttattttattttttttataagtcgtaatttattttagtattttaattaagttttggggaggttgggagaagtatttttaatgagaatgtttttaggggttaaaatttattttttttttttttttttttttttaattgtttaagggatgtgggtttttgttttattttggggaataagaggtatttttcgtgagtattgaatttttagtgatttttagagtttggatattttagtttagggttttttgtttgagttttttttaggttggatgtagatatgaatacgtttaggagtttgtatttgttaatttttttttttgtaaattttgtttgtttaaggttatttaggattttttggttttattttttttaaagataagtatattgattattgggtatttttttttgtttattgtatttatgtttttggagagagaataggttagtagggtagtaagttattttataggggatgaatttttttttttagttgggaagagaggatattgttttagggtaggagttttcgtagtttgttttagaatttgattttttaaagataacgttttttaggaattgttttttgagttagattttttaagaatggtagttcggtttttatttggagtggttttgttttggattatagatgtgagtagtattattagtaacgtcgttagagttattgttcggggggtcgtagaaatttgtagaattattatggagttggaaaaggatggtaaaatgaaaagagttgtagttaggaaaagaaggattcgttaaagggagtttttgtttgaaatattagagattatgaatttaagtagttttttgtgattttgggattggatagagtttgagaaaagaattaatggatattgagttttgtatgagttattgtttattaggtagaaagttagtatgaaaggtttgaaaatataaagtttgtgatgtatttaagatgacggaggaaagatagtgatatttattttaattagttagataagttatgatgtttggcgagattatgcgttttttttgttttgaaggtgattttaaatattttgttggtttatttatagggattattatttttttaattttgttatattttatatatttataggatatggtttgttgtggaaaaagtgttattttagtgtgtaaaaggttatttagtggtatgatttagagggattagagtatttattttagaatttaaatgaggtttgagtttgtttgttttgtttttgtttaagggtgtgtttaagattagtatttatttatatttatttttttttagaggtttgtgagttttgcgatgtgtaggagttattaggtttttttataggattgttattagggttaggagggtttagtttagggattttatattgggagcgtggatatattatttattttattatgtaaatatgtagttttaacgatattgttttttttggatttcgattttttgtttttaatatggggatgatataatttgttttatagtaaagtttttaagattaaatgagattaataggtttgaaattgttttggaaaaataaagtttatagagaatataaattgattggtaaataaggaagaaagtgaaaaaaaattattaaagattttattttttttaaagtatttgattttattttgtttagagtgaatatttttataaatttttaaagaatattattttttattttagatatttataaatgtgattttgttggattattaattttaattttaaaaaaaattaaattggtattatttttttaaattaatattaaaatgtaaatagaaggttagtatgtaaaatgtaagagaagaaaataattatgtagtagaaggtgtttagtaggattaaggggttaggagaggattgtggagaaaaatttagtttttttagtaattgtttgggtgggatttttttttttgttatttatttgttatagataattagataaatattttttcgatgttttaggtaatttatttttatagtagatattaataatattttttttaggtttaatatgaggtttaaatgaggtaatgtatgtaaagtattaataatagaattttttatgttttaatttgttagtaattattatttatgtaaggtaaggttattataaataagataaaatattaacgtaatatatgtattttattattatattaaatagtaaatgttttgtgattttttttatgagtattaaataaatagtttaaaattgaaatatttaaaatgagattagaaaagtattttttaaatatggtaaagagaatataaaataaaaaattaatattatttgtaatagaaaaatattagagaaattttttttaaaaataagattaaaatatgggcgtatattgttattataggtaatgttgttttgggtatttttatatgaaaatgaaataataagattagtaatttaaagataaaaatgttattatattgtttaaatattaggaaaaattaaatattaagaaatttgaaaaataaaaattatttagaaattttattaataaaggtaattaggaatagataaataattaaagattaattttatttaagttaattaaaatttttaaatagaaattataatatttttgtagaaatgattaaataaaaaggaggtattttagggaggtggatttgaaagaaagattaattatatattttattagatagtatatttatttttaattattagtagaatatttttgtaaaatattgataatataatataaaatatgatttaaaatatagtgattaaaaaatatcgaagattatttgattgtttgggatgggggtggggttcgggagaaggaatataatggaaaatatttgtcgttagaagaaggtgtaatttatttttttatatttttttttttaattttgaaaatgaattgtgaattggagtttttttgattacgttggtatttaaaatttttttattttttttttagtattttttagcgttttttttatttagtaatagagaatgttagttttatgatttttttgataggtgaattttagttatgttgatttttttttatttatttttagtgttagaggtttatagttttagttttatttgtttttattcggttttagttttttattattgtttttgtgtttatagttattaattatagattttataatatgcgttttgaagatagaatgttttatattagagttgtgattttgagagttttttttttggtttttttgttgagttttcgaggagttggggttattaagggtgagtgtttaggaggacgtaggagcgtcggggtgagtgatggggtggtttatattaattgttgttttagggattatagattttaggggtttattgatttatttggtttttatagtttatgttttttttggtttttataataataatagtaataatagttagaatttatgagatttttgtatagtttttttttttatttatattttataggaatttttaatgaagataatattttatttatttagaaattattttttttatttagaaattattttgaaaaaattgaagtttaaaaagatgaataagttttttaaggttatatagtagattaacgagttaagtttgaagtttagatttagttttgagggttatatattgttttttttagatttttgtatatagtgatttattattagggtttttttatttttttgggatttttagtttttattttttgtggttgttttataggaatttcgagttatggattttgtattaggagacgaagtgtaaagagtgtttttgtatttttttttttttttaggattttagggttttttttgggtttttgtgggtggttataagttttttttttttaagatagtagggttgtatggttttgatagttttgtgattcgggttttgagagatttaggattgtaagggaggtttagatttttgatagttgtaaggatttagttagagatggatcgtagtgaatgttttttttttttgtagttgaaattagggagaatgatattaagtttgtgtatgatgttgttattttaaaatttagtgatggggaaggttagaatttataacgtataagatgtatattggttttagatagttttatttaagatgtgtagaataaagaggaggttaggttgggtagaattagaagtatttattgttttgttcgcggttatttgagttatttttaatgttatgttataataaatattataataggtttttttttatagatgtaaatattttttagtatttttggtagaaatttttaatgagtttagttgtttttttagggtttttttgtttagttttttaatatttaaatatgttatttattttaaaaatataagtgtaaattaattgataaaaaataattttgtttttagtttgtattttgttttagagatattttttttgtgtttttatacgtggagttaagtttttgatttgtttttggtatatttttgaggatttttttattttggttattaggaatttttatagaaggttaaatttagtgggttttttttagtgtttttgatttgagttattaataatatttgtattataatttatttttttttgatgaattattttgtttttattttttttttgtttatttggattttttttattattttttaaattattttttaattattatgtttttttattatattttgagatttcggtaattttgatttttggtattttttttggaaaattttatttaatttgtatttgttattaatgatttttagttttatggtttaaattttttttttgagattatttataatttataaatatttatgtattatttttttttagatgatttttaggttttttaagtgtaatagttttatagtaaatttagtattttttttcggttaggttgttttttttgagagaagtggtttttgttttgttttttgaatgtttatattgaagttatttgttttttaggaagttttttttgatgtgttgtttggtcgtattttgtgtatatttacgtatttgtatttatttttttgaatttgttgttgttttgttatttgtgtttttttttgtgatttatacgcgtttgtagaataggacgtatgtattatttttatttgggtatttagtatttaatagtgtttgatatatagtagttttttaatatatatttttgtttgaatggaaatgatattttgaagaaaaataatttgttttatagttggttgatttttggattgtagaatttgtgaaagtgttttttaaaaagtattttaaaaagtataagggatatttatgtattaagaagatgagtttttaataattgttagaggattttgtgtttttttattttatttttttttttttgatgagttttttgagttttttaaattgaggagtaagttaagttttttagtgaaatatttataggatttgttttgtttagttttaaatattattttttgtttggttatttattgtgttagggagttatttttagtgaaaaataagatataggttatattttttagatatttataattatagtggtaaggagttatttttttgttattgtaagtggttaagtatagattgggtttttatatgttagggttgaaaatttatagggaaatttgtgagttgggaggtgagagtagaagagtttcgtagtttttttttattttgatgtatttatta

SEQ ID NO: 883 - DNA, 8946 bp, Artificial Sequence
  chemically treated genomic DNA (Homo sapiens)
gtttttagtgtagattagtaaagataagattttgattggtaggtgagtgtgtggaatttattttaaatatgggggttttttaatattcgtatattaaatttatttatatattgttaaaagttagaggatatttatgataagttgtaaaaatagttataaattttttgtagtttattttgttaagaaatgtaatttattaatttattttttgatgtgagttagtattatgatttgttttgaataatagaatgtaatggaagtgatgtcgtgagttttaagtttagtttaagatatttgttgtttttattttgtataggagagttttttagtatttgtgataagttttagtttttttgttggataatgagtttatatgaatggagataggttttttatatttgttaaatttattgatgttatagagatgtgagggggtttatttgagaaaagttgaatttgtttagtatataaagattatttaggtgggttaagtataatttgttgttttatagaattataaggagatattaaattattatttgaagttattaaattttggaatattttgttatatagaaaatttgatagataaaatagtttttaaaaaaattgtgttttttagtaatgttttagtgtttttgtggtttataggtttttatatgtttggagtgttacggggagaaggttaaatgaatgaggaaaaattgataggtttttttagtttaaagtatgatgttattattattattattattaatatttgtttttatgtagtagttattatttgggaatagatgttgtatgttagatattagattgtatttaattttataattgtatttatttattattttattttattatattaattattatttaataattttttttttgttttatagaaaataattttaagatttaggtattttgagtgatttgtttaaggtgttgtagttgataaaattaaaagtagtatggaatatatatttattttattataaaatttatattttttttattgtgttattttagattttgttattgttgtgaagtatttttaattattgtaagatagaagttttggtttttagagtaaaattttattagtgtataaagttagattaaaataatttgaaaatatatagagttttagagaacgttataattgtttattagaattaatataaattttatttaattttttagagggtttttaatgatgtgaattataatggtatattttattgttattttagttatggaattaatggtatgttaataagtgttttttgagaaaattgttggataaagtattattttgaattttaaattttatttttattattaatttatgaagagaattttttttttttttattagataaaggtaataaattagtttttgttaaaatggtatattgtttttttgagttttatttatttattattttattttatattaaaattatgatttgaagatagaaggaattggaataatgtttattgtgttatggtcggatgaagtaggaagaggagaagagataaaattaggttaaaggtagaaatgttatttgttgggttaggcgtggttttacgtttgtaattttagtattttgggaggtcgaggcgggcggattatgtggttaggaggtcgagattattttggttaatacggtgaaattttgtttttattaaaaatataaaaaattagttaggcgtggtggtaggtgtttgtagttttagttatttgtagtgagtcgagatcgcgttattgttttttagtttgggcgatagagtaagattttgttttaaaaaaaaaaaaagaaaagaaaagaagtgtatttataatttttttaatgattttgttttggattttttttttattttataggatgtgagatttgaaattgtatttttaattttttatttaagatgtaattttaattttatatttaatattttaattttttaattggagttgagttatttaaattgtaattttaataggtgaaattttggattattattttaaaatattttgtttatttgttaaagttttaaggaatttttattagatataaagtaggtaagtttggatataggaaaaaaaataaaaatatgttatttgttatatagtaaaaaggatattgagtggtaaagggagtatattttaaatgggattttaaaaattttttttatttataatggtaggagttagaaagaataaagttatttatagggttaaatattttttttaattatgttaaggtattggattttgaattcgtatagaaggagatttttatttattattttttataaggatttatggtttgttttatagtattatatttgtgttgtttattagttgtgtgattttgggaaaagttttttaattttttgggatttaatgttttttttggaaaatgagaatgatattaaaatatgataagtatatgtaaagagtttaggaattttttattttaagtatagtatatgtatattttttataattgtttaatgaggtattttaatgtttttagttaaagattagtaggagtatttaagtaatgaataagttgattttattatttattgtaatgatggataaaatttattatgagaattatgtagtaagagattgttggaatcgaataagtagaattaggagaatatatatattaagagaatgatgtaacgaattaatttttgtatttgtaggggtgggttaggtaaattagagatttattgggtggtagttgttaggaagggtaggttggaatttttagtataggttgatacgttgtttagagtggaatttttttttttttagagaaattttagttttgtttttaaggttttttaatagtttagattaagtttatttagtttttttaggataaatttttaaagttaattgattatgaattttaatgatatttataaaatatttttatagtaatatttagattattagtgtttgatttgataattggggattatagtttagttgatatataaaattgattataaattaattgtaaggtttgtgtttgttttaggtgattttggggaggatttaagaatgagagattttgtttttagttggattttgatagaaagtggagggttggggtggtaatgttatgattgggtagttttataaattttatttagagggatagaagattattttgaggttatagatgtgatggtaaagaagtagtaattattttcgagagagatatatttggttatttttgtggtttggataatatttatgttttgtttgggtttagatatgatgattgagtattttggtattttgttttaatttattgtgtttatagaatttattgtgtttatagagtatttgtttgattttgatgttttgtgaaattttttatttttaataggagaattaaaattatttgggagtgttagtttagtttttagtaattttaaggttttgttaattgtaattaggtagtttttaggggttaggatattttttttgttttattttttttttttttttatagtttttgttagtgggaggtaaaatagtgttgagaattttagaaggttatttattaaggatagagtgattttaaatagattttttattaatttacggtttttattatatatagaaagtagatgtatttgaaaaaaataataagttttgttttaatgattaattttagtttaatttttagttttttgtaaatatttggaattttagtgtggtaggataataaattttaaaagatttggtagtttaagaaaagaaaattatttttttaagttagtgtaatttttattttatttttaatttttgatttgatatttttaattaaaaaaaaaaatttttagagtaattgagttagttaaattttaaatgtaattaatgtttttaaattttttttaaatatatgtaagaagtattaaaatatagaacgtaaagattatttaatgtaaagaaaaattgtataaaattttatatagttattgtagatagtattatttggtattataatttttttttattgtcgtggttaaaattatttggattttttgagagtttgagaataatttattaaattggatttatataagtagaaaaggtaaaggtgttgatcggttattattagtagagatttttaggtaggtggggttaatttaatatttggagaattttatatgtattatggaagtaaaaagaaaaagtaattaatttatatatagaagttagagaaaggggaggggatggggattgttagggagggaaatcgatttagggaaaaatttttggaggttgtaatttagaaaattttgaaggatgtcgtataattgatgatgttatttatttacgaggttgtttagaaatgtttatttttggttagggcggtggtttatgtttgtaatttgagtattttgggaggttgagatgggtagattacgaatttaggagttcgagattagtttggttaatatagtgaaattttgtttttattaaaaatataaaaattagtcgggcgtggtggtaggtgtttgtaattttagttatttgggagggtgagataggagaattatttgaattcgggagttaaagtttgtagtgagtcgagattatgttattgtattttagtttgggtgatagagtgagattatattttaaaaaaaaaaaaaaagaaagaaagaaaaaaagaaaagaaatgtttattttttttgttattggtagatatgtatatattagagaagatttcgatttcgtgttttttttttatttatagaatatttttttaagtttattttgagtggaggttgtattataataaggggattgttttgtttttttttagggtttttaatataaattttttaattagtaattgaggtgttattataggggatttttttaattagttaaaatttgatttggtagggtttggtttgggtgtttttagattgttttgtttcgaggtttttataattgttttataatttagaatagtaattgttaaggttgttttgggaagaggatgattttaaataaagttttgatgttgggggtttttgttttgattatcgtgatgagtttttgtggaggtgaagatattgtgggtgagtgtatgagtgagggatgttttttggagttggaagagaggaaattgaagtaaaagagagaaagcgatttgtagagaaattgtagagattttttaagggtttttttagtattaagagatttaaaaattatggttgttttttttttaggaaattagagttttaatttattttttttgttatttatgttgttggcgtttattaaggatgttattttgtttatattgtatttagtgattatagtttggaggtttttatgttattttattatgattgttttaaaaattagtgaggtttttattaatggataattttttattattaaaaatttgtgaagtattatttttaaatttttttgaataatttttgaagtttttcggatgttttttgtagtagcgtttggggtaaatgattttattaattatatattttatagatattaagaaagatgttttttttttttttttagatttattaatatttttacgtgggaattggtataggtggggagtgggtaaaggagtttagtaggttgaatgtttttaataattattttattatatggtttttatttatttttagttgttttatatgtgttattttataaataattaaataaaattggtatgtagttaagttttgtaaatagtgaaaatatgaatgttaattttatttttatatatttttattataggtatagttttatatttttttttttttgtaaaataaggtatttttttattttaaaattgagaatttatagtagaaaaatttggtaaattaaattattttatttttaaattattaatttaaattatttgttttttaatttatttaatgaagttttataaaaagaaaagtgggttagatatggtggtttatgtttgtaattttagtattttgggaggtcgaggtaggaggattttttgagtttaggagttgagattagtttgggtaatatagtaagattttatttttataaaaaataaaaattagttaggtgtggtggtgtatgtttgtggtgttagttatttagaaggttgtagtgggaggattgtttgagtttaggaggcggaagttgtagtgagttatgatggtattattatattttagttagggtaatagagagaaattttgttttaaaaagaaaaaggaaagaaagagagaaaggaaggaaagaaagaaagaaggaaggaaggaaggaaggaagaaggggaagggaagggaaggaagggaaggaaaggggaggaaagaaggaaggaaaaaagaaaaagaaagaaaaaagaaagaaaaagaaagaaagaaagaaaagagggaaggaaagaaagaaaaaggaaggaaggaagtatagattaattattaattatttggttttttttagttttttttgtttttgttatttatttatttttatttttttttatgtatttttttttttttttttttttttaggatttatttttgattttttgtttttttatatggatagtggggtttgtaaaataaaagttgaaaaattagatagttaaaaggtgaagtgaattggaaggtttaaatttttataattttattaattatggttgtttttattttgattttgttcgacggtggaagttttatttttttttttagagtatttggtttttttgttttaaattttttttttttaattttatattagagtgttttggttaggttcggtttatttattaggtataatatgggtaatgtagagaattttttatattgtaaagttatatgagaatgttttaattttttttaagattagaaaaaaatgaaattttagagtttaagaaaatgttttaatttagtttagattgtattgtttttatattaatttagttataaaatataattttttatatttttatggaggaaggggtttataaaagtaagagtgtttagggtttatatgttagaatgtagttttggttatggttgattttggtttttttatgattttgttagtgtgtttgtttattttttttaaaatttatgtcgtttttaaatatagtaattgtaatttaaaatacgtttgagtatatagtaagttaagttttaaggatttaaagatgaaaagttatgttgttttttttgtagagggtgtttagattagtgacggaaacggtatgggatgtaggaaagtagaaggttattgttgattagggtagtggatttagtagaggttgaaattatataaatgatttggttttagttgggttagtagggtgatattttttagtaaaattcggtatttaagataagttttagatgaaaagaaggattgttttgtgtttgataaggagttaaggtttattgtaaggataaggttttgttggtggtttgttaagataatttagggtagttatattggataaggaagaaggtgagttggaagaggaatagataaatagttagatattgaggtggaggagttggaggttataacgtggttaaaaatatgtcgatgagaggatttagttataaagttgttaatttaagtagaaattttaaggatgaattttaggatttttttaggaagttttaaaagataattttattttagggagaaaaataataaattattggaaagattagggaatatgaaaggataatgtagtttggtttgtttggtagatatttatgaaggatgttggattgtaaggttgttgatagtttttttatagaatatgttatagtatattgtatttgtttttttatttatttgatttttttattttttagtttgttttttaatggtagattatgtttgattggtgttttatatattttttgttatgtttgatatttgtggatgtttagaaagtggggaaggaaggaaagatataacggtaaaaggtttatacgttttgataggaatgtttagttcggtttatttggttggagttatattgtacggttgttattttgttttggtatttttagataagtatattgtttattagaggaaaaagggtttaatttatttgagtttttaagtgaatataagtgttaagttagaatattgtagatatttagtaattttttttagaggaaaaaaaaaggtggggggaaatgatagaaatttaaaaattagtagagtttttattttttattttagaagaaattagttgtttttttttaaggattattattattaataaaatagagattttgaaggaggtattgtttatttattatatattttgtaatgttattattatttttgttatatttttttttatattttataattgttagtagatattattttaaattaataagattttgtatgttttttttttttttaaaaaaagaaagatttttgtgtagagtgttttgttttgagttagttttgagaggaaagaaaatataattagtttgttattaattgatgaaagaattaagtgaaagatgaattttaggaagtagaaggaagtaaatttaatttttgattaagaaagttaaatattataataatttatttatttttttttttgtttaattatattatttaattataagttcgtgatgtgttaggtatttaggaaatagtaaaaattggatatgtgatattttgtttttgtgtagcgtatattatagtgggaaagaaagcgtaattttaatcggataattattaataataagagtggaggaagtaggggttggaaatgtttataggttgtgttaaagatgaagttcgtaatatttgaaagttagttttttttattattttgtgtattaaggttttttttttttttgttttttatttttttgtttgttatttttatttattagt

SEQ ID NO: 884 - DNA, 8946 bp, Artificial Sequence
  chemically treated genomic DNA (Homo sapiens)
gttgatgagtgaagatgataagtaggaaggtggagaataggggaagaaagaattttaatatataaaatgatgaaagaaattgatttttaaatattacgggttttatttttggtatagtttgtggatatttttaatttttgttttttttatttttattgttggtagttgttcggttaaaattgcgtttttttttttattataatgtgcgttatataagggtagaatattatatgtttagtttttattattttttgagtgtttggtatattacggatttatgattaaataatgtaattgaataaaagaaggaatgaatgagttattatggtatttagtttttttagttagagattaggtttatttttttttgttttttaagatttattttttatttaatttttttattagttaataataaattgattgtattttttttttttttaggattggtttagaataggatattttatatagaggtttttttttttttaaaaaaaagaaaagtatgtaggattttattaatttaaaataatgtttgttaataattgtagggtataaggaagagtataataagaatggtaataatattataaaatatataataaataaataatgttttttttaaggtttttgttttgttaatagtaatggtttttagaggagagtaattgattttttttgaaatgaagagtggaagttttattagtttttggatttttgttatttttttttattttttttttttttttgaaggaggttattaaatgtttatagtgttttgatttaatatttatatttatttgaggatttaggtaaattaaatttttttttttttaatgggtagtgtgtttgtttgaggatgttagagtagaatggtagtcgtgtaatgtggttttagttaaatgagtcgaattggatatttttgttaagacgtgtaagttttttatcgttgtatttttttttttttttttattttttgagtatttataagtgttagatatagtaggggatgtgtaaaatattaattaggtatggtttattattaaggaataaattgaagagtggaagagttaggtaggtaagggagtagatataatgtattgtagtatgttttgtgaggaggttattaatagttttatagtttaatattttttataagtatttgttaagtaaattaaattatattatttttttatgttttttggtttttttagtggtttgttgtttttttttttgaaatgaaattattttttaggattttttggagaaattttaaaatttatttttgaggtttttgtttaagttaataattttgtagttaagtttttttatcgatatgtttttgattacgttatgatttttagtttttttattttaatatttggttgtttgtttgttttttttttagtttatttttttttttatttagtatgattgttttggattgttttaataggttattaataaagttttatttttgtaataaattttgattttttattaaatataaagtaatttttttttttatttgggatttgttttgggtgtcgagttttgttggaggatgttattttgttggtttagttggaattaagttatttgtatagttttagtttttgttgagtttattgttttggttagtaatggttttttgtttttttgtattttatatcgttttcgttattagtttgagtattttttgtagggaagatagtatgattttttatttttgaatttttaaaatttagtttattgtgtgtttaaacgtgttttgaattatagttgttatatttgaggacgatatagattttggggaagatggataggtatattagtagaattataagaaggttaggattagttatgattagggttgtattttgatatgtgagttttgagtatttttgtttttgtgggtttttttttttatgaaaatatggaaaattgtattttatgattgaattggtataaagataatataatttaggttgaattaaaatatttttttaggttttgaaattttatttttttttaattttaaaaggagttaaaatatttttatgtggttttatagtatggagggttttttgtattgtttatgttgtgtttaatggatgagtcgagtttgattagggtattttggtgtgaggttgaagaaaggaaatttggaataaagaagttaagtgttttggagaaggaggtgaaatttttatcgtcgaataaaattagaatgggagtagttatggttaataaggttgtggaagtttagattttttagtttattttattttttaattatttgattttttaatttttgttttataaattttattgtttatataaagaagtagggagttagagatggattttgaaagggaagagggagaaaggaatgtatgaagagaggtggaaatagatggatgataaagatagagaagattaagagagattaaatgattaataattaatttgtgtttttttttttttttttttttttttttttttttttttttttttttttttttttttttttttttttttttttttttttttttttttttttttttttttttttttttttttttttttttttttttttttttttttttttttttttttttttttttttttttttttttttttttttttttttttttttttttttttttttttttttttgagatagagtttttttttgttgttttggttggagtgtagtggtgttattatggtttattgtagttttcgttttttggatttaagtagtttttttattgtagttttttgagtagttggtattataggtatgtattattatatttggttaatttttattttttgtagagatgaggttttgttatgttgtttaggttggttttaatttttgggtttaaaggatttttttgtttcggttttttaaagtgttgggattataggtatgagttattatgtttggtttatttttttttttataggattttattagatgagttgaagaataggtaatttgggttgataatttgagaataaaatgatttaatttattaagtttttttattataaatttttaattttaaaataaaaggatattttattttgtaaaagaaaagaaatgtgaagttatatttataatagaaatatgtaaaaataaaattgatatttatgtttttattatttataaagtttagttatatgttaattttatttgattatttgtgaggtgatatatatgaggtagttgagagtaaatgaggattatgtggtaaaatgattgttgaaggtatttagtttgttggatttttttatttattttttatttgtgttagtttttacgtggaaatgttagtaagtttgagagaaagaaaagggtattttttttaatatttatagagtatataattgatggaattatttattttaagcgttattataggagatattcgaaaagttttaaaagttgtttagggaaatttgagaatgatattttataaatttttaataataaaaaattatttattgatggaaattttattaatttttgaggtaattatgatggaatgatatagagatttttaggttatagttattgaatataatataaatagaatagtatttttagtgaacgttaatagtatagataataaaaagagtaggttgggattttggttttttgaaggaggaatagttataatttttaaattttttaatattgaagggatttttaggaaatttttataatttttttgtaaatcgtttttttttttttgttttaatttttttttttttagttttagagaatattttttatttatatatttatttataatgtttttatttttataggggtttattacggtggttagggtaagggtttttagtattagagttttgtttaggattattttttttttaaggtagttttagtagttgttgttttgagttgtagagtaattgtgaggatttcgagataaggtaatttgaagatatttaaattaaattttgttaagttaggttttggttaattagaaaaattttttatgatgatattttagttattagttgaagagtttgtattaagagttttggaaggagatagggtaatttttttgttgtgatgtagtttttatttagagtggatttgaggaaatgttttgtgaatagagggaggatacgaaatcggaattttttttggtgtgtgtatgtttgttagtggtaagaggggtgggtattttttttttttttttttttttttttttttttttttttttgagatgtagttttattttgttatttaggttgaggtgtaatggtatggtttcggtttattgtaaattttgattttcgggtttaagtgatttttttgttttatttttttaagtagttgggattataggtatttgttattacgttcggttaatttttgtatttttagtagagatagagttttattatgttggttaggttggtttcgaatttttgaattcgtgatttgtttattttagttttttaaagtgtttagattataggtatgagttatcgttttggttaggggtgggtatttttgagtagtttcgtggatagatgatattattaattatacggtattttttaggattttttgagttataatttttaggaatttttttttgagtcgatttttttttttggtagtttttatttttttttttttttttggtttttgtatgtgggttagttgttttttttttttgtttttatagtgtatatggaattttttaaatgttaagttgattttatttatttagggatttttgttggtggtagtcgattaatatttttgttttttttatttgtataaatttagtttggtaagttatttttaagtttttaaaagatttaggtggttttggttacggtaataaaaaaaggttataatgttagatggtgttgtttatagtaattgtatgagattttatatagtttttttttatattgagtaatttttacgttttgtgttttggtgttttttgtatatgtttaaaggaaatttagggatattgattatatttaaaatttggttggtttaattattttaagaatttttttttttaattaagaatgttaagttaaaagttgagggtagaataagaattgtattgatttagaaaaatggttttttttttttaaattattagattttttaaaatttgttattttattatattaaaattttaaatatttgtaagggattagggattgagttaaagttagttattagaataaaatttattattttttttagatatatttattttttgtatatgatagaaatcgtaagttaatggaagatttatttagaattattttgtttttgataaatggttttttgagatttttaatattgttttattttttattggtagagattgtaaaaaaaaaaaaaaggtgaaataaaaaaaatgttttgatttttgagagttgtttggttgtaattaataaggttttggggttgttaggagttaggttggtatttttaggtggttttggtttttttattgaagataaaggattttatagaatattagaattagataagtattttgtgagtatagtggattttgtgagtatagtggattgagatagaatattagaatgtttagttattatgtttgaatttagataaaatatgaatattgtttaaattataaaaatgattaggtatgtttttttcgggagtgattattgtttttttattattatatttgtagttttaggatagttttttgtttttttaggtaggatttatgaagttatttaattataatattgttattttaattttttattttttgttagaatttaattaaaagtaaaattttttatttttaaattttttttaaaattatttaaaataagtataaattttataattgatttatggttaattttatgtgttagttagattgtgatttttagttattaaattaaatattaataatttaggtgttgttgtgaagatattttgtagatgttattgaaatttataattagttgattttaagaatttattttagaaaaattgggtgagtttaatttaagttgttgaaaagttttaagagtagagttgaggtttttttgaggaaaaagaaattttattttggatagcgtgttagtttgtgttgagagttttagtttgttttttttgataattattatttagtggatttttgatttgtttagtttatttttatagatgtaaaaattaattcgttgtattatttttttaatatatgtatttttttggttttatttattcggttttaataattttttattgtatgatttttatggtgagttttatttattattgtaatgaataataaagttaatttgtttattgtttggatgtttttgttggtttttggttggaggtattgaggtattttattaggtagttgtgaggaatatatatatattgtatttggaatgaaaaatttttggattttttatatatatttgttatattttaatattatttttattttttaaggaggatattaaattttagagagttgaaggattttttttagggttatatagttggtaagtagtatagatgtgatgttatggggtaagttatgagtttttgtgaggagtgatgggtgagagtttttttttgtgcgaatttagaatttagtgttttaatatgattaggagagatatttgattttataggtggttttattttttttagtttttgttattgtgaatgaagagggtttttgaggttttatttgagatgtgttttttttattatttaatattttttttgttgtgtagtaaataatatgtttttatttttttttttgtatttagatttatttgttttgtatttaatggaaattttttaggattttggtaaatgaataaaatgttttgggatggtagtttagaattttatttattaaaattatagtttaaataatttaattttagttaagaagttagggtgttaaatgtaggattagaattgtattttggatgggaagttgagggtgtagttttagattttatattttgtggggtgaagggaaagtttaaggtaaagttattgaagagattatagatgtatttttttttttttttttttttttttttgagatagagttttgttttgtcgtttaggttggagggtagtggcgcgatttcggtttattgtaagtagttgggattataagtatttgttattacgtttggttaattttttgtatttttagtagagatagggttttatcgtgttagttaggatggtttcgattttttgattatatgattcgttcgtttcggttttttaaagtgttggaattataggcgtgaggttacgtttggtttaatagatgatatttttatttttaatttagttttgtttttttttttttttttgttttattcggttataatatagtgaatattgttttagttttttttgtttttaggttataattttaatgtaaggtaaagtaataagtaaatgaaatttagaagaatagtatgttattttaataaaagttaatttgttatttttgtttagtagaaagagaaaaggttttttttataaattaatagtgggaataaaatttggagtttaaaatagtattttgtttaataatttttttagaaagtatttattgatatgttattgattttataattaaaatagtaatgggatgtgttattataatttatattattaagagttttttaagaaattaggtagaatttatgttagttttaataaatagttataacgttttttaagattttgtatatttttaaattattttagtttgattttatgtattggtaaagttttattttgaaggttaagatttttgttttgtagtggttaaaggtgttttataataataatagagtttagagtagtatagtgaaaagaatataggttttgtaataagataaatatgtattttatgttgtttttgattttattagttgtagtattttgagtaagttatttaaaatatttgagttttaaggttattttttataaaatagaaggaaaattattaggtgatagttaatatggtaaaatgaaatgatagataagtgtaattataaagttaaatataatttggtgtttgatatatagtatttatttttaagtggtagttgttatataaagataaatattaataatgataatgataataatattatgttttgggttgggaaagtttgttaatttttttttatttatttaatttttttttcgtagtattttaggtatgtgggagtttgtgagttatagaagtattaagatattgttgaaaaatataatttttttgaaggttgttttatttgttagattttttatgtaataaagtattttaaaatttaatgattttaaataatggtttagtatttttttatgattttgtaagatagtaaattgtgtttaatttatttgagtggtttttatgtattgggtaggtttagttttttttaggtgggtttttttatatttttgtagtattaataggtttggtagatatagggggtttgtttttatttatgtggatttattatttagtaggggggttgaggtttattataggtgttggaaagtttttttgtgtaagatagaaatagtaggtgttttgagttgaatttaaaatttacgatattatttttattatattttattatttaaagtaagttatagtattagtttatattaaaaggtgggttaatagattgtattttttgatagaatgggttataaagaatttgtagttatttttgtaatttattataaatattttttggtttttggtaatatgtaaatgaatttggtgtgcgagtgttggagagtttttatatttgaaataaattttatatatttatttattagttaagattttgtttttattaatttgtattaaaaat

SEQ ID NO: 885 - DNA, 6621 bp, Artificial Sequence
  chemically treated genomic DNA (Homo sapiens)
tgtttttgtgatttgtgttttttttacgtgtattttttaattttggtaaaataaatttttaattgattgagatttattttagttattttttgatttataataggatttttttttttttaaagtttgaataggatttaattgtgtatatatattatatgttttttatttatttatttgttgaatgatataggttgattttatattttgattattgtgaataatgttgtaaggaatataggagtataggtatatttttaatatattaattttaaattttttgtttatattttgtaaatggggttattatattatatgatagttttgtttttaattttttgaggaatttttatattgttttttataatggttgtattaatttatatttttattaatagcgtacgaatgtttttttttgtttatatttttaatatttgttattttttgtttttttgataatagttattttgatagatgtgaggtgatatgttattgtggttaaaatggaatattttaagtttttttatttgagggtgtaagagtattttttttagaatattattgttaatgttgttgttttgtatgaattatggttttgagttgagtttttggatatacgagtttttgagtatttggatatgggtttaagtatttaagaattatatatatttttatgtggttgaatattagggtttttttttattggtaagaatttatagaaaaaggagatattataaagattttttagagaaatatttaagttttttttgggaatgaaggagtatggtgattattaatttagaggttgggggaagagttgtttttggaaatattttaggtattattacggaattagaagtagagataagtagaggtgtgttggaaagagtgatatgtgtaggttagtttttggtagtttaattattagtggtttaattgaggcgatgtatggatgaggagattgatagaaggaaggaatttgaaaatatagattaggaaataaagttttattgtatagtatatttattgtaggtagtttggtttttgttttagttttttatttttaagggttatttttatagagtatgaggagttatgggattggtgaggtttgggtttttgtgttaagattatttatattttttatatttttttaaatgttttaaatgttttgtattatttgattttttatttttttgttaaagttttttttatatttttatttttttattttttattattttttaatttttattcgatttttattttggagttttattatggttatttgtttgtgggaagtattgtttgaatatagtttttgaatgttattgatttggtgttttttttagattttttagattgagattttaaagagataattttgtgttaagagaaaggatttagtttatatgtgttacgaaaaattgttatatatagttggtaatttagaagttgatataaaagaaatatgtaagtggttttataaagattttgaaaaatttagggataattgtttgataaattttaattaaaagaaaataatattttgggagtagtatttttagttatattattattggtattaaggaggttatagaattttttagaatatatagtgatttttgatttttgaagtaaatgtagggtaaggttttggatggtttttttggtgataggatggtttttatgtttatatttattttattgattaagtatagattttaagagatgttgattagagaagatgattttttttttgatttttataaagaaggagtttacgatttttttttttagtttgaaggaagagaggatgttttttaaagatagtttttttattgtaattttgattttttttattaatggtagtgattttttagtttatttatttatatggagtaaatgttttaattgttttgtttttatagaggttgggtaggcgatttaggtgagatattcggaataaggatgtttgatttagttttttttttcgttggtttttttttgtttgaatgttttgaataatgtagtagggatagggttagggtagataattgtagagaaggttgggttaggtagatatagttggtagaagtttaaagtaaaatttttttagtgaggttttagttaattagaaaaaggttttgaagtgataattgttgttagttgaaaagtttgtgtaaagaggtttgtgagattggggaatttttaggtttgatgtagtttttgttttagaataaatttgcgggaagttttttttttaaataggaaggataggatgtattagaggtttttattttgagggatattgatgtgggggttgaggacggatattgagggtatttttatgtttttttgtttattattttttgtgttaattttattttaggtgtgcgtatggttttttttttatgcgtttattatagtagtggagattttttttagattgggtttattttgattttgagtatattattgttgttggatgtttagtggtaatttttttagttttaggtgttttagaattatgtattgaataatatagaatattggagtggtttaacgtttttatgtgttattattgtaaattttttgttgttgttttttgtttgtttttttttatttggtaaatttatattttgattttagattgtattttttattttaaaagtagaatttaaaatttcgggaagagaaagagagaaagggagagaagaagagaggtggagatatttattgttttggttgaggttagaagtaatgtttgttagtttgtaggggttagttttatagggtttgtgggtttttttttttgtgtgcggagacgagggatcgtagaaataaagatataagataaagagatagaagaaaagatagttgggttcgggggattattattattaagaggcggagattgttagtggtttcgaatgttaggttgcgttattatatattggatataagataagggggtagggtaaggagtgtgagttatttttaatgataggtaaggttacgtgggttatgtgtttattggatagggggtttttttttgtttagtagtcgaggcggagagagagaggagatagtttacgttattatttttgtattttagagatttttagtatttttattaattttgttattgttatttagaaggtagagttaggtgtatagggtggaatatgaaagcggattaggaacgtgatcgttgaagtatagtattatagggagattgttaggttttcggataacggcgggcgggtttgattgatgttaggttttttataagaggtggtggagtagaggtttttttaatttttttcggggaaagggagattttttttttcggtttgttaagtaacgggtgttttttttaggtattgatgttatcgttagattaaggttcgttaggtaacgggcgtttttttaggtgttggcgttatcgttagattaagtagttttttagtggttttgtttgggtattatagaaggtttatatttgttttttggttattttttattatatttttttagtttttatttttgtatggtttggttttttttagattatgattgtagagcgaagattattataatattggaatgaagagtaattgttataaattaatgattaatgatatttatatataattatatatatgatttatatttagtataattatttttattttatatattttttttattatattggaatagttcgtgttttcggtttgttgtttcggtatttgggtggtttgttgtttatattaggtattgttttaattgttttataattattagtattgtttttagttattggtaagaggaatttgatttcgtttatttataaaaatatattgatgtggatatgtttataaggaattgttaaataaatttttaaaaatggaaaaaaaattatattgatatttttgttatttgggatttgatatttagggttggtatagtataatttgtgattaaatattttttttattattaatattatttaggatttaggaaatgtttttttatagtttttgttttttttttttaaaattaaatatgattgtgtttgaatattgtaaaggtttgtgtattgtgtttttgttgatattagatgtatttattttatggtttagggacgatttaaatagttgaagaatttaaaatagaaatgttaatttaataaattttttaaatatttttattcgaagagtataaatataatatatttttgtataatgaagaattatttattagtagaggtgggtattaattttttttggtttgtttttttgttttatatattaatttgatagttatatataatagttgaggagttttttgtaatattaaataagttatattaattttaaatttgtatatgtgaagatttagttgtaaaatgtatgaaatatgatttatattttataaagagaattttggggtaaaaataaatttagttatttgttgatttttttaaagtatattagtggtggaattgtaatttattattatttttttttaagaattttgttttttttattaaaatttaaggttttttagggtgtgtttaagataatagtagtaaaaatgtttatgatagtaatttttttttttttgaaatatgatttttatttaatttgttttattgaaagaattttaagtataaaaataattagtttttaattaatattataaagatgtttattgttgaatcgtatttttttttggttttttaaaattttttaggtatttaatttttagtttttttataattgagaggaagtttttattttaaatgtttatttagtgtaatttgaagacgttatagtgttagggattgaattgagaatttttataaaaaaaaatgtttgtttagagatagattaggttttttagttttagtgttgattggtttttttttaaaggattatttaattttgttacgtagggaaatatttataggtttttattttttttgttaggtatattagatttattaggtttaagttgtgttgattattattattttttttttcgttttaattatgttttggaagaaggttttgcggatttttggaggttttcgggtagtaattgtgattttgatgttggcgatgttgagtatttcggtggttgagggtagagattttttcggtaagtgtagggttattgttttttagagtcgttattttgggaataggttttttttgggttggggtagggggatggtgatttttatgatttcggatataattttttattaatattttttttttttggggaaagagaacgatgttgtatttttatttattttttagtgatgaggtgagtatagtcggatttttattttataggtttaagtttggaagagaaggagagaggagaggaaagaggagataaagtgtatatttattattagtgataggataaagtgagtatggggttatttttgaagatatgaatttttttagagatatagtaggatttgttatttaggcgtgttttaagattttgtttggattaaatattatgggattttgtattgggaaatgtaaggtagtaatggtgtttgtagttttcgtatttgaggaaaagttgtttgtatttttgattgattggagcgtttgtggaggtaaaattttggtattgaaggaagttgattggatgattatagatagggagtttttaggttttattgatttatgggtaaatggtgatttgagtgggatttagagattcgagttggtggattgaatttagtagaaaggaggatgtaaagaagggaaataatatatattgtgaaattatttattttagatatagtataatattttatataaatttttttttattttttttaatattttgtgtgtagatattatgatttttttttatataattatatttgtgatatggatattttgttatatatttgttttagttggtgattgttatagtttaattggaatttagtttattaaatttaaaagtttgtgttttttttatgaataaatgtttttttttaggattcggaggtgtaggttttttttaatataaaagtgagtgaattttatatggtattcggaagggtaaatttaggtatgggaagggaggtattttatcgagggattaagagaatacgtatattagaacgaggataggtttaatttttggattcgttttattatttttttgaatttttaggtttatgtggataattttatttttgaggtttttaggagtttaatggaaaatgggattttatgcgagagcgttttgattttttttaagtgtagaggtttatgtaaaattagttcgattgttttttttttcggtttataggtttcggtagggatagggtttttcgtttttttttgtttgtaggaaggcggatttcggaagtttttagagagggcgggtagggttgggtagggttgggtagagtcgtcgggcggattataagtttggagcgttaggtacgggcgggcgggaattggaggtcgcgcgggcggttttatagtttcgggtcgggttagggcggcggttgcgggggcggtcgggttggggtcgggtcggggtttgattgatcggtcggtgatttttcgtaga

SEQ ID NO: 886 - DNA, 6621 bp, Artificial Sequence
  chemically treated genomic DNA (Homo sapiens)
tttgcggggaattatcggtcggttagttaggtttcggttcggttttagttcggtcgttttcgtagtcgtcgttttgattcggttcggagttgtggaatcgttcgcgcgatttttagttttcgttcgttcgtgtttggcgttttagatttgtgattcgttcggcggttttgtttagttttgtttagttttgttcgttttttttgggggttttcggaattcgtttttttgtaggtaggaaagggcggaaagttttgtttttgtcggagtttgtgaatcgagggaagaggtagtcgggttgattttatatagatttttgtatttagagggaattagggcgttttcgtatgaaattttattttttattgagtttttggaaattttagagataaaattatttatataaatttgggagtttaagggaatgatgagacgggtttagaaattaagtttgttttcgttttgatatgcgtatttttttggtttttcggtaaaatatttttttttttatgtttggatttattttttcgaatgttatgtgaggtttatttatttttatgttagaaaggatttatattttcgagttttagaaagaaatatttatttatggaaagagtataagtttttgaatttgataaattagattttaattaagttgtggtagttattagttagggtaggtatgtaatagaatatttatattataagtataattgtgtaaaagaaaattatgatatttatatataggatgttagaaggagtgagagagaatttatgtaaagtattgtgttgtgtttgaaatgagtggttttataatatatgttattttttttttttatatttttttttttgttaaatttagtttattaattcgggtttttgaattttatttaagttattatttgtttataaattagtgaaatttgaagattttttgtttgtggttatttagttagttttttttagtattaagattttgtttttataaacgttttagttagttaggaatatagataatttttttttaaatacggagattatagatattattgttgttttatattttttaatgtaggattttataatatttagtttaggtaaagttttggggtacgtttaaatgataaattttgttgtgtttttggagaaatttatatttttaaaaataattttatgtttattttgttttgttattggtagtaaatgtatattttgtttttttttttttttttttttttttttttttttaggtttaagtttgtaggatggggattcgattgtgtttattttattattaaaagataaatgggaatgtaatatcgttttttttttttaaagagaggaaatgttgatgaaagattgtgttcgagattatggagattattatttttttattttagtttaaggagagtttgtttttagagtggcggttttggagagtagtggttttgtatttatcgggagagtttttgtttttagttatcggggtgtttagtatcgttagtattaaggttatagttgttattcgaaggtttttagggattcgtaaagtttttttttaagatataattgagacgaagggaaaagtagtggtagttaatatagtttggatttgatggatttgatgtatttggtagaaagaataaaaatttgtggatgtttttttgcgtggtaggattggatggttttttggaaaggaattaattagtattggagttgaaggatttaatttgtttttaggtagatatttttttttgtgaaggtttttaatttagtttttggtattgtgacgtttttaaattgtattggatgaatatttgaggtgaaaatttttttttaattatagaagagttgaagattgaatgtttaagggattttaagaagttaaagaaaaatgcgatttaatagtaaatatttttgtaatattgattaaaaattggttgtttttatatttgggatttttttagtagggtaaattaagtggggattatattttaggggagagaaaattgttgttatagatatttttattgttgttgttttagatatattttgaggagttttaagttttggtgagaagagtaaagtttttagaaggaaataatggtgagttgtagttttattattaatgtgttttaggagagttaataaataattgaatttatttttgttttaggattttttttgtaaaatatgggttatgttttatgtattttatagttagatttttatatatataaatttaagattaatatgatttgtttaatattataaaaggttttttaattgttatgtgtaattattagattaatatgtggaataagaaaataagttaaaaaaaattgatatttatttttgttggtaaatgattttttattatgtaagaatatattgtatttatgtttttcgagtaaaagtatttgaaaagtttattaagttgatatttttgttttaagttttttagttgtttaaatcgtttttgaattatgaaatgggtgtatttgatattagtaaaggtatagtatataaatttttatagtatttagatatagttatgtttagttttgaagagagagagtaaaagttgtagagaagtattttttaggttttgaatagtattaatgatggagaaaatgtttagttatagattgtattgtgttagttttaaatattaaattttaaatggtagaggtattaatgtggttttttttttatttttaaaaatttatttaatagttttttatggatatatttatattaatgtgtttttataaataaacgaaattaggttttttttgttagtgattaggggtagtattaatggttataaagtaattagaataatgtttggtgtgggtagtaagttatttaggtgtcgaggtaatagatcgagggtacgagttgttttagtataataaagaaaatatataaaataagaatagttatattagatatagattatatatatgattatatatgaatattattaattattagtttgtagtaattattttttattttaatattataataattttcgttttataattataatttaggaaaaattaggttatatagagataggagttgaagggatatggtgagaagtgattagaagataagtgtgagttttttgtgatgtttagatagggttattagagggttatttggtttagcggtaacgttagtatttgggaagacgttcgttgtttagcggattttggtttagcggtagtattagtatttagaaaaagtattcgttatttagtagatcgggaaagggagttttttttttttcggggggagttagagaagtttttgttttattattttttgtggagggtttgatattagttaggttcgttcgtcgttattcggaggtttaatagtttttttgtgatgttatgttttagcggttacgtttttggttcgtttttatgttttattttgtatatttggttttgttttttagatagtagtagtagaattagtgaaagtattaaaagtttttgaaatgtagaaataataacgtaagttgtttttttttttttttcgtttcggttgttagatagggaagggttttttgtttagtggatatatgatttacgtgattttatttattattggagatggtttatattttttattttgtttttttgttttgtatttaatatataatagcgtagtttggtattcggggttattaatagttttcgttttttggtggtagtggtttttcgggtttagttgtttttttttttatttttttgttttgtgtttttatttttacgatttttcgttttcgtatatagggagaaagatttatagattttgtagggttggtttttatagattggtaaatattatttttgattttaattaagataataaatatttttattttttttttttttttttttttttttttttttttttcgaaattttaggttttgtttttaaagtagagaatataatttaaaattagaatataagtttattaggtaaaaagaagtaggtaagaggtaatagtaagaggtttgtaatagtggtatatgaaagcgttgagttattttaatattttgtattatttaatgtataattttagagtatttgagattgggaaagttgttattgggtatttagtagtagtggtgtatttagggttagggtaaatttagtttaaggagggtttttattgttgtgatgaacgtataaaggaggaattatacgtatatttggaatggagttggtataaggaataataggtagagagatatgaaggtgtttttaatgttcgtttttagtttttatattagtgttttttaggatagaggtttttaatgtattttattttttttgtttaagggaaaaatttttcgtaggtttattttgaggtaaaggttgtattagatttggggattttttagttttataggtttttttgtatagattttttagttagtaataattgttattttagagtttttttttgattggttaaaattttattggaaaggttttgttttgggtttttgttagttgtgtttgtttgatttagttttttttatagttatttattttggttttatttttgttgtattatttagggtatttaggtagaagaaggttagcgaagaaagaaattaggttaagtatttttatttcgagtgttttatttgaatcgtttgtttagtttttgtggaggtagagtaattagagtatttattttatatgggtaaatgggttaaaaagttattgttattagtagggagggttagggttatagtagggagattgtttttaggggatattttttttttttttaggttggaagaaaaagtcgtggattttttttttgtgaaaattaagggagaaattattttttttggttaatattttttggaatttgtgtttggttaatggagtgaatgtgaatataggagttattttgttattagaaggattatttaagattttattttgtatttattttaggaattaagaattattgtatattttgaaaggttttgtggtttttttaatgttaatggtaatataattagaaatgttgtttttagaatattgtttttttttaattaaaatttattaagtaattatttttaaattttttaaaatttttgtgaagttatttatatattttttttatattaatttttaggttattagttatatataataatttttcgtggtatatataaattaggtttttttttttggtataaagttatttttttaaaattttagtttagagaatttgaagaaagtattaaattagtagtatttaggggttgtgtttagatagtgttttttataagtaagtggttatggtgaaattttagggtggaagtcgggtaagaattggaggatgatggagagtgaaggggtaggagtatgggaaaagttttagtaggaagatagaaaattaggtgatataggatatttgggatatttgaggggatgtgaggaatgtgggtgattttggtatagaagtttagattttattagttttatggttttttatgttttatgaaaatagtttttgaagatagaagattggaataaaaattaaattgtttgtagtggatatgttgtataatgaagttttgttttttgatttatatttttaggttttttttttttgttaatttttttatttatgtatcgttttagttggattattggtgattaaattattaggagttaatttatatatgttattttttttaatatatttttgtttgtttttatttttggtttcgtagtgatgtttgggatatttttagagatagttttttttttagtttttagattagtagttattatgtttttttatttttagaaaaaatttaaatatttttttgggagatttttataatgttttttttttttgtaagtttttattagtaaagagaggttttaatgtttagttatataaaagtatatatagtttttgagtatttaaatttatatttaagtatttaaaaattcgtatgtttaagaatttagtttaaggttatggtttatgtaaaatagtaatattagtagtaatattttggggagaatatttttatatttttaaataggaaaatttaagatattttattttaattataatgatatattattttatatttgttagaatggttattattaaaaagataaaagataataagtgttaaggatgtagataaaaggaaatattcgtacgttgttggtgggaatgtaaattagtataattattatggaaaataatatggaaattttttaaaaagttaaaaatagaattattatatgatgtagtaattttatttgtaggatgtagataaagaatttaaaattagtatgttgaaaatatatttatatttttatgttttttgtagtattatttataatagttaaggtatagaattaatttgtgttatttagtagatgaatagataaagaatatgtggtatgtatatataattaaattttatttagattttaaaaagaaggaaattttgttgtaagttagaaagtgattgaggtaggttttagttaattaaaggtttattttgttaaggttgaggaatatacgtgggaaaaatataaattataggagta

SEQ ID NO: 887 - DNA, 7522 bp, Artificial Sequence
  chemically treated genomic DNA (Homo sapiens)
ttgaagagtttattaaattttgtataagagaaaagttttatttggaatattatttaggtttagagaatataaatattttatttttagtaagacgtttttggtttttttttttttttttttttttttgaatttattttagatgagttatggttttaaagtgttagtagaacgtaagaaggaaggagaattatatttatttttgtttttaataatttatatagggatagaaagagatttatattaaattaagttgggatttttaattattatatagtattaaataatttaattgttgaattaagatatatttgtgtaatttaagggaattgtagaatagtatattaattagaattaagaaaataatttatgaagtatgttataatttttatttaagcgtaggggaatagtatttttaatgaaattttttaaagaggtaagagtaggtataatgagtttttgtttgattaaagattttatttagtgtttatttaatttagtaattatatttgtatgttttagatgtttttaaaaaaataaataaaagaaagtattttaaataaagaataggattaaatagtatttaaataattgagtaaattaaaaaattatatgaattagattgattgaaattgatatttttttaattttttttttttaatatatagatatatatatatatatatatatatatatatacgtatgtatataaatatatttgaattttataaaattattttgattttgatgagattttatagtttatttatgtaatagaatataatgtttaaatgaagtttttggtttttgttttatatggatgattgagtaaaattattttttatttttggaagaatagttaagaaaggatttataggtgaggatatgcgtttttttagaagatgagaataaagatgagaagatgagagtaatagaatgttttatattttaatgttttgtgttgatttcggagtggttaatatgatagagatggaaggaattttgaaaataaattgttagaatttttaaggaataggagatgttgagtgagtgaattaagttatggattggttgtatgggggtagttattagagataattatttttagatttttttggtgattggttaagttaatttttttttttagagttttttaattataagatttagtttgtgttatttagaatagataagaatatagagaattatagaataatttgattataggtttttaagttatagtaatgaaatttgtagttggtcggtaggaaaatattttgagatgtggatttaaagtttttaagtgtgtatacgtatatatatatatttttatttgtatgcgttttttaatttataaagattatttaagtaaagaggggtaattttatattttaggaggtttgtataaagataattttggtttttaaagtatcgggttttaggtagaggtgaagagagaatgaattaaatttaaattgttatttttttaggttaaagatgagtttagttattgtggagttttttattaatataggatatgttaggaaggtttattaatttattgttttagtatatttgttaacgttttagtgtatttgttgatattaatagtttatagtttttattttgatagggatttattttagtagattagtttttgtgattttttaggatgcgaaaaagtaatataagaaaagttttttatgtagtgaattgagaaggaaatatttagattaatatttttttagtatttttggtaggaagtttttagtaggagaaaaatattatgaagatttttagtgtagaaggaaaagggggtagggggtggtggaagggaagttaaaagaaggggttggaggtttttagaatttaaattatataaataaatgaagtattgaggttttagatttgatttgggtttagtgtgaaagttttaatttatttttttagaagaatatgttttttggttttagatttggtattgtggggagaattagagtgatttatggtggatatatatataaatatagatatatatatttgtatttagtaatttttgtaaaatttttatttgtttttttgattttgtttgtatttttgggaatagatgtaagaatattatattttttaggtttgttttgttttaggtttttgaacgtggaatatatttttttagggaaatttagtattatgagatttgggaggtggaagttaggttatagttattttagggataggttttatagatatgagttttggtagtagttttgtgttttaaagatatttatttttaggggttttagaggatttgtaatattagtagaggttttttgtgggtttttgattttttaaaattagggttttgtagtgatttttgtttttttagattttttaatagttttaagggttaattttttgtaatatatttagttttgtttagattgattatagggatttttattttttgattgaatttttatggttatagtggttcgttattatttgatattattaagaagtttttatttaggtgtttttggaaatttttttaaatatataggaaattagagtttgaaagaaaacggagaattatgagtattgtttaaataggaattttttttttattatagagaaagggaattgaaagttattttttaagttttttaaatttagtaattttataagaagaattaattagtgttttaggattaaatagtgttataagttgttgagtaataatttggattgaagatgttattataatatatgaaatgtttttgaatttattatgttttttttaagtattatttaagaataaggtattatggtagttagtaaagggtagatatagaaaattatatatggttttgtttttaaaagaggagatgataagtttaaattataggattagatttttagtatagattgatattataggtttttatttggtttatttttttgattttttattttttaggaaaggtatttttgaaaaattgtaggagagattatgttgtaggtttttttttagcgatttaggagttaatgttatagtgtgtttaaagttttttgatgcgattagataattagtaatgtatggaatatttgtgtttataatttgtgagaacggttgtatggtaggataagattttagtataatagtatggaaaatttattttaagtagatatgttatgattgatgttgaataatggatttattagttaggtacggtggtttatgtttgtaattttagtattttgggaggtagaagtaggtagattacgaggttaggagattaaaattattttggttaatatggtgtaatttcgtttttattgaaaatataaaaaaaaaaaaaaaaaaattggtcgggtatggtggcgggtgtttgtagttttagttattcgggaggttgaggtaggagaatggcgtgaatttaggaggtagagtttttagtgagtcgagatcgtgttattgtattttagtttgggcgatagagtaagattttcgtttcgaaaataaaataataataaaaaaaataatggatttattattcgatgggtttttttattgttaggttattttttatggaagtatttgtattttagttttttttgtggaaagaatttaatatttttttttttataatattgtatttttagaaataagagagtcgaagttttttaatttttaggagtgtttatgttgaatattaaaatatattttttagagtagatttttaataattatatgataagagaaaaatttttataattttatgatatgagggaaggaatattaaagtcgttttgtgggttattatttttaacgtttttaatagaataggttttgttagttgggtgcggtggtttatgtttgtaattttagtattttgagaggttaaggcgggtaaattacgaggttaggagtttgagattagtttgattaatatggtgaaatttcgtttttattaaaaatataaaaattagtcgggtatggtggtgggcgtttgtaattttagttatttaggaggttgaggtaggagaatcgtttgaattcgggaggcggagattataatgagttgagattacgttattaattttagtttgggcgatagagtaagattttgtttaaaaaaaaaaaaaaaaaaaaaaaaaaaaaaaaaaaaaaaaaaataggttttgtttattatatttttttatatttattgatttgaatttttaaatgaggtgtgtttattagttaattttaattttttgttatatataagatggtagagatgagaagaaggtagtttttttatagtttattatttttattaattattatttgtgttttaagatatagttttttatttttttttagtgttgagagtgttgaattttagagtttttttttttattttttttaaatgagatataatgttagttattttaagtttttggtttgagttgtttattttgaagtttaggattttaagaagtatgaaagagtttttttagtgaagttatgtttttagtattgttaaaatttagataatttttatggtttgataatttattttttatttgggtaatttattgttttttacgtaaattttttagttgttatggtatagatatatgatttgtatttagtttttattttaggtgtttttattgattttatttttattaatgtgttttaggtatatttttgtttagaatttagattggggttaaagagtttgttcgttattgattaatagttttaaatatttgatttgttgtcgttgttgttttgtttgtttaagaattttatttttttatttaatgaacggagtattttgtgttttggattttttgtaagaattttttttttagtaatagatgcgttattttaaaatatttttttgattggttaaagagtaattgatttgtattttaatggttagattttattatattttatattttttttttttttatttttgtttgttttgttttattttcgagttttattgatttttaatagagcgtttaagaagaaaatggttataagtggagtttttgtgttaggattttttattatagttgtgttgatgagcgtttaggaattatgggttattaaaggtaggtgttgagggaatgaaatttgggacgatagattacgaagtattggagaaaagatttatggatatttggaagataatgtgtggagtgaaagaatagtgtgataggtattatgtggtttcgatagaaagtataataaattgtggtttggtggagttttttttttattataaattgaagtaagttaaatttggtttagaggattaaaattgagttgtgtattgatgaatagtaaggttttgttataagttaaattgggggtgggggtgggggtgggggaggaagaatattttttggtaagtattaataagttatatttttgggttttaattattttttttggaaaattagtaaaattaaaaattaaaaattatatatagttttgttagaattaaatgaaaaaaaaagttattagttttgtttttatttgaatatatgatatagtagttattttttggagtgtaaattttgtcggtatatattgagtatatatattgtgttgaagattattagaaggaaaagttattaaaaagtaataatttattttaggaaaaggggagggaaggtatgttgatatgagttgttttatgggatagtgatagttattttttgtttttttatttttatggtatagtagattttatattatgttaatttagtaatatttttaagagagtagaaaaatgagtaaggaaatggggaatttgatattatttttttttatttttagagtaatattggtgttgttgtaaagatgtattgtagaaaagtattttttatttagtatgatttttatagaaggtgttaggtagatttgaaataagtaaagtaataatttagtttttatatttatagtggtaattgtagatttttattgttttaaaagagttatatatagggatatttatttagaaagatagaggttttttttttggtttgtgaagaggtagttagtatatttgtgtgtgtttgtatagatgtaaacggtaaataaatttttaggtttattaatatatagttaaatattaaagttttttattttggttgggtacggtggtttacgtttgtaattttagtattttgggaggtcgaggtaggcggattacgaggttaagagatcgagatcgttttgggtaatatggtgaaatttcgtttttattaaaaatataaaaaattagttgggtatggtggtatacgtttgtagttttagttattcgggaggttgaggtaggaggattgtttgagtttaggaggcggaggttgtagtgagttgagatggtgttattgtattttagtttggcgatagagtaagatttcgttttaaataattaaattaaaataaaataaaatattttattttatttttgaagattaaggaaaaaaaaattttttatttatcgatatattttatagaggtagtatattttttaagtgtagttttttttttttatgtttattatttttttggtgttggttatttttaatgttaattataatagaatattttttataataatagttttaatttaaggagtattaagataaaaggtggaattgttaaggttaatttagacgagaatttttttatagaggtaattatcgtgtgggtttggatgttgggaagtagggggattatgacgttataaggttttagttttaatttttggagtattttagtttttaggtatattttttatagatttggtttttaaataaaaagaagtttttgattttaaaatgtaaatagtgtttgttatagttttgttgatatattaagaaattatttattttattttatttaattttaaaaataaatttttgataggattaaaattatagtagggttatataataggaaaattatatataaataggtagaataatttgtttaggattattaggtaagttgttgaataagaatttaagatgtttttgattttagagtttaaaatttaattttttaaatagcgtttttttttttttagagtataatgttttgagaaagagattttttggaattttggtttaagtgtatttaatgttcgggtaaagaaagtgagagaatatttttttttaggggttgttgttggatttttaaaaagaaaataattttttagttagtaatatggagttaaataatagttttataagattttgggttttttagtttttattttttttaatttattttttttataattagttttttttgtttttttttttttagttttgtttagtagtatgttttttatttagattttgttttgttatttatttttattcgttattatttttttattttttttggtttaatttttttttattattttttgtttatatgtatgtaggttatttattttttttttttgattttttttatttaattttttttttttatttttcgttttttaga

SEQ ID NO: 888 - DNA, 7522 bp, Artificial Sequence
  chemically treated genomic DNA (Homo sapiens)
tttgaaaggcgagaagtggagaaagagagttgggtggggggaattaagagagggaaatgaataatttatatatatgtaggtaggaagtggtggagagagattgggttaagaggaatgaaagaatgatggcgagtagggatgagtgataagataaggtttgggtgaagggtatgttgttgaataaagttgggaggggaaaaataagaaggattggttataaagagggtggattgaaggagatgagggttaaagaatttagagttttgtgaagttgttgtttggttttatgttattagttgagaaattattttttttttagaaatttagtagtagtttttaaagagaaatgtttttttattttttttattcgggtattaaatatatttaggttagaattttagaggattttttttttagaatattgtattttaagaagaaagaaacgttgtttgaaaggttgggttttaaattttgggattaaaaatattttgaatttttatttagtaatttatttagtgattttgagtagattattttatttatttatgtatagtttttttattatgtagttttgttgtggttttgattttgttaggggtttgtttttaagattaaatgagataaggtgagtaattttttaatatattaataagattgtaataagtattgtttatattttagagttagaagtttttttttatttaagggttaaatttatggaaaatatatttggggattgaaatattttaaaaattaagattgagattttgtagcgttatagtttttttgttttttagtatttaaatttatacggtggttatttttatgagaaggttttcgtttggattgattttggtaattttattttttattttaatgttttttaaattgggattgttattatggaagatgttttgttatgattgatattgagaataattaatattaagggaataatgaatatgaaaagagaaagttatatttggagagtatgttgtttttgtggagtgtatcgatgagtgggagatttttttttttttagtttttaaagataaggtgagatattttgttttgttttggtttggttgtttgagacggagttttgttttatcgttaggttggagtgtagtggtattattttagtttattgtaattttcgttttttgggtttaagtaatttttttgttttagtttttcgagtagttgggattataggcgtgtgttattatatttagttaattttttgtatttttagtagagacggggttttattatgttgtttaggacggtttcgattttttgatttcgtgattcgtttgtttcggttttttaaagtgttgggattataggcgtgagttatcgtgtttagttaagatgagagattttaatgtttgattgtgtattgataaatttaggaatttatttatcgtttgtatttatgtaaatatatataaatatattagttgtttttttataaattaagggaagagtttttgtttttttaggtaagtatttttatgtatggtttttttggggtaatagaaatttataattgttattatgggtatgggagttgggttattattttgtttattttaagtttatttgatattttttgtgggggttatgttgggtgaagaatatttttttatagtatatttttataatagtattaatgttgttttggagatgagagagaataatattagattttttatttttttatttatttttttatttttttggaaatattattaagttaatatgatataagatttgttgtattatggagatgggaaggtagggaatggttattattgttttatgaggtaatttatattagtatgtttttttttttttttttttggggtaaattgttgttttttgatgatttttttttttagtaatttttaatataatatatgtgtttaatatatatcgataggatttatattttaaaaaataattattgtattatgtatttagataagaatagggttaataatttttttttttatttaattttagtaaaattatgtgtggtttttagtttttaattttattaattttttagaaagaataattaaagtttagaaatataatttgttaatgtttgttagaaaatatttttttttttttatttttatttttatttttagtttggtttgtagtaggattttgttatttattaatatataatttagttttgattttttaaattaaatttgatttattttagtttgtggtgagggaagaattttattaaattataatttgttatattttttgtcgagattatataatatttgttatattatttttttattttatatattattttttaaatgtttataggttttttttttaatgtttcgtagtttatcgttttagattttatttttttagtatttatttttgatagtttatgatttttgagcgtttattagtatagttatgatgaaaaattttagtatagggattttatttatggttattttttttttgggcgttttgttgggagttagtagagttcgggagtgaggtagaatagataagaataaaagaaaagagaatgtggggtgtaatagagtttgattattaaaatgtaaattaattattttttggttaattagaaaaatattttgagatgacgtatttgttgttaggggaagggtttttgtaaagggtttaggatataagatatttcgtttattggataaagaagtaaagtttttaaataaataggataataacgataataaattaagtatttaagattgttggttaatgacggatagattttttaattttaatttgagttttagatagggatatatttgaagtatattagtgagaatagaattaatggaaatatttaaagtgagagttaaatatagattatatgtttgtgttatgatagttggagagtttgcgtaagggataataaattatttaaatagaaggtaaattgttaggttatggagattgtttgaattttggtagtattgaggatatagttttattaaagaagtttttttatgttttttggagttttagattttaagatgaataatttaggttaagagtttgggatggttggtattgtattttatttagagaaaatgagaggagaaattttgaggtttaatatttttaatattggagaaggatgaaaggttgtattttgaaatataggtagtagttagtggaaatagtgggttgtaaaggagttattttttttttatttttattattttatatatgataagagattggagttgattaatggatatattttatttgaggatttaggttaatgaatatgagagagtataatgggtaaagtttatttttttttttttttttttttttttttttttttttttttttttagatagagttttgttttgtcgtttaagttggagttggtggcgtgattttagtttattgtaattttcgtttttcgggtttaagcgatttttttgttttagttttttgagtagttgggattataggcgtttattattatgttcggttaatttttgtatttttagtagagacggggttttattatgttggttaggttggttttagatttttgatttcgtgatttgttcgttttggttttttaaagtgttgggattataggtatgagttatcgtatttagttggtaaagtttattttattgggaacgttagagataataatttatagaacggttttaatatttttttttttatgttataagattatgaaagttttttttttgttatatgattattaaagatttgttttaaagaatatattttgatgtttaatatagatatttttgaaaattaggagatttcgatttttttgtttttgaagatatagtgttatgaaaaggagaatgttaagttttttttatagaaaggattggaatataaatatttttatgaagagtgatttggtagtgagggagtttatcggatggtgaatttattgttttttttgttgttgttttgttttcgagacggaagttttgttttgtcgtttaggttggagtgtagtggtacgatttcggtttattgaaagttttgttttttgggtttacgttatttttttgttttagtttttcgagtagttaggattataggtattcgttattatgttcggttaatttttttttttttttttttgtatttttagtagagacggggttgtattatgttaattaggatggttttgattttttgatttcgtgatttgtttgtttttgttttttaaagtgttgggattataggtatgagttatcgtgtttggttggtgagtttattgtttaatattagttatgatatgtttgtttagggtggattttttatattgttgtgttggggttttgttttgttatgtagtcgtttttataagttatgaatataaatattttatatattattgattatttgatcgtattaaagggttttgaatatattgtggtattaatttttagatcgttagaaagagatttatagtatggttttttttgtaattttttaggaatattttttttgaaaggtaaagagttaggagaatgggttagatgagagtttatggtattagtttgtgttaagagtttgattttatgatttaagtttgttatttttttttttagaggtaaaattatgtataattttttatgtttgttttttgttggttgttataatgttttgtttttaaatggtgtttgagaaaaatatggtaaatttaaagatattttatatattataatagtatttttaatttaagttgttgtttagtaatttatgatattgtttagttttagaatattgattggttttttttgtgagattattaaatttgggagatttgagaaatgatttttagttttttttttttgtgataggagagaagtttttatttggatagtgtttatggtttttcgtttttttttaaattttaattttttgtgtgtttgagggaatttttaaaggtatttgaatgaggattttttggtgatgttaaatggtgacgagttattatagttatgagaatttagttaagaaataggaatttttgtaattagtttaagtagaattgaatatattatagggaattagtttttaaaattgttagggggtttggaggagtagaagttattgtagaattttaattttaaaagattaggaatttataggaagtttttgttgatgttgtagattttttagagtttttaggagtaaatgtttttagaatataaggttgttgttaaaatttatgtttgtgaaatttgtttttgagatggttgtggtttaatttttattttttaaattttataatattgagtttttttggagaaatgtattttacgtttagaaatttggggtagagtaagtttgagagatgtaatatttttatatttatttttaaagatatagataggattagagaagtaaatggaaattttataaaaattattaaatgtaaatatgtgtgtttatgtttgtgtgtatatttattatagattattttggttttttttatagtgttaagtttaaaattagaggatatatttttttggagaaataagttagggtttttatattgggtttagattaagtttgggattttaatattttatttgtttgtgtggtttgaattttgagaatttttagtttttttttttagttttttttttattattttttatttttttttttttttgtattaagggtttttatggtgttttttttttattaaggattttttattagaggtgttgagggaatattgatttaggtattttttttttaatttattatataagaagttttttttgtgttattttttcgtattttgagaggttatagaagttggtttgttggaatagatttttattagaataaaaattgtgaattgttgatattaataaatgtattaggacgttaataaatgtgttagggtagtgggttaatgggtttttttagtatgttttgtgttaatagagggttttataatgattggatttatttttaatttgggaggatggtagtttgagtttgatttattttttttttatttttatttgaaattcgatgttttaaagattagagttatttttatatagattttttggggtgtgaaattatttttttttatttgagtagtttttgtaaattagaaaacgtatgtaggtaggggtgtgtgtgtgtacgtgtgtatatttagaaattttgaatttatattttagaatatttttttgtcggttaattataagttttattgttataatttaagaatttgtagttagattgttttataattttttgtgtttttgtttgttttaaatggtataagttaagttttataattgagagattttgaaggaaaagattagtttgattaattattaaagaagtttaagggtagttgtttttaatagttgtttttatatagttagtttatggtttgatttatttatttaatattttttgttttttagaaattttggtaatttgtttttagagttttttttatttttattatattggttatttcgaagttagtatagagtattaggatataggatattttgttgtttttatttttttatttttgtttttattttttgaaaaaacgtatgtttttatttgtgaatttttttttagttatttttttaggaatagggaatgattttatttaattatttatgtaaaatagagattagaaattttatttagatattatgttttgttgtatgagtaaattatggaattttattaaggttagaatgattttatagaatttagatgtgtttgtatgtatacgtgtgtgtgtgtgtgtgtgtgtgtgtgtgtgtttgtgtgttgaaggaggagaattaggaaagtattaattttaattaatttaatttatataattttttaatttatttaattgtttaaatattatttgattttattttttatttaaggtatttttttttgtttatttttttaaaaatatttgaagtatataaatgtaattgttaggttggataagtattaaatggaatttttaattaaataaaaatttattgtgtttgtttttgtttttttagagaattttattagagatgttatttttttgcgtttgggtaggaattatagtatattttatgaattatttttttgattttaattaatatgttattttataatttttttaaattgtataagtatattttagtttagtaattagattgtttggtattatataataattgaaagttttaatttgatttaatataaatttttttttatttttgtgtaaattgttgaaggtaggaatgagtgtggtttttttttttttttacgttttattggtattttgaggttatagtttatttagggtaggtttagggaaggggaggaagagaaaaagattagaaacgttttattggaaatgaaatatttgtgttttttgagtttggatgatgttttaagtaaagttttttttttgtgtaaggtttggtaggttttttag

SEQ ID NO: 889 - DNA, 13420 bp, Artificial Sequence
  chemically treated genomic DNA (Homo sapiens)
tagttttttgtttaggatatatattttttatgttgagaagaaattggttttgtttatttatttattgttattgttattttttttttagatataaggattagtaatttgttttttattttaaattttagatagtagtggttgttttttgaaaatttttgagaatattttgtgattgtttggataagtgatagatattttatgataattagggtttgttgatagttaaaaaagtttatttttttaaaatgtgttgtaagtttttagttttattgtaagtgagttttattttgtgataatcggtaggatttaagatattttgtaattttattaatgttaatttgtttgttgtttagtaaaagtttgtgtttttgattttatttgtttagttttgagaatgttgggatttattttttgtaaaattaagtttatggttttatttattaagattagagattatgtaattttcgtacggaaaattatttttttttagaaattaatttaattgttatttttttaggaaataagttttcgtatttgatattttttatatatagtagagttgagaggattttttttttgtttttagtgtaaaagtttagtttagagattatttgtacgattgatggtttggtgatagttgttatattgtttagtttgaattatgtttatattgaatattgaaggaaagtgtgagatatataatttaaagaagtatatttgttatagtttaagtgtgtcgtttttaaaatttaggtaggattttttattgatgaatgggattaaggtttttgtaaaaaacgttttatatagtttttagttttttgtttttttattttttattatgtgagaatatagtatttattttttttgtaggatgtaaggtgttattttggaagtggagagtatgttttttgttagatattgaatttgttggtgttttaattttggattttttagtttttatgtattttttataaattatttagtttatcgtattttattatagtataaataaattaagataatatttttgttatttataaatgtataaaatatatagaatttagtttattgttattggttattttttaaatataaatttgtatgatttatgaatagcgtgttaaatttatataaataaattttgaaaatttttttttaattatattttagtatatttttgatgtagaattatttatttttgtttttgtatttattttgtaataataaggtgaattttagtttttttttttagattattatattataattagttaattagtaaattacgattttttattattaaatgaaatgtgatatttttttggttgtaattgtataattgttaatagtattgaattattattgtagtgtaggaatatagtttgtttttaaatttagggatttttatttaatttttttaagaaatttttaattttttatattaatagaaatatatttttttaaagtaaacgagatattatttttattttattttgaaatgattaaatttgtattatttcgtgttgagaaattagaaatgatgattgagagtaataaatcggagttaggaatgttgaggttgttgttatttttaataagaaggagatttgtgtaggagttatgggtgtttttatgtaatataaacgtaaattgtgttatttttagaggagagtaattatgatgatgaggggaattttttgaaggaattagtattgttatatagtatttattttaaagtttataaaatgttgttatttattaaaagaagtagttttattgatttgtatagttatgaattaaagggataaaaataattttagtataagggatataattttttttagaaattgaatgtgaggtagtataatataatagtagagtttgaggggtttggaattatatatataatattttggtttaatagagttgatagaaaaattttgttttaaaataattaatattttatgtgaagagtgtttaattttttatttttggtttttattatgatttttttatttgtttgaggttatggttttttattattttattttttttgttttattataaagggagatataagaagattttgttggtcggatgtattggtttatgtttgtaattttagtattttgggaggtcgagttataattttgagaattgttataattttgagtataaagtaaaatgtttaaaaattgttgaagaaattttagttatttttattgtagtatggtgagtattttaattttagaaatattaaggtatataaggaaggagtgtgtattagaattgtggtagggtgtgaattaatgtagaattttatttgtatagttgtattttgaagtttattttgaattttagatgttatatttatataaatataaagtataataagtatttaaatgtagaattatatgtttaaaattatatgattatattaattgatgtaatttatagattttttttagggttttgttttttgaatattttgtaacgtattagttagtaaagttttttttttttttgaaattgagttttattttatcgattagattggagtgtagtggtatgttttcgatttattgtaatttttgttttttggaattaagtaattttcgtgttttagttttttgagtagttgggattataggtatgtattattatatttagttgatttttgtattttttttgttagtagagataaggttttattatgtgggttaggttggttttaaatttttgattttaagtggtttatttatttcggttttttaaagtgttgggattataggtatgatttattgtgttttgttagtaaagtttttttatatatttttttatgataaaataagagaagtggaatagtaaagggttatagttttaattaaatgaggaaattttaatgggaattaggaatgagggattgaatattttttatataaaatattaattattttaaaattattgggggaaatttagttagatattaggtaaaatttattttcgatattttacgtagttttttttttatattttttaagtgtcggtcggtttgagaaataaagggatagagtattaaagagagaaattttaaagttgggtgtttttaggagacgttatatgttggtaggttttgtgatgttttataagttataaaattagtaagtttttattagtgatttttaaaaggggagggggagtgtatgaatagggtgtgggttatagagattatatgttttataaggtaatagaatattataaggtaaatggaggtagggcgagattataggattataggatcggggcgaaattaaaattgttaatgaagtttcgggtattattgttattgataatattttattaggagatagggtttgagagtagataatcggtttgattaaaaatttattaggcgggaatttttttattttaataagtttgggagcgttatgggagattggggtttattttatttttaagtttgattatagaagacggttattttttgaagtagttattttagaggtttaattttagggaagtatttttttttttagggatgttttttgttgagaaaaagaatttagcgatattttttttatttgtttttgaaagaagagaaatatggttttgttttacgtggtttattagtggttagagtttaaggttattttttttgttttttgaatattgttgttattttgttttttttttaaggtgtttagattttatattgtttaaatatatatgttttataaataatttgtgtagttaatataattattatagggttttgaggtgatatatattttttttagattataaagatgataggattaagagattaaagtaaagatagggataggaaattataagggtattgattggggaagtgaagtgtttatgaaatttttataatttatgttgagagattgtagtaaagataggtgtaagaaattataaaagtattaatttggggaattaataaacgtttatgaaatttttataatttatgtttttttgttatggttttaggcggtttttttattcggggtttttgatttttcgtaataaaaatagagttgttttgttaatagttgattttgagtttttgatcggttttttagatttttgaatatttggattgtatagttgattttattatattgttagggtaagtgtatataaaggtaattttagattttttattgtatataggtggtttttgtaagtcgtttgtttgtgtgtgttttggagttgttattaaatttggggatagtattaggagatatatttgaaaaaattttttttatttagattaaattattaataaattttttattttttttaatttattaaagaatttttatttgtaaataggtatagattaaattcgttagttaatagttattattttgttatattaatagatattcgtggttgttgttttttgaggtatttatagaattatagtattttttagtattgaaagatttgaaagattacggtgtttttattttaattgtgagatatgaagtaatttttttaagtttataatagtaagatatggtgtaataaggattagattaaaagttttttgatttgtaattatgttttttttattttttttatttttaagtatatttatatatttatttttgtaaataatttttttgttaagtgggaaatgaatgtttttataaggtttaaatttgtgaatatattattgattagtatagagttggttaataatagggatataattaaggtgttttatacgtaattggtttaaattttttaagtattaaattaaaataattttttaaagaaggaaattgttttagaaaaggatttttatatagtatttttgattagcgattgatgatgttattgtatttagatgttgattcgttttttaatattagattatttaatttacgagtaaggaaattagtaattttttttttataatttggaatgtgggtggagaggggttatagttttttttgagtgagatttatttgtttttttggtttttggttttgttttgttttttagtatggtgtgtttgaagttttttggaggtttttgtatggtagttttgatagtgatattgatggtgttgagttttttattggttttggttggggatattcgacgtaagtgtatattgtgggtgttgatttattatggggtggggaaaaaagggagttgtgttaatattgtgtttaggttatgttttttaagaaagtgtgatattttttttagggattgtttatttttattatatggattttaaattatttttattataaatggaatttggttatttgttttatttatgagattgtgtaaagggtttttgtataggttatgttttattttaaatttttattaataaaatttttgtattatatgtttttagggtttttagaggatttagaaataaggatgttaaaataaattttttatatagtatttttttttattatgttgatttatgttagacgaaataaggttttgttttgaaaattttgtgggagttaaaggaatttaaagggttttttttagacgattttgtgttgttttttataggatttgtggtgttggttttttttttttatatgtgaggatgtatttagtggtttttttattgtttttttttttttttttttgaattttagtgtttataaagtttgtatttttgtagtatatgtaggttttttgatagaagttatatttagtgtttttttttttttatggggaaaaatttttggatttgaaattgatatttttagtatttggagttattttataggtaaagattatttatgaggtatttattggtgtttttttttgatcggttttttagatttttgaatatttggatattttttaagaatttaaggtattttttgaaaaattggtttagattagtgtttattattaattttttataatttttttatatttgttttttttgtatgttttaattagatatgatagaagagatttaattaatataggataaattatatgaaattttatttttgtaagttaaaaatagttaaatattagaaaattaataatgtttaaattatatattttgtgtggggttatcgagacgacgtggatattgtttatatttaatagggttgaaagttaatgaagaagttttggaaattttttgttttattggggttttgttttaaattttataggtttatttattatgtttttagttttttttaattagttatgtttgtttatttttatttttagtttttttttatttttttttagttatgttgttattatttttagaaatttttaaaatttgtaaagatttttagtattatgagatttattgaaagagataatttttttttttttgagatagggtttggttttgttatttaggttgtagtgtagtggtgtgatttaggtttattgtaatttttgttttttacgtttaagtgattttttttttttagtttttagagtagcggagattataggtaggtaaatatgtgtagttaatttttatgattttgttagagatgagattttgttatgttgtttaggttgtttttaaatttttggatttaagtaatttttttgttttagttttttaatatgttaggattatagatgtgagttattgtgtttaggtaaaaagagatgaattttaatttaaaaatttttttttttttaaattattgtttttttatttgtgaattttttttttaattagaaggaggagaaagaagaagtttgtttgtattttttattaggaggaggagtttagtgtgatattaaaatgaaagagtgttggagtttgattttttttttgttttttaggatttttgtagtgattagtttttatattttggtttatttatgtaaagtatatttattttttttagtagttattttttattgggttttattttaagtttaaattattttatttgagtaagatagagagggtttcgatttttatggaagttatataagagtagaggagatagatattaatttaataagtatttaataaagaagaaaatgttagagagatatagtgtattgaagaaaagatattaggtttgtgaaaaagagagatatggatttatttattttggtttatatgtttaggtagttataattgagaaagtgatatttagttgagataataaaataaatagatagtcgtgaagatttaaaggacgaaagttttagggagaatgaatgggggggaagttttggtgtgggaaattatgtggaaggatagaaagaaggttagagggattgaattatagtaagtaaggaaatggagaggtagaagatgaggtaggatatagagaggaagttaggagttttattatattagattttgatggttatggtaaaaaaattgaattttattttatttttatttattttttgagacggagatttgtttttgttgtttaggttggagtgtaatggcgcgatttcgatttattgtaatttttgttttttgggtttaagtgatttttttgttttagttttttaagtagttgggattataggtgtttgcgattatattcggtttatttttttgtatttttagtagagatagggtattattatgttggttaggttggttttaaatttttgattttagataatttgtttggttttttaaagtgttgagattataggcgtgagttattatgtttaatttgaattttatttgaatagatatgagaagttattgtatggttataaggatagttaatttatattcgattttttttttttgagatagagttttgttttgttgtttaggttagattgtagtggtataattttagtttattgtaatttttgttttttgggttttagtaatttttttgttttagttttttaagtagttgagattataggtatatgttattatatttggttaattttttgtatttttagtagagatggggttttatcgtgttagttaggatggttttgattttttgatttcgtgatttatttttttcggttttttaaagtgttgggattataggtgtgagttattacgttcggtttatatttaattattaaaattaattttagttattttgtggggattggattgttgggttttataagtggttaggaagattatttaggattatagtagggaattttttagggaaaataggtttgtggttttatagagtgtattagtgataaagatagtgaaaacgataaagtggatagattaggtatgtatttttgtttagtttgttaatggattattttaaagggggtagaaaaattaagtttatttttaaggattttgttttgataaataagtggatggtggtgtttattgagataggaaaaattgtgggaggaaatgatttgaagtgggtggttggaaataaaagttttgtttaaatttgagatgatttattgatatttatgtggagtaattcgaaggttaatggtatttaagagatttatggtgaggtgaggttagggttttaggtatttatgttggcggtattagtacgtgtaatgtgttaaattttagggagtggaagaggatatatagggagatggattgtgtggagaaaaaagaagagggtataggttagtaaagggggttgagatagagtttagggatgttggagaaaatttaagagaatataatgggtgtaagttatggaaaatagattatttttaaggagaagggagaggttaattgtggtgagtattattaagaggagggggaagtgagaacgtgatagagaagtaagtgttgggtttgttggagttgatatttgtagttaatggagtatttagggaggaaattggattggaatatttgaagagtaagtagaagtgaggacgaggttaagggtgattattttaagtagagagttttagggaaggattgtgttttgggtttagggagtttgttggatttaaaggaaaagggttgaagaggttgaagagaaggaggaggatttgtgaattagagatattgagttattattagtaaggaaatattagagggtttttgtgtgtagtgttgattgtttatgtaaaaggttatatagataatattttatatagttagtatttattagtgatatagaatatgttagttattattttaggttatgagaatagagtgataaataaaatgaatttggtcgttatcggtatatgttatgtaatattttgtagtgattgtgtattaggtttatgaattttagtatgtaattttaataacgattttgttgtatttgtggtgtttaaaaatatatatatttttggaatttaaaattgagaggatataagtaaaatttagtattagaaatttagtgttggaaattagattgtagtttaaatttgagtatatagaaagttttttttttttatgttagtagatgttttttgtgtgaggtttaggtatattatattattagatataaattagtgattttgttttatgtttttagaatgataattttttatgaaattaatagaagaatagaagataattgtaaaattatgatgaagatgttagtggttttagaattaaggaatataaaaaataatgtgagttgtagttatagggattataaaagttaaaatgggaatgtatttgagtgtttattatgtgattagtgttaataagagttattatttaattttatatttaataataattttgtgaggattaagttattattaaatgtatttgatagattataaaaaggtttatcgttggtaaaaattgatttaaggggaagaggttatatttttatttagattttttgattttagagtttgagagtttgtttattattagtgagtagtgataatattgtgtttaaattatcgatagaatttttgatatttatatgtattatgttgttttttagagtgtgggtagagatttagggttgttagttttaatgtataggagaaatttttatttattgtgtatttattattttaaaagttttaggttgggtgcggtggtttatgtttgtaattttagtattttgggaggttaaggcgggtagattacgaggttaggagatgaagattattttggttaatatggtgaaatttcgtttttattaaaaatataaaaaattagttgggcgtggtggtgtgtatttgtagttttagttatttgggaggttgaggtaggagaatggtatgaatttgggaggcggagtttgtagtgagttgagatcgtgttattgtattttagttttattttgggtaaaagagcgaaatttcgttttaaaaaaaaaaaaaagttttatatgtttgttatggtatatgttgaagaatataaggaagtattaaattattttttttgaggtttgtttagtaagttgggttaggattgttaaataaaatataggtttttagttaaatttgaattttagatatataattataatttattgaaaatttaaatgtaatttggtattttttgattttatttgttaaatttgttaattttatatgagatatatgagtatggattacggtgttatttatggaagttatagttatagtgatagcgattttatatatgtttattttttaattttttttttgtaaagaaagtgtttagataatttagggataaaaagatagatattgtttgatttaggatgtatttttttttgttatcgtttttaaagggtaaagagagatttttataggttttatttatagtttgatttatagtttggggatttgtttatgttttgaaattgtttgtatgagaatgttatttttttggtttttttttttttgaggggatttgattataaaattgagagttttatttttggttaaggttggaaatttgatgtttgttagtattgttgggaatgggagattgaaataaatgagttagttggggtattaaataggaataaaatagttgtggttgtgatttattattataattagtggattagtggtagagaaattaagaaagaagatgatgtgagagataaattatatgatttggtaaggtaagggaattagtaaattttggttttgaataagtttattttttggaaagatagtattgtattgggattagaattttataaaatattcgttttatgtaagattaagatttttaataaatattttttaatgtagtttttagttgttttataattaatagtgatttatttaatatagatatttttagatggtttatatttatgttttttatttagggatagtttattattttttttttttttttttattatttttgaggaatatgtggtaatgttagaataatttttggttgttataataggggttttttttgatatttaatgagtagaagttagggatattgttagagaatttataatgtttagaatagattttattattaattaagatttatttcgtttaaaatgttaatagtgttgaggttggaagtattggtttatattgtgttttttttgaaaaatgtagattcgttttttttttttttttttttgagatggggttttgttttgtcgtttagattggagtgtagtggttttattttagtttattataatttttgttttttaggtttaagcgatttttttgttttagtttttttagtagttgggattataggtgtattttgttatgttcggttaattttttgtattttagtagagatggggttttattatgttgtttaggttggtttcgaatttttgagtttaggtaatttattcgttttggttttttaaagtgttaggattatacgtatgagttatcgcgttcggtttagatttatattttttatatatttattgtttaatttagttttttatggtttatttttgtttgttttattataaaaaattagatagttgtataaatttaattatttatttgttgaatttatttagttaatgtaagtttaatatttttatatttattttttgttttatgtaatattgtttaatatttttataagttgttggttagtattatttttattaatttttaatagtttgtttttttaagttataaatagtgatgttgttgtaattattttttattaatatgttttagatttttgtagtgattttatatttgatattatttataatgtaaaatgtttttatttatttattttatttttatttataggattatttttaagttatttttgttatttttatattttaattaaatataaagataaaaatattaaaaatatgtatatagtgttatatataggtgtatatttatatatatatatgtatatatgtttatatgtattgaaattatagaagtatatgttattaataagagttttgagatatttttgattatttatttttattagatgagatttgttaaatgagttttgggaataaattttttttaattgaatttttgagttttgtggatttagaaatgtaattgaaagtttgtggatatttacgaggattatagttttattttttttaaaattttttaatatttttttattgtttttagtaaatttaaaattttaatattatttacgaggttttttaatatttggttttttgtgatttttttaatttaattttttattttttttttttttagtttttttgttttagtgaattttgttttagttttttgaagtttattattaatttaagtttttgtatatgggattttttaaatttgaaatgtgttttcggttttgtttaaatagatatataggttttattttgttttttggtttatatttgtttaatttgttaagttatatttgtaattgttatttttttttggtattttaaaggaattgagattattttattattttttgttttagaattttatatttttgaaattttttatttttgtttaagtttttgtgtgtttggtttttggttattatttttattgtttttaaagtttttttagcggagtggagaggtttgttttttcgtgtttggatttttagaggtagcgtaggtttggtataaggttattattaaggaagtgtttataggatgaaagcggtgcgtgttgtttaaggaaagggtaaagtttttaaatggtaaagggttgagagaaggagtaaagtgtttttggggtggaggtttttaggaggaggcggcgcgggttgcggtgttggacggatttttttttagtttttgtttggaggtttttagaataggttggaggtagggagggggttttaaaagttttgggattagaggtagtttttttatttggttttttagattttcgttcgttttagaaagatagaggatgagtttttgggttgcgtgttgtcggggttgcgggtggggttagatagtgtttttttcggaggtcgtttttgtaatcggatcgtttttgtttttttagt

SEQ ID NO: 890 - DNA, 13420 bp, Artificial Sequence
  chemically treated genomic DNA (Homo sapiens)
gttggggggataagaacgattcggttatagaagcggttttcggggaagatattatttggttttattcgtaatttcgataatacgtagtttaggggtttattttttgtttttttgaggcggacgggggtttgggggattaggtggaaaaattatttttgattttaaggtttttgggattttttttttgtttttagtttgttttggagatttttaggtaggagttggaggaggattcgtttagtatcgtagttcgcgtcgtttttttttgggagtttttattttaaaggtattttgtttttttttttaattttttattatttaaaggttttattttttttttaaatagtacgtatcgtttttattttgtgaatatttttttagtgatgattttgtgttaggtttgcgttgtttttaggaatttaaatacgggaaaatagatttttttatttcgttgggggagttttaagagtagtgaaagtgatggttaaaaattaaatatataagagtttagataggaatgagaaattttagaagtgtggagttttagaatagagaataataggatgattttaatttttttagggtgttagagaagagtgatagttatagatgtgatttaataagttaagtaggtgtgagttagggggtagagtggagtttgtgtgtttgtttggataaaatcggaggtatattttaggtttaggaaattttatgtataaaagtttgaattgatgatgaattttaaaaaattagaataaagtttattaaagtagagaggttgaggggaaggagggtaaaaggttagattggagaaattataagaagttaggtgttgaaaagtttcgtgagtggtgttaggattttggatttattaaagataatgggaaagtattgaagagttttaaggagaataaaattatgattttcgtaaatgtttataaatttttagttgtatttttaaatttataaagtttagaaatttagttaaaagaaatttgtttttaaaatttatttggtaaattttatttgataagggtaagtggttaaaggtgttttagagtttttattggtgatatgtgtttttgtagttttaatatatataaatatatgtgtatatatgtgtgtaaatatatatttatgtataatattatgtatatatttttgatgtttttgtttttatgtttggttgaagtgtgaaaatgataaaaataatttaaaaataattttgtgggtaaaagtgaaatgaataaatagaagtattttatattgtgaataatattaaatgtagaattattatagaaatttgaggtatgttagtgaaaaataattgtagtagtattattatttgtgatttagaagggtaaattgttgaaagttaatagagatagtgttgattaataatttatgaaaatgttgaataatattgtataaggtaaaaaataaatatgaaaatgttgagtttgtattgattaaatggatttaataagtaagtggttgaatttatgtaattgtttagttttttataatgaaataagtaaaaataaattataaagaattgaattgggtagtaagtgtataaaagatgtgagtttaggtcgggcgcggtggtttatgcgtgtaattttagtattttgggagattaaagcgggtggattgtttgagtttaggagttcgagattagtttgggtaatatggtgaaattttatttttattaaaatataaaaaattagtcgggtatggtagggtgtatttgtaattttagttattggggaggttgagataggagaatcgtttgaatttgggaggtagaggttgtagtgagttgagatggagttattgtattttagtttgggcgatagagtaagattttattttaaaaaaaaaaaaaaaaaaagcgagtttatattttttagaaagagtatagtgtgaattaatgtttttagttttagtattattgatattttggacgagataaattttggttggtgatggagtttattttgaatattgtgggttttttagtagtgtttttggtttttgtttattaaatattagaagaaatttttgttgtgataattaaaaattattttaatattgttatatgttttttaagagtgatgggagggaaggggaggggtggtgaattgtttttgggtaagaaatatgggtgtgaattatttgaaaatatttgtgttgaataagttattattagttatggagtagttgagaattgtattgaaaaatatttgttgaaaattttggttttatataaaacggatgttttgtagaattttggttttagtatagtgttatttttttagaaaatgaatttgtttagaattaagatttattgatttttttgttttattaaattatataatttattttttatattatttttttttttaatttttttgttattagtttattaattgtagtaatgaattataattatagttattttatttttgtttaatgttttaattaatttatttattttagttttttatttttaataatattagtaggtattaaatttttagttttggttagaggtagaatttttagttttgtagttaagtttttttagaaagggagaaattaagaaaatgatatttttatatagatagttttaaagtatgagtaggtttttagattgtgagttagattgtgagtaagatttgtggaaatttttttttgttttttagaaacgatggtagagaggagtgtattttggattaaataatgtttatttttttatttttaaattatttaagtattttttttatagagagaaagttaaaaaataaatatgtgtgaagtcgttgttattgtggttgtggtttttatgggtaatatcgtaatttatgtttatgtgttttatgtagggttgatagatttggtaaataaaattagaggatgttaagttatatttggatttttagtaaattatagttgtgtatttgaaatttagatttaattagaaatttgtattttatttggtaattttagtttaatttgttagataaattttagaaggagtgatttaatatttttttgtgttttttaatatatgttatgatagatatatagaatttttttttttttttgagacggagtttcgtttttttgtttagggtggagttggagtgtagtggtacgattttagtttattgtaagtttcgttttttaggtttatgttatttttttgttttagttttttaagtagttgggattataggtgtatattattacgtttagttaattttttgtatttttagtagagacgaggttttattatgttagttaggatggtttttattttttgatttcgtgatttgttcgttttggttttttaaagtgttgggattataggtatgagttatcgtatttagtttagaatttttaaaatgataaatgtataatgaatgaaagttttttttatatattggaattagtagttttgaatttttgtttatattttaagaaataatatagtatatatgaatattagaaattttgtcgataatttagatatagtattgttattatttattaatgatggatagatttttaaattttagaattagaaaatttgaataaaaatgtgattttttttttttgggttaatttttattaacggtaagtttttttgtaatttattaaatgtatttaataatagtttaatttttataggattattgttaagtgtaaaattaaatgatgatttttattagtattgattatataataaatatttaaatgtatttttattttaatttttataatttttataattgtagtttatattattttttgtattttttggttttaaagttattagtatttttattatgattttgtaattgttttttgtttttttattagttttataaagaattgttattttgaaaatatagggtagaattattggtttatgtttaataatgtagtatatttaaattttatataaaaggtatttgttgatatagaagaaagggattttttatatgtttagatttaaattgtagtttgatttttagtattaaatttttaatattgggttttatttatatttttttaattttagattttagagatgtatatgtttttaaatattatagatataataggatcgttattgaaattgtatattgaaatttataggtttggtatatagttattgtaaaatgttatatggtatatatcgatggcgattagatttattttatttattattttatttttatgatttagagtaataattggtatattttatgttattaataaatattggttgtgtgaaatattgtttgtgtgattttttgtatgagtagttagtattgtatatagggattttttagtatttttttgttaataataatttagtatttttggtttataggtttttttttttttttttagtttttttagttttttttttttagatttagtaggttttttgaatttagagtatagtttttttttgaagttttttatttaaaatagttatttttaatttcgtttttatttttatttgttttttaaatgttttaatttagttttttttttggatattttattgattgtaaatattaattttagtaaatttagtatttgtttttttgttacgtttttatttttttttttttttagtggtatttattataattgattttttttttttttttgaaaataatttattttttatgatttatatttattatgtttttttgggttttttttagtatttttgggttttgttttagttttttttgttggtttgtattttttttttttttttttatataatttatttttttatgtatttttttttattttttggaatttaatatattatacgtattgatgtcgttaatataaatatttgaagttttggttttattttattatgagttttttaaatgttattgattttcggattgttttatataaatgttaataaattattttaaatttaaataaaatttttatttttaattatttattttaaattatttttttttatagttttttttattttaataaatattattatttatttatttgttaaaataaaatttttaggaataagtttgatttttttattttttttagagtaatttattaataagttaagtaaaaatatatgtttagtttgtttattttgtcgtttttattgtttttattattaatgtattttatgaagttataagtttgttttttttggagaattttttgttgtgattttaaatagtttttttgattatttgtgaaatttaataatttaatttttatagagtagttagaattaattttaataattgaatataggtcgggcgtggtggtttatatttgtaattttagtattttgggaggtcgaggggagtggattacgaggttaggagattaagattattttggttaatacggtgaaattttatttttattaaaaatataaaaaattagttaggtgtagtggtatgtatttgtggttttagttatttgggaggttgaggtaggagaattgttggaatttaggaggtagaggttgtagtgagttgagattgtattattgtaatttagtttgggtaatagagtaagattttgttttaaaaaaaaaaaatcgaatataaattgattgtttttgtaattatatagtagttttttatatttatttaaataaaatttaggttgggtatggtggtttacgtttgtaattttagtattttgggaagttaggtagattatttgaggttaggagtttgagattagtttggttaatatggtgatattttgtttttattaaaaatataaaaaaataagtcgagtatggtcgtaggtatttgtaattttagttatttgggaagttgaggtaggagaattatttgaatttaggaggtagaggttgtagtgagtcgagatcgcgttattgtattttagtttgggtaataagaataaattttcgttttaaaaaataaataaaaataaaataaaatttaatttttttattatggttattagagtttaatatgatgaggtttttgattttttttttgtgttttattttattttttgtttttttatttttttgtttgttatagtttagtttttttagttttttttttgtttttttatataattttttatattagagttttttttttatttattttttttggaattttcgttttttagatttttacgattgtttatttattttgttgttttagttgaatgttatttttttagttatagttgtttaagtatatgaattaaagtaagtgaatttatgttttttttttttataaatttgatgttttttttttagtgtattatgtttttttaatatttttttttttgttaaatgtttattgggttagtgtttgttttttttatttttgtgtaatttttatgagagtcgggattttttttattttatttaaatagaatgatttgaatttagaatggagtttagtaaagagtagttgttgaaaaaaataagtgtgttttatatgaataaattagggtgtgggaattgattattgtagggattttggaaagtaagaaggggattaagttttagtatttttttattttgatattatattagatttttttttttggtgagaaatataggtaaatttttttttttttttttttttagttggaagaagaatttatagatagagaaatagtgatttaagaaaaaggaaatttttaaattaaggtttatttttttttgtttgggtataatggtttatatttataattttagtatattgggaggttaaggtaggaggattgtttgagtttaggagtttaagaatagtttgggtaatatggtaaaattttatttttaataaaattatgaaaattagttgtatatgtttgtttgtttgtagttttcgttattttggaggttgaggagggaggattatttgagcgtgggaagtagaggttgtagtgagtttagattatattattgtattatagtttgggtgatagaattaagttttgttttaaaaagaaaaaaattattttttttaatggattttatagtgttaaggatttttgtaagttttagagatttttggaaatgatgataatatagttggggaaaaatagagagaaattggaggtagagataagtagatatggttaattaaggaaagttgagggtatgatgggtgaatttatgaaatttaggataagattttagtaagataaggagtttttaggatttttttattgatttttagttttattagatgtgaataatgtttacgtcgtttcggtaattttatatagagtatatagtttgaatattattaattttttggtatttgattatttttgatttataaaaatagaattttatataatttattttatgttagttgaattttttttgttatgtttagttagagtatgtaggagaaataagtatagaaaggttataaaagattaataataagtattaatttgggttagttttttagaggatgttttaagtttttgaggagtatttaagtatttaggggtttgagagatcgattaagaggaggtattaatgaatattttataaatggtttttatttgtagggtgattttaagtattaaagatgttagttttagatttagggatttttttttataagaaagaaagagtattaagtataatttttgttagagaatttatatatgttatagggatataggttttataaatattggagtttagaaaaaaaagaaaggaaataatggggaggttattgggtatatttttatatatgaggaagaggggttaatattataggttttgtggaggataatataggatcgtttaggagagattttttgaatttttttgatttttataaaatttttaaaataaaattttgtttcgtttgatataagttaatatgataaagggaagtgttgtatgaggaatttattttagtatttttatttttaaattttttaaagattttgaggatatgtgatgtaaaggttttattggtagagatttaaagtaaaatatggtttgtataaaggttttttatatagttttatgaatagggtaagtagttaagttttatttgtggtggaaataatttgggatttatatgataaagatgggtaatttttgaagaaaatgttatatttttttaagggatatggtttgggtataatgttaatataatttttttttttttttattttatagtaggttagtatttataatgtgtatttacgtcgggtgtttttagttaaagttagtggggagtttagtattattagtgttattgttagagttgttatgtaggagtttttagggaattttagatatattatgttggagaataggataggattaggggttagaggagtaggtgagttttatttagggagaattatgatttttttttatttatattttaaattatagggaagaagttattgatttttttgttcgtggattgggtaatttagtgttggagaacgaattagtatttgagtataatagtattattagtcgttggttagagatgttgtatgaaggtttttttttgaaataatttttttttttaaaggattgttttaatttagtatttgaaaggtttgaattagttgcgtgtaaaatattttaattgtgtttttattgttagttagttttgtgttggttagtgatgtgtttataaatttgagttttgtaagagtatttattttttatttgataagagaattgtttgtaggagtgagtgtgtgagtgtgtttaggagtaaaggagatggagggaatatggttgtaaattaggagatttttaatttggtttttattgtattatattttattgttgtagatttgggaaaattattttatgttttatagttaaaatgaaggtatcgtgattttttaggttttttaatattggaaaatgttgtgattttgtggatgttttaaggagtagtagttacgagtatttgttgatatgatagaatgatagttgttgattagcgagtttaatttgtatttatttataggtagagattttttagtaagttaaaggaaatggaaagtttgttaataatttaatttgagtaaaaagggtttttttaagtgtattttttgatgttgtttttaagtttagtggtagttttagaatatatataggtaagcggtttgtaggggttatttatgtgtaatggagggtttgaagttgtttttgtatgtatttattttaataatgtgataaggttaattgtgtaatttaagtatttaggggtttgagagatcgattaaggatttaaagttagttgttgatagaataattttgtttttgttgcgggaagttagggatttcgaatggagggatcgtttgaagttatggtagaagaatatagattgtgaagattttatggacgtttattagttttttaaattaatatttttataattttttatatttgtttttattgtaattttttaatataaattgtgaagattttatggatattttatttttttaattaatatttttgtgattttttatttttgtttttattttaattttttaattttgttatttttgtaatttgaggaggatgtatgttattttaggattttgtgatgattgtgttaattgtataaattgtttgtagagtatgtgtgtttgaataatatgaaatttgggtattttgaaaaaagaataggataatagtaatgtttagggaataagagagataattttaaattttgattattggtgagttacgtggaatagagttatatttttttttttttaaaagtaaatgggagaaatatcgttgaatttttttttttagtaaggaatatttttgagaaagagaatatttttttgaggttaggtttttgaaatggttgttttagggggtggtcgttttttgtggttaagtttagggatgaaataaattttagttttttatagcgtttttaggtttattaggatgaggaaattttcgtttaataaatttttgattagatcggttgtttgtttttaaattttgttttttgataagatgttattaatgataatggtgttcgaaattttattagtaattttaatttcgtttcggttttgtggttttgtgatttcgttttgtttttatttgttttgtgatattttattattttgtgaagtatgtgatttttgtgatttatattttatttatatattttttttttttttttgaaaattattaataaaaatttgttggttttgtggtttgtggggtattatagaatttgttaatatgtgacgttttttggggatatttagttttaaaatttttttttttggtattttgtttttttattttttagatcggtcgatatttagggaatatagaaaagaaattacgtgaaatatcgggggtgaattttgtttgatatttggttgaattttttttaatagttttaaaataattaatattttatgtgaagagtgtttaattttttatttttggtttttattaggatttttttatttgattgaggttatggttttttattgttttattttttttgttttattataagggaatatataagaagattttgttggtaggatatagtgggttatgtttgtaattttagtattttgggaggtcgaggtgggtggattatttgaggttaggagtttgaaattagtttggtttatatggtgaaattttgtttttattaatagaaaaaatataaaaattagttgggtgtggtggtgtatgtttgtaattttagttatttaggaggttgaagtacgagaattgtttgattttaggaggtagaggttgtagtgagtcgggagtatgttattgtattttagtttggtcgatagagtgagatttagttttaaaaaaaaaaaagattttgttaattaatacgttatagaatgtttaggaaatagaattttagggaaaatttatgaattatattagttaatgtaattatataattttaaatatataattttatatttagatatttattatgttttatatttatataaatgtagtatttaagatttagaatggattttaaagtataattatatagataaagttttgtattaatttatattttattatagttttgatatatattttttttttgtgtgttttagtgtttttagggttgggatatttattatgttgtaataaaaatgattaaaatttttttagtaatttttgagtattttgttttgtatttagaattgtagtaatttttagaattgtaattcggttttttaaagtgttgggattataggtatgagttagtgtattcggttagtaaagtttttttatatttttttttatgataaaataagagaagtggaatagtaaagggttatagttttaaataaatgaggagattataatgggagttaggaatgagggattgaatattttttatataaaatattaattattttaaagtagagtttttttgttaattttattgaattaaggtattatatatgtgattttaaattttttaggttttattgttgtattatattattttatatttaatttttaaagagaattatgttttttatattaaaattatttttatttttttaatttatggttgtgtaaattagtaagattattttttttagtgaatggtaatattttatagattttggggtagatattgtgtagtaatgttagtttttttaaaagattttttttattattatggttatttttttttggaaatgatatagtttgcgtttatgttatataaggatatttatagtttttgtataaattttttttttattaaagataataatagttttaatatttttaatttcggtttattatttttaattattatttttaattttttagtacgaagtagtgtaagtttgattattttagaatagaataaaaatagtgtttcgtttattttggaaaaatatatttttgttaatgtggaaagttgaagattttttggagaggttgggtagaagtttttggatttgagaataaattgtgtttttatattatagtgataatttagtattattgataattgtgtaattgtaattaggagaatattatattttatttgataataggaaatcgtaatttattaattaattaattgtggtgtggtaatttaggaaaggaagttaaggtttattttattattataggataaatgtagaggtaaaaataagtaattttatattaagaatgtattaaaatatagttaaagagaaatttttaaaatttgtttatataaatttgatacgttatttataaattatataaatttatatttaaaaaatggttaatggtaatgaattaaattttgtatgttttatatatttatgagtaataaagatgttgttttagtttatttgtgttgtgataaaatacggtagattgggtaatttataaagaatatatggaggttgagaagtttaagattaaggtattagtaggtttaatgtttggtaaagggtatgttttttatttttaagatggtattttgtattttatagaggggatgaatattgtgtttttatatggtagaaggtggaaagataagaggttaaaaattgtgtgaagcgttttttataagggttttaattttatttattagtgaggagttttatttgaattttaaaggcgatatatttaaattataatagatatgtttttttaaattatatattttatatttttttttaatatttaatataagtatagtttaggttaaataatgtagtaattgttattaaattattaatcgtataggtgatttttaggttgaatttttgtattgaaaataagagaagaatttttttaattttgttgtgtgtgagaggtgttaaatacgagagtttattttttgaggaaatggtaattaaattggtttttggaagaaagtggtttttcgtacggaagttgtatggtttttggttttgatgaatgaaattataggtttggttttataggaaataaattttagtatttttaggattaaataggtaaaattagaagtatagatttttgttgaataataggtaggttgatattggtaggattatagaatgttttgagttttatcgattgttatagaatggggtttatttgtagtaaggttgaaagtttgtaatatattttggaaaaataggtttttttggttattagtaagttttggttattatagaatgtttgttatttgtttaagtagttataaaatgtttttaggagtttttagaaagtaattattgttatttggaatttaaagtaaaaagtagattattaatttttatatttaaagaaaaaatgataataataataaatggataaatagaattagtttttttttagtatggaagatatgtattttgaatagaaaattg

SEQ ID NO: 891 - DNA, 5203 bp, Artificial Sequence
  chemically treated genomic DNA (Homo sapiens)
attttattataaaattaattgagattagtaaatagttaaggaaggataataaggttttagggttttagatttttttttttttagaggagagattttttgtttttttttttttgtttttttgtatttatttttggttgaattatttttttttttaattttttagtttttattatttttgaatttggattgttaaaatttatttttttaatggtcgggtattatagtttacgtttgtaattttagtattttgggaggttgaggtaggtagattacgaggttaggagatcgagattattttggttaatacgatgaaatttcgtttttattaaaaatataaaaaattagtcgggcgtggtggtaggtgtttgtggttttagttatttaggaggttgaggtaggagaatggcgttaattaggaggtggaggtggtagtgagtcgagattacgttattgtattttagtttgggtgatagagcgagatttcgttttaaaaaaaaaaaaaaagaaaagaaaagaaaagaaaaaagaagaagatatttgaataagtatattgatagtagtataattggtgattgtaaaaatatggaattagtttaaatgtttattaattaatgaatggataaagaaaatgtaattttatatatatttatatttatatatatttatatttatatatagatatatagatatataatggaatattatatagttataaaaagaaaggaaataatggtatttaaagtaatttggatggagttggagattattattttgagtgaattaatttcggaatggaaaattaagtattgtatgtttttatttataaatgggagttaagttatgagaatataaaggtttaagaatgatataatggattttgggaattggcgggggaagggtgggagggagttgagggatataagattatatattgtgtatagtgtatattaattaggtgttggatgcgttaaaattttggaaattattattaaagaatttatttatgtaaataaatattatttgtttttttaaaattattgaaatttaaaaatgttttaaataaataaaatttaaaaggattaaaaatggattatttgtttttaaaaaaaaagaaattattatttgtatagtttttatgtaatgtgaaatatgaatatttataattatatgaaaagttgttaaaaataatttttttagttcgggtatggtagtttatatatgttgttttagttattgggaaggttgaggtgagagaattttttgagtttaggagttttaggttgtagtgagttattatggtgttattgtattttagtttgggtgatagagcgagattttgtttttaaataatagtaataataattttttttttttgagttagacgggtatggagacgtttttggaaggaatatcgtaatggttgcgtagggatagttttaggtttagtttaaatttgtattggttggtgatggtggtattggaaaaacgattttcgtgaaatattatttgattggtgaatttgagaagaagtatgtagttattttgggtgttgaggtttattttttagtgttttatattaatagaggatttgttaagtttaatgtatgggatatagtcggtttggagaaatttagtggattgagagatggttattatatttaagtttagagtattattatagtgtttgatgtaatatcgagagttatttataagaatgtgtttaattggtatagagatttggtatgagtgtgtgaaaatatttttattgtgttgagtggtaataaagtggatattaaggataggaaagtgaaggcgaaatttattgttttttatcgaaagaagaatttttagtattacgatatttttgttaaaagtaattataattttgaaaagttttttttttggtttgttaggaagtttattggagattttaatttggaatttgttgttatgtttgttttcgttttattagaagttgttatggatttagttttggtagtatagtatgagtacgatttagaggttgtttagataattgttttttcggacgaggatgatgatttgtgagaatgaagttggagtttagcgttagaagtttagttttataggtagttgttttgtgatgttagttgtgtagcgtgtgtgttattttattattatttagttaagcggaatatgtgttttatttgtgggatgttgaaggagatgagtgggtttcgtagtgaatgtggtagtttaaaaaatatttttattgtttggatttgtatatttagttgttttggaatatagttgattttttgagttttaaatatagattgttatagttatattataatatttagcggtgaaattttgtttgttattgttatttttattttttttcgtttagaattagaataaagttgtattttaaatatttaaaaataaaaaatttttttttttttaatttaatatttgtgtaaggttagattttttaatatatatattttaattaaagtaagaaaatggttgggatgtagttggaggttataattttaagtgaattaatgtaggaatagaaaattaaatattgtatttttttatttataattgggagttaaatattgagtatatatagatataaatatgtgtataatagatattgtagacgattagagtggagagggtggggacgtgggttgaaaaattatttgtgggtattatgtttattatttgagtgataggatttatattttaaattttagtattagataatatatttatgtaataaatcggtatatgtaatttttgtatttatttttttttggttttttttttttttttttttgagataattttatttttgttgtttaggttggagcgtaatggcgtgatttcggtttatcgtaatttttgtttttcgggtttaagcgatttttttgttttagttttttgagtaggtgggattataggtatgcgttattatttttagttaattttgtatttttagtagatatggggtttttttatattgataaggttggtttcgaattttcgattgggattataggcgtgagttatcgcgtttggttattttttgtatttaaaataaaagttaaaaatttaaaaataagtatataagagaatgtatgttatgagttaagaatgatgtttgtaaaattttgtaagaataatatttatgaaaatgaaaaataattattttttttgttattaaaaattttggtagttgtagaaggtgggatttttttttattgggagtcgtagagttaatatatgaaattaaaagtgagttttaagtagagtaagttttattttttgtataggatttgtaaagaggagagtagttttgttaagttaatttttttattagtgaggcggttagtgaggggtgagggggttaaaatgtaggattgttttaatgaaggggttgggtattaaaagtgagggggaggaatatttatatgttttatgggaataggtagtgaatttttttaaattggtaatatcgttttttttttggtttttttaggattttttttatttatcgttatggagatcgttaattgttatggtatggatgggagcgtaatttagtttggaaacgggattataatgaagcgtgaggtttttttgaagttatttggtcggtttttttggttgtaacgagttttagttggtttgattataaaggtaattttttgaagtagattttgtttttttgtttttgtttttgttttttgttttttgttttttttttttagatattttattttgtcgtttaggttggagtgtagtggtgtgatttcggtttattgtaattattatttttcgggtttaagtaatttttttattttagtttttagagttgttggaattataggcgcgtattattatattcggttaatttttgtattgttagtagagatagggttttattatgttggttaggttagttttgaatttttgatttcgtgatttgtttgtttcggtttattaaaatgttgcgattataggcgtgagttatcgttttcggtttatacgttgtttattttggaaaaattaaaaattaagtttttttttattaaagatatgttattttcgattaagagattaagattattttggttaatatggtgaaatttcgtttttattaaaaatataaaaattagttgggtgtggtggtatacgtttgtagttttagttattggggaggttgaggtaggagaatcgtttgaattcgggagaaggaggttgtagtgagtcgagattatgttattgtattttagtttggggatagagtaagattttgatttaaaaaaaaaaaaaagttgtttttattaatatgtaatgggttattaatatttttttaaatgaattaatatttttaatattttgttttaatattttttaatttatatatgataaaaattgatataatttatagaaataaaatttatttgggtttttattaatttttttttttttgttgtttaggttggagggtaatggtacgattttggtttatcgtaattttttttttttgggtttaagtgatttttttgttttagttttttaagtagttaggattatagttatgcgttattacgtcggttaattttttggatttttagtagagatagggtttttttatattggtcgggttggtttcgaatttttaattttaggtgattagttcgttttggttttttaaagtgttgagattataggcgtgagttatcgcgtttagttaggattaatttttaagagtgtgtagagatatcgaaatttaaaagtttaagaattgttgattgttgggaaattttgtagtttttcgtttttttcgtaatttggttatgtgtttttttttttggatatttatgacgtagatttagtttttatttttaatgggtgtcgggtttttagagaagttaattagcgtcgttacgattttcgattataaagtttttattcggatttaagaagtttttaggatttagaggttgggattatggtagatggaattttttttttatttttttcggaggttttggtttttatttagatttgggcgggtgagtgcggggtcgggatggaaacggtttttatcgggagtagagaggggtcggttcggcgggggcgaaggattcggggagtcgcgtcgggaggagggtcgggtcgattttagttttttttcgtttttagg

SEQ ID NO: 892 - DNA, 5203 bp, Artificial Sequence
  chemically treated genomic DNA (Homo sapiens)
tttgggggcgaggaggggttgagatcggttcgatttttttttcggcgcggtttttcgagtttttcgttttcgtcgggtcggtttttttttattttcggtagaggtcgtttttatttcgatttcgtatttattcgtttaggtttgggtaagggttagggttttcgagaggagtaaaaggagggttttatttattatgattttagtttttgagttttgagaattttttgagttcggatggggattttatagtcgggagtcgtggcgacgttgattggtttttttagaaattcgatatttattgggaatgagaattgagtttgcgttatgagtatttaggaagaaggatatatgattaggttacgagaggaacgggaaattgtagagttttttagtaattagtagtttttaaatttttaggtttcggtatttttgtatatttttagaaattagttttggttgggcgcggtggtttacgtttgtaattttagtattttgggaggttaaggcgggttgattatttgaggttgggagttcgagattagttcgattaatatggagaaattttgtttttattaaaagtttaaaaaattagtcggcgtggtggcgtatggttgtaattttggttatttgggaggttgaggtaggagaattatttgaatttaggaggaggaggttgcggtgagttaagatcgtgttattgttttttagtttgggtaataagaaaaaagaaattagtgaggatttaaataaattttgtttttgtggattgtattaatttttattatatataaattaaaagatattaaaataaaatattaaaaatattaatttatttaagagaatattaataatttattatatgttaatagaaataatttttttttttttttgagttagagttttgttttgtttttaggttggagtgtagtggtatgatttcggtttattgtaatttttttttttcgggtttaagcgatttttttgttttagtttttttagtaattggaattataggcgtgtgttattatatttagttaatttttgtgtttttagtagagacggggttttattatgttggttaggatggttttgattttttgatcggaaataatatatttttaatgaaaaaaaatttaatttttaatttttttaaaataaataacgtataggtcgggaacggtggtttacgtttgtaatcgtagtattttggtaggtcgaggtaggtagattacgaggttaggagtttaagattaatttggttaatatgatgaaattttgtttttattaataatataaaaattagtcgggtgtggtggtgcgcgtttgtaattttagtaattttggaggttgagataggagaattgtttgaattcgagaggtggtggttgtagtgagtcgagattatattattgtattttagtttgggcgatagagtgagatgtttagggggaaaaaataagaaataaaaaataaaaataaaaataaaaaaataggatttgttttaagaagttgtttttgtagttaaattagttgagattcgttataattaagagagtcggttaaatgattttaaaaagattttacgttttattgtaatttcgtttttaggttaaattgcgtttttatttatgttatgatagttgacgatttttatgacgatgagtagaagaagttttaaaaggattaaaaggaaagcggtattattagtttggagaagtttattgtttgtttttataaaatatatgaatattttttttttttatttttaatgtttaatttttttattagagtaattttatattttagtttttttattttttattagtcgttttattagtggagaagttgatttggtagagttgtttttttttttataagttttgtgtaggaaataaagtttgttttgtttaaggtttatttttggttttatgtattggttttgcgatttttagtgaggaaagattttattttttgtagttattaagatttttggtaataagaagagtgattattttttatttttataagtgttgtttttgtaaaattttgtaagtattatttttggtttatagtatatatttttttatgtatttatttttaaatttttaatttttattttagatatagggggtggttaggcgcggtggtttacgtttgtaattttagtcgggagttcgagattagttttattaatatggagaaattttatgtttattaaaaatataaaattagttggaggtggtggcgtatatttgtaattttatttatttaggaggttgaggtaggagaatcgtttgaattcgggaggtagaggttgcgatgagtcgagattacgttattgcgttttagtttgagtaataagagtgaaattgttttaaaaaaaaaaaaaaaaaaaattagaaaaaaatagatataggggttatatgtgtcggtttgttatatgggtatgttgtttgatgttgaggtttggggtatggattttgttatttaggtagtgaatatagtatttataggtagttttttaatttacgtttttattttttttattttagtcgtttatagtgtttgttatatatatgtttatgtttatgtgtgtttagtgtttagtttttaattataagtgagaagatgtagtatttggttttttgtttttgtattaatttatttaggattatggtttttagttgtattttagttatttttttattttgattgaagtgtatatgttaaaaaatttagttttatataaatattgagttgaaaaaggaaggattttttgtttttagatatttgaaatataattttattttgattttaaacgaaaaggaatgggaatgatagtaataaataagattttatcgttgaatattgtgatgtgattgtagtagtttatatttgaaatttaaggaattaattgtgttttaaaatagttaaatatgtaggtttaaataatgaaggtattttttgaattgttatatttattgcgaagtttatttattttttttagtattttatagatgaagtatatgtttcgtttagttagataataatgaggtggtatatacgttgtataattgatattataggatagttgtttataaaattagatttttgacgttgggttttagttttatttttataggttattattttcgttcgggagagtagttgtttgagtaatttttaagtcgtgtttatattgtgttgttaaagttgggtttatgataatttttggtggggcgagagtaggtatggtaataaattttaagttagggtttttaatgagttttttagtaagttagaggaagggttttttaaagttatagttatttttggtagaaatgtcgtagtattgaagatttttttttcggtggaagataatggatttcgtttttatttttttgtttttaatatttattttgttgttatttaatatagtgggggtgtttttatatatttatattagatttttatgttagttaggtatatttttgtaagtaattttcgatgttatattaaatattatgatggtattttgggtttggatataatagttattttttagtttattgaatttttttaggtcggttgtgttttatatattgaatttaataggttttttgttggtatggaatattaggggatgaattttaatatttaaggtggttatatatttttttttaaatttattagttaaatgatgttttacgaaagtcgtttttttagtattattattattaattaatataagtttgaattggatttggggttgtttttgcgtagttattgcggtgttttttttagaagcgtttttatgttcgtttgatttaggaaggaaggattattattgttgttgtttagagatagggtttcgttttgttatttaggttggagtgtagtggtattataatagtttattgtagtttagaatttttgggtttaagggatttttttattttagtttttttagtagttggaataatatgtgtgagttattatgttcggattgggaggattatttttaatagttttttatgtaattgtggatatttatattttatattatataaaaattgtgtaagtggtgatttttttttttttgaaagtaaataatttatttttaatttttttaaattttatttatttaaaatatttttaaattttaatagttttgggggaataggtggtgtttgtttatatggataagttttttagtggtgatttttaagattttggcgtatttagtatttgattagtgtatattgtatataatgtgtagttttgtattttttagtttttttttatttttttttcgttagtttttaaagtttattgtattatttttaagtttttgtgtttttatagtttagtttttatttataagtgagaatatataatgtttggttttttatttcggagttaatttatttagaataatggtttttagttttatttaggttgttttgaatgttattattttttttttttttatgattgtgtagtattttattatatatttatatatttatatatagatatagatatatatagatatagatatatataaaattatattttttttatttatttattgattgatgggtatttgggttggttttatatttttgtaattattaattgtgttgttattaatatgtttgtttaagtatttttttttttttttttttttttttttttttttttttttttttttgagacggagtttcgttttgttatttaggttggagtgtagtggcgtgatttcggtttattgttatttttattttttggttgacgttatttttttgttttagttttttgagtagttgggattataggtatttgttattacgttcggttaattttttgtatttttagtaaagacggggttttatcgtgttagttaggatggtttcgattttttgatttcgtgatttgtttgttttagttttttaaagtgttgggattataggcgtgagttatggtgttcggttattaaggggataagttttaatagtttaggtttaagggtagtggaagttgaggaattggagggaaaggtaatttagttaaaggtggatatagaagaatagaggaaagagaataggaaattttttttttggagaggaaagaatttggggttttaaagttttgttgtttttttttaattgtttgttggttttagttaattttgtgatagaat

SEQ ID NO: 893 - DNA, 5195 bp, Artificial Sequence
  chemically treated genomic DNA (Homo sapiens)
ttttattatatatatatttgaattaaatttttatagaattggaaatgtatattattgattaaaataaattaaataggaaaaaattatataggaataattagtgatagaatagtaaataggaatggaaaatataataggattgtttaaaaaatattgtagaagtatagaatagtagtgttatttagaattatagtgatgtttaaattatgtttattatattttattaaaaattagagcgaaagatgttaagtttattatggaatgtttatttagtagttagtttttggaaaattttgtttttaagttggagttaagtattttgggttattgtatttaattaaagttattgatattatgttaagttagatgtgttggttgaggtacgagatttatattttttttattttaaaagtaatttgatttggtaaatatttttaaagatgatatttgaatgagaaaattggtatttgggatatttttaaattaaatttgagatattttaggtaaaataaatatttatttttaaggtattattgttatggtattgaagttttggaattatttgatttagttattgtaagtttttagttgtgttgtaatttattaaagagaatattgttattaaaggtatttgtaagaaaaatttagagatattatagtattttttttttttgttttaaatttttttttttttaatatttaaggttttgtgatgttttaaattttaattattattttaaaaagagaagtttaaagtattaaagaattataattagatgaaagtagttttggatttataaaattttgaaataataattttaattttgtttttaatatatatgtaaattttttgatattttttattttgtagaggtgtaggtttattttttttttgtgagtgtggtttggatttaatgatttatttttatttgatggagtgattgttggtgtagaataaaaaatttatcgtagtttttatttttgttttttttgtttttgggattatgaattttgggggaagttagttgttgtgttataagtagatttgtggaaaggtttatgtggttaggatcgaggtttttcgggattagataataaggaattgaggttttttttaatagttatgtgagtgagttattttttatgtaaatttttagtttagttgagtttttagatgatgtagttttggttgataattggattgtaattttgtgagaggttttgagttagaaatatttagggaaattttttttggatttttgagtattggaaattgtgggagatgataaatatttgttgttttgagttgttatatttttagtaatttgtaatgtaatagtaaaaaaaaatatagttttataagagaagatgaatagttgtattttaatttttatttgttttaaatttattagtgttattgttattattattattattgagatagggttttgttttgttatttaggttgtagtgttgtggtaggaggatagtttattgtagtttcgattttttaggtttatgtgatttttttattttagttgtttgagtagttgggagtatagatatgtattattatgtttggttaaaatttttgtatttttggtagagataagggttttgttatgttgtttaggttgatttcgaatttatgaaattaagttttttgtttgattttatttttaaaagtgttgggattataggtatgagttattattatatttaatttaaattaattataaaatattaaatatgttatttggttttaagaggtaagaggaatttttatggttaaataggatgtattttattattatttataattattgttttatttgaattttaatttttatttgtgttttaattaaatttaaaagaaagatttaagttttgttaggttgattttattattttttttatgatagacgtgtaattttggttatttatttgattttagttatttaattaataataatgtaagttttgttttgaagggatttttgtatatataattaaggttttaaattaattgattttaagatagggattatttttggtcgggttgtttttatttggcgagtttttgaaaggattgggttttttttgattagagagatttatagtgtgagagggatttagtgtgagggggtttttttaatgtggattttaaaaatgaaggggttgtgtggtaaagaatgttggtgggtattaggaattgagagtagtttttttttattttgatagtaggtaaggaataggaattttagttttataattggtagaaattgaattatgtcgtttttgtataagtttgaaggaggtttttaaaatgaaaatatagttttgggaaattttaaatagagaattttttaattatgtttagatttttgattaaggaattgtaaataaataaataagtgttgtttggttaagcgtggtagtttatgtttgtaattttgaggtttgtgggaatgatataggaggattatttgtagttaggagtgagattagtttgggtaatttgaggagatttttttttttataaaaaggaattttttttttttttaatttatttgagtacggtggtatttgtttgtagttttaggtattttagatattgaggtagggggatttttagaggttaggagtttgaggttgtagggaattatgattatgtaattgtattttatcgtggataatagagggagattatgtttttaaaaataaataaataaatataataaatgggtgttgtttaaagttagtgtttgtggtaatttgttatgtagttatataaaagttatatatagatttaatagatatatggaatgaatttataaattgataagtatattatatgagtaaaataaaatattttttttttttagtattttttattttataatattttatgatgcgattaaatttttatataattatattttatttaattagttaataaaaattaatttagtgtttatgttgaattaggtatgtttttatatgtttaagtgtttgatattttagaagttttataagatcgaagtggagttattggagtgttttaggtgaagaaacgatatattttgatttatagtagtaggattattgtggagagaatatttaggtggtaggtaatggaatagtgttagagttattatttaggagtgatagagtggtggggattaagggaagaggagggtttgagggatgagagggacggagggaagggttggagaagtaggaggtgaggagaaggagtagagggatagaatttgaaagtagtagaatttttagttttaaatatattgttttataaatttttaatatatttatttatagagtttagtagggtgttttttgtatttggtttttaatattttatgtgggattgtttaaaaattaattgttttttttgtttttttttaggtttaaaaaaatattaagtgttttaataaaatatgtatattatttagatgcggatattttttaaaaataggaagtgtatgagtattggtgaggggtattgtgattgcgttgaatatttgtaattttgaggtgaatgaatgtattggtttttggttgtaatatataattatacgttgtgttattttgtattgttaggagatgttttggatttttatagaaatttagggttatggaatgaaggtaattttagaatataataagagttatagatatatagtttgggaaagtaaaatttaggagttttgagagttgtataattgtaatgtatttagatatatttatatattaaggggttaaagtaatagtttttatatataagatttttgattggtcgggcgcggtggtttatgtttgtaatcgtagtattttgggaggtcgaggcgggaggattacgaggttaggagatcgagattattttggttaatacggtgaaattcgtttttataaaaaaattagtcgggcgtggtggcgggtatttgtagttttagttattcgggaggttgaagtagaagaatggcgtgaattcgggacgtagagtttgtagtgagtcgagatcgcgttattgtattttagtttgggcggtagagagagatttcgttttaaaaaaaaaaaaaaaaaaaaaaaaaaggtttttgataatttaggggttattaagattttattatttattgtagttaataaaaaaaaaaaaaaaagaaagaaagaaattggtttttgttttattttatatgtttaggtataatttttttagagaagaagaggaggggggcggggaggagtaggaggaggaggaaagaaggaggagaaggagaaggagaaggagaaggagaggaagaggaagaggaagaagaagaagaagaagaagaagaagaagaagaagaagaagaagaagaagaagaagaagaagaagaagaagaagaagaagaagaagaagaagaagaaaaggaagaagaagaaattgtttttatatttttatttttaggataagtttattgtttggtattaagttttttggggtgaatttttttttaaaagagttcggggagtttaggtatggaatgggaggtagaaagtttaattaagggattgggatttcggaatgaataatgaagggagatggattgggtttatgtcgaaggtttttttttggttttttagttttcgggcgaagatttagggagatattgagatatattttgtataggagggggagggggagggggagggtaaagttttagggttttaggagtggtttttaagggtttaggtttcgaggcggtgtttggggttgggaggtttagtattgagaattttttatttttttagagttttttttttttttttaattcgtgttaggtttttttttttggatatttataacgcggttttattttttatttttattgggcgtcgcgtttttagagaagttaattagtgtcgtcgtagtttttaggttttaaagttttacgtatttcgcgggatttatattttttttagacgcggaggttggggttatggcgtttcgaagtttttttttgttgtttttaggggttttggttttgatcgatatttgggcgggtgagtgcggggtttagagagaaacggtttttgtggggaggagtgaggggttcgttcggtgggggcgtaggatttagggagtcgcgttcggaggagggtttggcgggttttagttttttttcgtttttagg

SEQ ID NO: 894 - DNA, 5195 bp, Artificial Sequence
  chemically treated genomic DNA (Homo sapiens)
tttgggggcgaggaggggttgagattcgttagattttttttcgggcgcggttttttgagttttgcgtttttatcgggcgggttttttatttttttttatagaggtcgtttttttttggatttcgtatttattcgtttaagtatcggttagggttagggtttttgagagtagtaggaggaggtttcggggcgttatgattttaattttcgcgtttgggaaaaatatgagtttcgcggggtgcgtgggattttagaatttgggaattgcggcgatattgattggtttttttagaaacgcgacgtttaatgggagtgagaaatggggtcgcgttatgagtatttaggaagaaggatttgatacgggttgggagagaaagagaaattttggggagatggggaatttttaatattgagttttttaattttagatatcgtttcggggtttgagtttttgagagttatttttggggttttgggattttgtttttttttttttttttttttttttgtgtagggtgtgttttaatgtttttttgagttttcgttcgggggttgagaaattagggagaaattttcggtatggatttagtttatttttttttattatttatttcgaaattttagttttttgattgaattttttgttttttattttatatttggatttttcggatttttttggaagaaaatttattttaaggagtttggtgttagataatgaatttgttttgagaatgaaggtgtagagatagttttttttttttttttttttttttttttttttttttttttttttttttttttttttttttttttttttttttttttttttttttttttttttttttttttttttttttttttttttttttttttttttttttttttttttttttttttttttttttttttttttttttttttttttttgttttttttcgttttttttttttttttttttggaaaagttgtatttgagtatatgaaataggatagagattagttttttttttttttttttttttttttttattagttgtagtgagtagtagaattttggtaatttttgaattattaggaattttttttttttttttttttttttttttgagacggagtttttttttgtcgtttaggttggagtgtagtggcgcgatttcggtttattgtaagttttgcgtttcgggtttacgttatttttttgttttagtttttcgagtagttgagattatagatgttcgttattacgttcggttaatttttttgtagagacgggttttatcgtgttagttaggatggtttcgattttttgatttcgtgattttttcgtttcggttttttaaagtgttgcgattataggtatgagttatcgcgttcgattaattaggaattttatgtgtaaaaattgttattttggttttttgatatataaatgtgtttaaatgtattatagttgtataatttttagagtttttaagttttgtttttttagattatgtatttgtgatttttgttgtattttaaaattatttttattttatagttttgagtttttgtgggagtttaggatattttttgataatataaagtagtataacgtgtgattgtatattgtaattaggagttaatatatttatttattttaaagttgtaagtgtttaacgtagttataatgttttttattagtgtttatgtattttttgtttttaggaagtattcgtatttaagtggtgtgtatgttttattggaatatttagtatttttttaaatttgaaaaaaagtagaaaaagtaattaatttttaggtagttttatataaggtgttaaaggttaaatgtaaggaatattttgttaggttttgtagatggatgtattaaaaatttataaaataatgtgtttaaagttaagaattttgttgtttttaaattttgtttttttgttttttttttttattttttgtttttttagttttttttttcgttttttttattttttaggtttttttttttttttagtttttattattttgttatttttgaatagtggttttagtattgttttattatttgttatttgagtgttttttttatagtggttttgttattgtgagttaaagtgtgtcgtttttttatttaaaatattttagtggttttatttcggttttgtgaagtttttagaatgttaggtatttgagtatatgagggtatatttggtttagtataggtattaaattaatttttgttgattagttgaatgaaatatgattgtataaaaatttaatcgtattatggaatattataaaatgaaaaatattggaaaaaggaaatattttattttatttatgtagtgtgtttattaatttataaatttattttatgtgtttgttgagtttgtgtatgatttttgtatgattgtataataaattattataaatattggttttaaataatatttatttattgtatttatttatttatttttagagatatggtttttttttgttatttacggtgaagtgtagttgtatgattatggttttttgtaattttaaatttttggtttttagaggtttttttgttttagtgtttggagtatttgggattataggtaagtattatcgtgtttaggtaaattaaaaaaaaaaaaaatttttttttgtagagaggaaggtttttttaaattgtttaggttagttttatttttggttgtaagtaatttttttgtgttatttttataaattttaggattataggtatgagttattacgtttgattaaataatatttatttatttatttatagttttttagttagaaatttgagtatgattggagggttttttgtttagggttttttaaaattgtgtttttattttgagggttttttttaggtttatatagaggcgatataatttagtttttgttagttgtaggattaaggtttttgttttttgtttattgttaaggtagagagaggttgtttttaatttttggtgtttattagtattttttgttatatagtttttttatttttagaatttatattggaggaatttttttatattgaattttttttatattgtgaatttttttgattaggaagaatttagtttttttaggggttcgttagatgaggatagttcgattagggataatttttgttttaaagttaattgatttaggattttaattatatatgtaaaaatttttttaaggtaggatttatattattgttggttgaataattggggttaggtgaatgattaaggttatacgtttattatgggggggatgatagaattagtttagtaaggtttgggttttttttttgagtttaattgggatataggtggaaattgaagtttaaataaagtaataattgtgaatgataataaaatatattttatttagttatggaaattttttttattttttaaaattaaatgatatgtttaatattttataattaatttaggttgggtgtggtggtggtttatgtttgtaattttagtatttttggaggtggagttaggtagagagtttgattttatgagttcgagattagtttaggtagtatggtaaaatttttgtttttattaaaaatataaaaattttagttaggtatggtggtgtatgtttgtatttttagttatttagatagttgaggtgggaagattatatgagtttaggaggtcgaggttgtagtgagttgtttttttgttatagtattgtagtttgagtgatagagtaagattttgttttaataataatgatgataataataatattaataaatttagagtaaatgaaaattaaagtgtaattatttatttttttttgtgaagttgtatttttttttattgttatattataaattattgaaaatgtaatagtttaaagtaataaatatttattattttttatagtttttaatgtttaggaatttaggagaggtttttttgagtgtttttggtttagggttttttataaggttgtagtttagttgttagttagggttgtattatttgagggtttaattgggttggggatttgtatgaaaaatggtttatttatatggttattggaaaaggttttagttttttgttgtttggtttcgggaggtttcggttttagttatatggatttttttataggtttgtttatggtatagtagttggttttttttagagtttatgattttagagatagagagagtaaaggtagaagttacggtaagttttttgttttatattaatagttattttattagatagaagtgaattattaagtttaggttatatttatagggagggaatgaatttgtatttttgtaaagtggagagtattaaagaatttgtatatatgttaaaagtaaaattaaaattattgttttagaattttataaatttaaagttgtttttatttgattataattttttaatgttttaaatttttttttttaaagtaatgattaaaatttgagatattatagagttttgggtattgaggggaaaaaagtttgagatagagaaaggagatattatagtatttttaagttttttttgtaaatatttttaataataatattttttttaatgagttgtaatatagttgagaatttatagtaattagattaaatagttttaagattttagtgttataataatagtgttttaaaaataagtatttgttttgtttaagatgttttaaatttagtttaagaatgttttaaatgttaatttttttatttaaatattatttttaaaaatatttgttaaattagattgtttttaaggtagaaaaaatgtgaatttcgtattttagttaatatatttagtttagtatgatgttagtaattttggttggatatagtagtttaaaatgtttagttttaatttaggaataagattttttaaaaattggttattgggtgggtattttataataaatttgatatttttcgttttggtttttaatgagatgtggtagatatgatttggatattattatgattttaaatagtattgttattttgtatttttatagtattttttaagtaattttattgtgttttttatttttatttgttattttattattggttatttttatataatttttttttgtttaatttattttgattagtaatgtgtatttttaattttgtaaaagtttaatttaggtgtgtgtgtggtagaa

SEQ ID NO: 895 - DNA, 5208 bp, Artificial Sequence
  chemically treated genomic DNA (Homo sapiens)
aatagatgttggtaaggttgtagagaaataggaaggtttttatattgttggtggaaatgtaaattggtttaattattgtggaagatagtgtggtaattttttaaagatttagaattagaaatattatttgatttagtaattttattaaaggttatatatttaaaggaatataaattattttattataaaggtatatgtatgtgtatgtttattgtagtattatttataatagtaaagatatggaattaatttaaatgtttataaatgaggaattggataaagaaaatatagtatatatatattacggaatattatgtaattataaaaaggaatgagattaagttttttgtagagatacgaatgaagttggaagttattatttttagtaaatttatataggaatagaaaattaaatatcgtatgtttttatttataattgggaattgagtaatgagaatatatggaattagggagaggaaaaatatataatggggtttgttcggggagggtagtgatggggggattattaggaaaaatagttaatgaatgttagggttaatatttaggtgatgggttgataggtatagttaattattatggtatacgattatttatgtaataaatttgtatattttgtatacgtattttggaatttaaaattaaattaaattaaattaaattaaaagataagtttaaagtattaaagaaaaataattagataaaagaagtttttgatttataaaattttgaaataatagttttaattttgtttttaatatatacgtaagttttttagtatagtttttttttagaggtgtagtttaatttttttttttaagtgtggtttggatttaatgatgtatttttgatatggtttgtttttgtgtttttatttaaattttattttgaattgttatgcgaattttaatttttatatattggcggagggattttatgggaggtgatcgaattatggggatgatttttttaagttgtggaagttagcggttgaatttattttttttaatgttttttttagtattgtttttttataataggttttagtgtgtgatgtttttttttttgtgtttatgtgtttttattgtttagtttttagttataagtgagaatatgtggtgtttggttttttgtttttgtgttagtttgttgaggataatggtttttagttttatttatatttttgtaaaggatttgattttatttttttttatggttgtataatattttatggtgtatatgtattatataaggggattttttttattttattttgtattttttttttttgttattatgtgaagaatgatatgtttgtttttttttttgttatgattgtaagttttttggggtagtttttttagttatgtataattgtgagttaattaaattttttgtttttataaattatttagttttaggtatttttttatagtagtgtgagaatagattaatataatttttaattgatagagtaatgttgatataatagtttgtgattttgggtgtagaatgtgaaatttattatggtttttattttttttttttttgtttttgggattatgagtttttggggatttagttgttgtgttataagtagttttgtaggaaggtttatgtggttaagaattgaggttttttgggattagatagtaaggaattaggtttttttaatagttatgtgattaagttatgttttacgtgaatttttagttttagtgaagtttttagacgatgtagttttaggttgataattggattgtaattttgtgagaggttttgagttagaagtatttaggaaaatcgtttttggatttttgattattagaaattgtgggagatgatgaatatttgttgttttgagttgttaagttttatataatttgttatataatagtaaataattaatatatttttataagagaggatgtattattatatattaatttgtatttgttttaaatttattattattatattattatttttgagatagggttttgttttgttatttaggttggagtgtagtggtatgattattatgtattgtagtgtcgattttttgggtttaagggattttttgattttagttttttgagtagttgggattataggtatgaattaatatgtttggttaattttttaatttttttgtagagatgggggttttattatgttgtttaggttgattttgaatttttggagttaaatttgtttttttttgtttttaatagtgttaggattgtaggcgtgagttattatttttggtttaaattaattataagatattaaatatgtaatttagttttaaaaggaaaggagaatttttacggttgaagaggatgtattttattattatttataatgattattttatttgaattttaatttttaattgtgtttaaattaaatataaaaggaagatttagttttttttgggttgattttattatggtttttaataattagtttttggttatttatttttttttagttatttaattaattttaatgtaggtgttgttgtgaagggatttagtagatataattaagggttttaattagttgattttaggttgagtttattttgtttggattgttttaataaggagagtttttgaaaggattgggttttttttgagtatagagatttatagtgtgagagggatttagtataaggggttttttttattgtgggttttgaaaatgaaggggttgtgtaggaaaggacgttggtgggtattatgtattgagtgtagttttttttgttttttatagtgatagttagtgaggaatagggattttagttttataattgttagaaattgtattttgttatttttgtataagtttgaaggaggatttaaaatgaaaatataggtttaggaagatcggaatagagattttatttatattatgtttagatttttgattaagaaattataaagaataaatgagtgttatttggttaggcgtggtagtgtatatttgtattttaatatttgaggagttgatataggaggaatatttgtagttaggattttgagattagttaggataatatagtgagatattcgtttttatatttttttttaattagttgggtatggtggtatttgtttgtagttttagttattttgaagattgaggtaggagggttttttgagtttaggaatttgaggttgtagtgagttatgattatgtgattgtattttattttggatgatagagggagattttgtttttaaaaataaattaatgaatataataaatgggtgttgtttaaagttaatgtttgtgataatttgttatttagttttataaaatttatatatagatttaaaagatttttggaatgaattgatgaattgatacgtatattagttatataaaataaaattttttttaatttttttagtgttttatattttataattttttgtgatgtaatttaatatatttataatttatttatttagttaagaaaaaataatttagtttttataatgaattaggtatgtttttatatgtttaagtgtttgatattttagaagttttataagaatgaggtggagttattggagtgttttaggtggagaaatgatatattttgatttatagtagtaggattattatagagagaatatttatgtagtaggttatggaatagtgttagagttatagtttaggagtgagagggtggtggggattaaggggagaagagggtttgagggatgagagggacggagggaagggttggaggagtaggaggtgaggaaaaggagtagaggaaagaattttaaagtagtagaatttttaggtttaaatatattgttttatagattttaatatatttatttatagagtttcgttgggtgttttttgtagttggtttttaatattttatgtgggtttgtttagaaattaattgttttttatgttaattaggtttaaaaaatattaagtatttttaaaaaatatatattttatttatatgtggatattttttaaaaataggtagtgcgtgagtattagtgaggggtattgtgattgtattgaatatttataattgtgaggtgaataaagtttgtgttggtttttggttgtaatatatagtaatatagtgtggtattttgttttgaggagatgttttggatttatacggaaatttagggttacggaatgaaggtaaatttaaaataaaataagcgggagttatagatatattgtttgggaaagtgaaatttaagagttttgtgagttttgttgtaatgtttttagatgtatttatatattaataggttaaagttatattttttatcgattagatttttgattatttaggggttattaaggttatgttatttattatagttaataaataaaaagtaaattggtttttattttattttatgtatttaggtataatttttttagatttaagggggaaaaaaattttgtttttatatttataattttagggcgagtttattttttggtaataagttttttggggtgattttttttttagaagagtataggaggataggtaaggagtgggaggtagggagtttagtttagggatagggatttcgggatgaaaagtgaagggagagggttagggattttgtcgagggtttttttttggttttttagatagtttttgggttaagatttagggagatattgagatagaacgtttggtataagagtagcggggttagggcgaagttttagggttttaagcgtggtttttagggttttaggttttataggcggtgtatgggttggggaggtttcgcgttggggattttttttttttttttttaatttgtgtcgggtttttttttttggatatttatcgggcggttttagtttttatttttattaggtgataggtttttagagaagttaattagcgtcgtcgcggttttggttttaaagttttcgtttatttattcggatttattttttttagacgttaaggatggtggttatggcgtttcgaattttttttttgttgttttcgggggttttgattttgatcgagatttgggcgggtgagtgcggggttaggagggaaacggtttttgcgcggaggagggaggggtcggttcggcgggggcgtaggattcggtagtcgcgtcgggaggagggtcgggcgggttttaattttttttcgtttttagg

SEQ ID NO: 896 - DNA, 5208 bp, Artificial Sequence
  chemically treated genomic DNA (Homo sapiens)
tttgggggcgaggaggggttgagattcgttcgatttttttttcggcgcggttgtcgagttttgcgttttcgtcgggtcggtttttttttttttcgcgtaggggtcgttttttttttgatttcgtatttattcgtttaggtttcggttagggttagggttttcgagagtagtaggaagagggttcggggcgttatgattattatttttggcgtttggggagaatgagttcgggtgggtgagcgaggattttagaattaggatcgcggcgacgttgattggtttttttaaaaatttgttatttaatgggagtgagaattggggtcgttcggtgagtatttaggaagaaggattcgatataggttaggagaaggaggagagaatttttaacgcggggtttttttaatttatatatcgtttgtggggtttgagattttgagagttacgtttgaggttttgggatttcgttttgatttcgttatttttgtgttaagcgttttgttttagtgtttttttgagttttggtttaggagttgtttgagaaattagggagaaattttcggtaaggtttttggttttttttttttattttttatttcggaatttttgtttttgaattggattttttgttttttattttttgtttgtttttttgtatttttttagaagaaaaattattttagggagtttgttgttagagagtgagttcgttttgggattgtaggtgtaaagatagggttttttttttttttaaatttggaaaagttgtgtttgagtgtatgagatagaatagagattagtttgttttttgtttattaattatagtgggtagtataattttggtaatttttgaatgattaggaatttaatcggtaaaaaatgtgattttggtttgttggtatataaatgtatttaaaagtattataataggatttataaagtttttaagttttatttttttagatagtgtatttgtgattttcgtttgttttattttaaatttatttttatttcgtagttttaagttttcgtgtgagtttaggatatttttttaagataaagtattatattatgttattatatgttgtaattaggagttagtataaattttatttattttatagttgtaagtgtttagtgtagttataatgttttttattagtgtttacgtattgtttgtttttaggaagtatttatatgtgagtggagtgtatattttttaggaatatttagtattttttaaatttgattaatataaaaaataattagtttttaggtagatttatataagatattaaaggttaattgtaaagaatatttagcgaggttttgtagatggatgtattaaaatttataaaataatgtgtttaaatttaagagttttgttgttttggaatttttttttttgttttttttttttattttttgtttttttagttttttttttcgttttttttattttttaggtttttttttttttttaatttttattatttttttatttttgaattgtggttttagtattgttttatgatttgttatatgagtgttttttttatagtggttttgttattatgagttagagtgtgttatttttttatttaaaatattttagtggttttattttatttttgtgaagtttttagaatgttaggtatttgagtatatgagggtatatttggtttattgtagggattaaattatttttttttggttgaatgaatgaattatgagtgtattaaattgtattatagaaaattataaaatgtaaaatattaaaaaagttaaaaaagattttattttatgtaattagtgtgcgtattaatttattagtttattttaggagttttttgagtttgtgtatgaattttataagattgggtaataaattgttataaatattggttttaaatagtatttatttattgtatttattgatttatttttagagatagagtttttttttgttatttaggatgaagtgtagttatatgattatggtttattgtagttttaaatttttgggtttaagggatttttttattttagtttttagagtagttaggattgtaggtaagtgttattatgtttagttaattaaaaagaaatgtagagacgagtgttttattatattattttagttggttttaaagttttggttgtaagtgttttttttgtgttagttttttaaatgttaggatataggtgtgtattattacgtttggttaaataatatttatttgttttttatagttttttaattagaaatttgggtatgatgtggatggaatttttgtttcggtttttttaaatttgtgtttttattttgaatttttttttaggtttatatagaggtggtagaatgtagtttttggtagttgtaagattgaggtttttgttttttattggttgttattgtagagaatagggagggttgtatttaatgtatggtgtttattagcgtttttttttatatagtttttttatttttaaagtttatagtggaggaaattttttatgttgaattttttttatattgtgaatttttatgtttaggaagaatttagtttttttaaggattttttttattaggatagtttaagtaggataaatttagtttaaagttaattaattgaggtttttaattatatttgttaaatttttttatagtagtatttatattagagttggttgaataattgggggaaggtgaatgattaggagttggttgttgggagttatgatagaattagtttaggaagggttggattttttttttgtgtttaatttggatatagttggaaattgaagtttaagtaaagtgattattgtgaatagtaataaaatatattttttttagtcgtggaaatttttttttttttttaaaattaagttatatgtttaatattttatagttaatttagattaggggtggtggtttacgtttgtaattttagtattgttgaaggtagaggaaggtagatttgattttagaagtttaagattagtttgggtaatatggtgaaatttttatttttataaaaaaattagaaaattagttaggtatgttaatttatgtttatagttttagttatttaagaggttgagattagaggattttttgagtttaggaggtcgatattgtagtgtatggtgattatgttattgtattttagtttgggtgatagagtaagattttgttttaaaaatagtaatatgatgatgataaatttagagtaaatgtaaattaatgtgtaataatatatttttttttgtgaaaatgtattagttatttattattgtgtaataaattatgtaaaatttagtagtttaaaataataaatatttattattttttatagtttttaatggttaggaatttaggagcggtttttttgagtgtttttggtttagggttttttataaggttgtagtttagttgttagtttagggttgtatcgtttgagggttttattggggttagggatttacgtgaaatatggtttagttatatggttgttggaaaagtttagttttttgttgtttggttttagggggttttagtttttagttatatggatttttttgtagggttgtttatggtatagtagttgggtttttaagagtttatgattttagagatagagagagagaaggtggaagttatagtgagttttatattttatatttagagttataaattgttatgttaatattattttattagttagaagttgtattagtttgtttttatattgttataaagaaatatttgagattgggtaatttataaaggtaagaggtttagttgatttatagttgtgtatggttgaggaggttgttttaggaaatttataattatggtagaaggggaagtaaatatgttattttttatatggtggtaggagagaaaaatgtagagtgaagtggggaaaatttttttatatggtatatatatattatggaatattatgtagttataaaaaggaatgagattaagttttttgtagggatatggatgaagttggaagttattatttttagtaagttaatataggaataggaaattaaatattatatgtttttatttgtaattgggagttgagtaatgagaatatatggatatagggagaggaatattatatattggagtttattatgggagggtagtgttgaggggagtattaggaaaaataggtttaatcgttgatttttatagtttgggggaattatttttatgattcgattattttttatgaagttttttcgttaatatgtggggattagaattcgtatgataatttaaaatgagatttgggtgggaatatagagataggttatattagaagtgtattattaagtttaagttatatttaagagagggaattaagttgtatttttgaaagagagttgtattaaaggatttacgtatatgttaaaagtaaaattaaaattattgttttaggattttgtaaattaaagattttttttatttaattatttttttttaatgttttaagtttattttttaatttaatttaatttaatttaattttaagttttagggtacgtgtgtaggatgtgtaggtttgttatataggtaatcgtgtgttatggtggttggttgtatttattaatttattatttaggtgttaattttggtatttattagttattttttttaatgatttttttattattgtttttttcgaataggttttattgtgtgttttttttttttttggttttatgtatttttattgtttagtttttaattataagtgagaatatgcggtgtttggttttttgtttttgtgtgagtttgttgaggataatggtttttagttttattcgtatttttgtaaaggatttgattttatttttttttatggttgtataatatttcgtggtgtatatgtattatattttttttatttagttttttatttgtgggtatttgggttgattttatgtttttgttattgtgaatagtgttgtaatgaatatatatatgtatatatttttataatagaatgatttatatttttttgggtatataatttttaatgggattgttgggttaaatggtatttttggttttaaatttttgaggaattgttatattgttttttataatggttgaattaatttatatttttattaatagtgtaaaagtttttttatttttttgtaattttgttagtatttgtt

SEQ ID NO: 897 - DNA, 6237 bp, Artificial Sequence
  chemically treated genomic DNA (Homo sapiens)
  unsure 1048: n is a or g or c or t
gttattttgaggaataaatggttttattaagatataggtagatttggtttgattaattttagtaggataggtttgattagaagaggttagggtatgaattaatttttgttcgttggattgggagggagatgatttgaggaaattaaatttaataggtagatttaaggtggtaaattggtaggtattaggtataggaagagttaatagaaggtgataaagagtttagttaggttagtggggtaaggttatggggattaatagatagggattataataataattagtatttattgaggtttttattatgtgttgggtattgttagatggtttttttgtagtatttgtgattttgatataaaattgatgttttagtaaatttaatattttttaatgtttatattaattatttaaagtaaagattattattaatgtgattgtatagaatggaataaagtattgagaggttaagttttagattatacggttattaagtggtaaggttgtaagtgaagtttagagttgattttaaaggtcgtgattttttttattataggtatatataggtatatatatgtatatatagatatatatatgtatatatagatatatatatatatatatatgtatatatatatatatatataaatatatatattatgtttggatagattgcggtcggagagaagtttatttatttaagtagtagtttagtttttttgattttgttattttatttttggaggtttggagggtgatggttaggttttgggattattgtaagtttaggttattttttagtgatgtggagtaggaaagatttggttttttaaatattttttatataaaagttgaggaataaattatgggttaagaaaggaggagaggattgtgtggggtttagaatatgaagataataatttatatttatatttttttttttgaagttagtaggtattatgtttgtaagaatatttgaaattaagaggagaggggtttcgaagtttatagagtaattgttttgtatattattttatttagaatgtataangaaaaagtaatatagatagtagatatagttagtttaagtttttgaagagttatggttttgtaatatataaggtttagtatttattataattgatttgtgtttagtgtggatttgtgattttggttttgggataaaagtttgtattgatgatttaaatatggaggttttaaagataggtagaattaaaggatggtgaaatttattttttgttttagttattgtataagtttttgatttaggatttttttaaattttaaatttttataagttatattgttaaattataaaacgaattttttttgattttatttatttttaatatggtgaaatcgtttttggttgtgtttaattaggaaaagtgaagggatgagttgaaagtattaaaaatagtagttagtatgattagaaattttagttaatgcgatattttttaaagaaaagaggttatagttagggttttcgttgcgtagattaagtttaagttaattcggtttagttaggttttttttttttttgttaaatttttaatttttatggttattagtttttggggagttttcgtttttatttttaggatttttttgttcggtttagtagttttgggttagtttatttcgttatagttcggagtttttcggaaagtaaagattaaaggggaaagtcgtagttgtatatttatatttttattgttagaagggaattgattttcgtgtatttattttggtagttgtaatatataagggcggatttgcgttattcgagtaatttgtcggtggagataaagttgtataaatattgaaaggggaagtgttaggagttattatagagttttttttcggaagaaataaggatttttgtagtattttaaaatattaaggtcgtttttattttgagattaatttcgtaggtatattcgtttatttagtttcgagtttgagtttattaaaaaataggagatgatttgaatttcggcgagtttagggttttttgttgtttttttggttttgaagagtggggagtaaggagggcgggagtttgcgggtttagaattcggcgaggggtttgtaggggttaggtttgggtttggggaaggggtagagggggcggcgggggtcgttttaaagatttgtatttcgcgtttgttttcgggagttgggagtaaggttttggatggcgtcgacgcggttgcgaggaagttgaggtttgggagagtaaggggcgcgtaggcgaagttgtaatttgtattttagtcgcgggtttggcggagaaagggaggttcgcggcgtcgcgaggagtcggcgggtttcggggtttcgttttcgtcgtatttgtttagcgtttcgggttttgaatttcggtagatgcgagttgtgggtatttagggaattttgaggattcgtattttttcgggtttgtatttcgtgtttatttcggagcgtcgtaaattttggaaagggtgaaagttgataggggagttttattttttaagagagagggtgagggcgcgcggcgttgtttcgggtaaggagtaaatgtattttttttataatcgtgagtttgggtttaggttgaggtttaaatgtttgtagttaaattagaaacgtaattaaattggaagtggtattagaaagtagagggtttacggttttcgttacgtatatttttatcgaaggtttattagaatttttagttagcgttttaattgtttatgttgtatttgtcgtttttttgtttttattttgatatagaaaaattggttttaatacgtttttcgttttaggtatttttatttttagttaaatatatttatttatttttggaaatagtattttttttttggttgcgtggagtaggggaagaaaattttttagtaaaagagagatggagagcgagagcgggagagttggagggcgggaggagggagagagagagggagagggagagattttagtgttggttgattagaagtgattgatattttttaggagaaagttaaaagtttaaaaggatagtatttgtattaaggggttagagaaaatattagaaattaattttataagtttaaattttgaattcgagataggtatggtaagtttatttgtttttttgggtttatttggtgaggagttttcgtgttgaagggaaataaaaatgttatagaatttttgttaggagatgtttattagggtaatcgaaaataaaagttttcgtggttttattattcgtattattttattttttttttgaaaatgtgtaagaatagtttatttgggtggtttgtggtttgtttgggagaggggtggggaaatttattttgattataatttaaagagaagaaatttttaaaatagatatgtcgatgttgtagaaaatttttattattattattttgcgttttaaagatttaaggtacgaatggaagacgttgattattacgtagttttttttgtaattaggtttaaggggtttttggggaagttgttatagaattgaaagtagtattgaattttacggaaatttgtttttgtgggtatttgtaaaataacgaattttacgtgattcggagatgtggtggaggggtgaggttaatattttttataattttttgtaaaggatggaagcgcgtgtcgttttttcgggtttcgggaggtagtttgttttgtagtttttgaggtttcggggaaaggtttggttgcgtttaagagagacgtttggagttattcgttttattttgtttgaaaagttattcgtttaagttgttattgtgtgatagtttagaataaaattaatttgcggtcgtttttttttttcgtttttcggaggattttttgggaggtacgaggcggacgcggtgttgagttgggtcgggatttagggcggtaatatttgggtaagggtttaggaaagatgaggggttttgtcgaggatacggatttttggaataaaagtagaatgaggttaagagaagggaagtaaaggggttaaagcgcgtttcgttttttatcgggaggcgggttttgtagagttttaaagagtgagattatcgttttttttttacgtttttaattcgtttcgggtgataagcgttttaggaaagtttttgtgattaattttttttgtttcgtggcggttcggagttgtagaagttagaagagagttagagtttttcggagcggttgtttggtttttacgtagagtagtaagaagtattgcgatgtgcgttattaagtttacgcggtcgtagtaaaaattttggcgtggtcggggcgtggttagggttcggttaggttttttcgtttttaatttttttttatttttcgtttttattggttacgaggatgattaatgagcgttcggatcgaggttttatttcgggtttgattcgaaagtttttgttaaaattttgggagtttttagaggcgagttttttttttttttattattttttttttttttaattaacggattattattgttgttgttttaaatttagtttttagggtttagttatttgggtttttttgcggtgttcggttttcgtttttttggttttttcgttcgttttgcggttttagcgtttttcgtttttttttagttcgcgaggagtgcgggcgtcgcgtcgtttttaaagcgaggttagggagcgaggcggtgatcggtcgagattcggttttcgttttttttttcggtggcgttagggttttcggttttttttttttagtgcgggcggagaagcgaaagcggatcgttttcggttgtcgtcgtttttttcgggattcgcgcgttttttttcgcgcgtttatttatttagttcggttggattgcggtagtcgcgcggtttatttcggtaggatgttcgtagtcgggttggtttttttttacgtttttaattttagtttttggtcggtcgtttattgtttttcggtcggtttaggcggttgttttttttttttggatttcgtcgtcgttaaaaagttttttttttgtatcgtagatattttgtacgtcggcgtgggggatttgggggcggtttcggagggtttggtaggggtttcggtcgtcgtttttatcgcgtatttgggttcggtttattcgtacgtttttttttaagcggcggttagattttcgtttcgatttattttagtggtggcgtttttcgaagtttcggttggtttttcgtagcggttgttttcgtttttagtcgtttattattattattattcgtaataataatagtagtagtaatagtcgtagtagtaatagttttcgttttcgtttcgggttggcgttttgtagttttcggtttcggggacgcgagtggtttcgaatttttattatagtggttttgtttcggttttttttagtaaagattttaaatttggaattgatcgtattttatttgtagaatttgatttaaaagttaaagaaggtaatacgttgagaggtaggttttgggcgggaggttgtaggtttttgattattgatttatttttcggatttcgggttggtttggggtgtttttgagtgtttttataattaaggataaatcggtaaaacgggagagaagaaaacgaattgtaagaaaattataaaatattaggtttaaaatttatttgttttatgtaaaataaataaaaaatgattttagggattttttaaaaatacgttttagaattaatatttataaaagtggttggtgtaattatttgttaatatgattttgatttttttaataatgtatttagagatagaattatattttttgatagttaaagtatttttgggaaatattttcgtatttatttgatttttagtaaaaattttatttaggaaatgtaaataataaataaaatcgtttagatgagcgggtagagtggggttattttggggcggaggttttgcgtttgtggcgtttttggaagatacgtgaaagtgaggtcgtaagtcgatttatgtaaagtttttatttattatatatatgtatatggacgtgagggatatataggaatttttcgtgcgtcgttttttggtaattgttgggagagagaggttttagcgtttagacgggtttttttttgatttcgtttaataaaagtgaatttagggtaaggggaaggggaggaataaattagcggagagtgtgagtgtgttcgagatgtaatttgttattttttttttttgtttttaga

SEQ ID NO: 898 - DNA, 6237 bp, Artificial Sequence
  chemically treated genomic DNA (Homo sapiens)
  unsure 5190: n is a or g or c or t
tttggggataagggaaaaggatagtaggttatatttcgggtatatttatatttttcgttgatttgtttttttttttttttttgttttggatttatttttattgagcgaagttaagagagaattcgtttaggcgttgaaattttttttttttaatagttgttaaggagcgacgtacgaaaagtttttgtgtgttttttacgtttatatgtatgtatatagtaagtaaaggttttatataaatcggtttacggttttatttttacgtgttttttaagaacgttatagacgtaaaattttcgttttaaggtggttttattttgttcgtttatttaggcggttttgtttattatttatattttttgggtgaaatttttattagaaattagataagtgcgaaagtgttttttaaaaatgttttagttgttagaaaatataattttgtttttagatatattattaaagagattaaagttatgttagtagataattatattaattatttttataaatattgattttaagacgtgtttttaaagaatttttggagttattttttgtttgttttatatagaataggtgagttttagatttaatgttttgtagtttttttataattcgtttttttttttttcgttttatcgatttgtttttaattgtaaaaatatttaaaggtattttaagttagttcggggttcggggagtgggttagtggttagaggtttgtagtttttcgtttaagatttattttttagcgtgttgttttttttgatttttgggttaaattttgtagataaaatgcggttaattttaaatttgaggtttttgttggagggggtcggggtagagttattgtggtgggggttcggaattattcgcgttttcgaggtcgggggttgtagggcgttagttcggggcggaggcggaggttgttgttgttgcggttgttgttgttgttgttgttgttgcgggtgatggtggtggtaggcggttgagagcggagatagtcgttgcgggaagttagtcgggatttcggagggcgttattattggggtgggtcgaagcggggatttggtcgtcgtttggaaagaggcgtgcgggtgaatcgagtttaagtgcgcggtgagggcggcggtcgaggtttttgttaggtttttcggggtcgtttttagattttttacgtcggcgtgtagaatgtttgcgatgtagaaggagggttttttgacggcggcggggtttaaggggaaggagtagtcgtttgggtcggtcgaggagtagtaagcggtcgattagaggttgaagttggaggcgtagaagggagttagttcggttgcgaatattttgtcggggtgagtcgcgcggttgtcgtagtttagtcggattgggtgggtgggcgcgcggggaggggcgcgcgagtttcggagaaggcggcggtagtcgaggacgattcgttttcgttttttcgttcgtattgaggaagagaggtcgggagttttagcgttatcgagggaggaggcgagggtcggatttcggtcggttatcgtttcgttttttggtttcgttttaaaggcggcgcggcgttcgtatttttcgcgggttggaggagagcgaggggcgttggggtcgtagggcgggcgggggagttagggagacgggagtcggatatcgtaagaaaatttaaatagttaagttttaagagttaaatttaaaataataataataatagttcgttagttagggggggggaaagtaatagaaaaaaaaaaaattcgtttttaaaaatttttaaagttttggtaggagttttcgagttaggttcggggtaggatttcgattcgagcgtttattggttattttcgtgattaatgggagcggggagtggaggggaattaggaacgagggggtttggtcggattttagttacgtttcggttacgttaaagtttttgttgcggtcgcgtgggtttagtagcgtatatcgtagtgttttttgttattttgcgtaggggttaggtagtcgtttcggagggttttgatttttttttaatttttgtagtttcgaatcgttacggggtaaggagggttgattataggagtttttttgaagcgtttgttattcggggcgagttgggggcgtggggaagggacggtaattttattttttagggttttgtaaagttcgtttttcggtggagagcggagcgcgttttggtttttttgtttttttttttttgattttattttgtttttattttaggagttcgtgttttcggtaaagttttttattttttttgggtttttgtttaaatgttgtcgttttgagtttcggtttaatttagtatcgcgttcgtttcgtgttttttaggagatttttcgggaagcgaggaggaggggcggtcgtaaattggttttattttgagttgttatatagtgataatttgaacgagtgattttttaaataaaataagacggatggttttaaacgttttttttagacgtagttaaattttttttcggagttttagaggttataaaataggttgtttttcgaaattcgggagagcggtacgcgtttttattttttgtaggaggttgtaggaaatgttagttttatttttttattatattttcggattacgtggggttcgttgttttgtaagtgtttataagagtagattttcgtggggtttaatattgtttttaattttgtgatagtttttttaggaattttttgggtttggttgtaggaggagttgcgtggtggttaacgttttttattcgtgttttgggtttttagaacgtagggtagtggtggtggaggttttttgtaatatcgatatatttattttaagaattttttttttttaaattatagttagaatgaatttttttattttttttttaaataaattataggttatttagatgagttgtttttgtatatttttaggaagaaaataaaataatacgaataatgaaattacgaaaatttttgttttcgattgttttaataagtattttttaatagggattttgtgatatttttatttttttttagtacgaaggttttttattaaataaatttagaaaagtaagtgaatttgttatgtttatttcgagtttagggtttgggtttataaaattaatttttggtgttttttttagttttttgatgtagatgttatttttttaagtttttgatttttttttggaaaatattaattatttttgattagttagtattaagattttttttttttttttttttttttttttttttcgttttttagttttttcgttttcgttttttattttttttttattgaaaggttttttttttttgttttacgtaattaggagagaggtgttatttttagagatagatgggtgtgtttggttgaaggtaggggtatttggggcgagagacgtattaagattagtttttttgtgttaaggtgaaggtaaaggagcgataagtataatatgggtaattgaggcgttggttgagggttttggtgagttttcggtgggagtgtgcgtagcggaggtcgtgagttttttgttttttagtgttatttttagtttgattgcgtttttaatttgattgtaaatatttagattttagtttaagtttaaatttacggttgtgaaagaggtgtatttattttttattcgaggtagcgtcgcgcgtttttatttttttttttaagaaataagatttttttattagtttttattttttttaaggtttgcgacgtttcggggtgggtacgggatatagattcgggggaatgcgagtttttagggttttttaggtgtttataattcgtatttgtcgagatttaaggttcggagcgttgggtagatgcggcgaaagcgaggtttcgaggttcgtcgatttttcgcggcgtcgcgagttttttttttttcgttaggttcgcggttggagtgtaagttgtaatttcgtttgcgcgttttttgtttttttaggttttagttttttcgtaatcgcgtcggcgttatttaaggttttatttttagttttcggaggtaaacgcgaaatataagtttttggagcgattttcgtcgttttttttattttttttttaggtttaagtttggtttttgtaggtttttcgtcgagttttgagttcgtagattttcgttttttttattttttattttttagaattaagaaagtagtaggaaattttgggttcgtcggagtttaggttattttttgttttttgatgggtttaaattcgggattaaatgagcggatgtgtttgcgagattggttttaaaatagaagcggttttagtattttaggatattgtagaaatttttatttttttcggagaaaaattttataatgatttttagtatttttttttttaatatttgtgtaattttatttttatcggtaagttgttcgggtgacgtaaattcgtttttatgtattataattattaaaataaatgtacggaaattaatttttttttagtaatgaaaatataaatatatagttgcgatttttttttttaatttttgtttttcgagaggtttcgggttgtggcgaaatgaattggtttagagttattgagtcgggtagggaggttttgggggtagaggcgagggttttttaggggttggtagttatgggggttgagaatttaataagaaagaaaagggtttggttaaatcgaattaatttgagtttggtttacgtagcggagattttaattgtggttttttttttttggaaaatatcgtattggttggggtttttgattatgttgattgttgtttttaatgtttttaatttatttttttattttttttagttaaatatagttaaagacgattttattatattgggaatggataagattagagaaggttcgttttataatttaataatatagtttatggggatttagggtttaaaagggttttgaattaggggtttatgtaatgattgaggtaagagatgggttttattattttttggttttatttgtttttggagtttttatatttaaattattagtgtagatttttgttttaaaattagagttatagatttatattgagtataggttaattatagtgaatgttgggttttgtatattataggattataattttttaaggatttgaattggttatatttgttatttgtgttgtttttttnttgtgtattttgggtaaaataatgtgtaaggtagttgttttgtggatttcggaatttttttttttttaattttaaatatttttgtaaatatggtatttattggttttaagaaaagagatgtaaatataaattattatttttatattttgagttttatatagtttttttttttttttttggtttataatttattttttagtttttgtgtaaaagatatttggagaattagattttttttgttttatattattaaggagtggtttgagtttgtaatagttttaaagtttaattattattttttaggtttttagaggtgaagtgatagagttagggaagttgggttgttatttggatgagtgaattttttttcggtcgtagtttatttaggtataatgtgtatatttgtgtatgtgtatgtgtgtgtatgtgtgtgtatgtgtgtgtttgtgtgtgtatgtgtgtgtttgtgtgtgtatgtgtgtgtttgtgtgtgtttgtggtgaggaagattacggtttttggagttaattttggattttatttatagttttattatttagtagtcgtgtggtttgggatttaattttttaatgttttgttttattttgtataattatattaataataatttttattttgaatgattgatatgagtattaaagggtgttaaatttgttagagtattagttttatgttagagttatagatattgtaaagaaattatttaatagtgtttagtatatagtgggggttttaataaatgttggttattattgtgatttttgtttgttaatttttatagttttgttttattggtttggttagattttttgttattttttgttggttttttttatgtttggtatttgttagtttattattttaaatttatttattggatttaatttttttaaattattttttttttagtttagcgggtaaagattggtttatgttttggttttttttggttagatttattttgttagagttaattaggttaggtttgtttgtgttttaatgaaattatttgttttttaaaatgat

SEQ ID NO: 899 - DNA, 8042 bp, Artificial Sequence
  chemically treated genomic DNA (Homo sapiens)
  unsure 2590, 3253: n is a or g or c or t
tatagatgaggaggttgaagtttggcgtttattgtgtgtattattatttttagtaatgaaagaatttaagaaaaagattaagtattttttaaagggggaagcgtaaatgttattgatttattatttttttgatttgtttttgagttgtttaatgatcgttttatggatagaaagataagtttgttgttttggtaatttattattaaattaaaaaatgattgtaattaaaattttttttttagagtgtagtatttttttttgtttcgtttaattgattatagtttaagaatgttgtttgtatttgtaatattaaaaataatcgtaagttttagaaatttaatttaaatttttttgtgtattttagtttaatattttttttttgtttatttattatgtttgattgtattaatagatgatttagataatgtttacgtatatatgtatttaaagtttgttttattttttaagtaagtagtgttttgtattatgttttatttagttttggtttttgtaatatttgtttagcgtgttgaatggtgtatttattgatagtttttattggttgtttgtatttatagtggttaattttttggttagtttatatttttgaagttaggagttaaataaattgtttataaataagtttttattaaggtttaatttggttgtatgttttggttagattattttttttgtttattaaattttagttagattgaatttgtaattttttttaacggtaatatgatttttagttttaggtttttgtttatagaaatgttttttgaggtagttggagtagagagaggagaaggggatggagttagtaggtaaatgatttttagagaaaaggaagaaaaggaagtttgaggtgttgattttaaagttcgtgataaaaaggaaaaagtttttttttatattttttatatataaagatttacgatttaaaaatggtattttatgaaaggtggttagtgtagtttatagtttagttgtgtatatgtttttttttgtagtttgttttatgtgtattttttattaattagtattagtatgtatttaaatgggaatttatattagtatgatatatagtaattttttcgtatttgtgggaggattggttttaggatttttaaggatattaaaatttgaggacgtttaagttttttatataaaacggtgttatatttgtatgttatttatatatatttttttatatattttaaattatttttaggttatttataatataatgtttgtaaattatttcgtttttatggatttagtgtagtatttggtatgtagtaaatttatgtttggtttttagaattttgtggatttttttttttttttgagtatttttgatttattgttggttgattttacgaatatagaatttatggaaatgggggttgattgtggatttaaaagttgaggtttagtaaaattaatttttattattttattaagaatattttggtttttttttgtgttttttttttttgagatggagttttgttttgttatttaggtcggagagtagtggtataattttggtttattgtaattttcgtttttcgggtttaagtaatttttttgttttagtttttcgagtagttgggattataggcgtacgttattacgtttggttaatttttgtatttttagtagagacggggttttattatgttggttaggttggtttcgaatttttgattttaggtgatttatttatttcgggtttttaaagtgttgggattataggcgtgagttattgtatttagtttattaagaatattaagtgaaatttgtttttggtttttttttttttttttttttttttttttttttttttgagagagagttttattttgttgtttaggttggagtagtgtagtggcgcgattttagtttattgtaattttcgttttcgggtttaaatgatttttttgttttcgttattgagtagttgggattataggtacgcgttattatatttagttaaattttgtatttttagtagagatttgattttattatgttgattaggttggtattaaatttttgatttcgtgattcgtttattttagttttttaaagtgttgggattataggcgtgagttattgtgttcgggtttttttgtttgtttgtttgtttgtttggtggagtttcgttttgttatttaggttgtagtgtagtggtataattttggtttattgtaatttttaattttttggtttaagcgatttttttgttttagttttttaagtggttgggattataggcgttcgttattacgtttagttaatttttgtatattttagtagagacggggttttattatattggttaagatggtttggattttttgattttgtgattttttcgtttcggttttttaaagtgttgggattataggcgtgagttatcgcgttcggttatgttttgtttttatgagttgggtggttttgaatattttattttttttgagttttattttttttatttgaaattagaattattaataatattttatatatgggttatagttagagtgataataagtaattattaaaagtattgaggttnttggttgatatgtgtgaaattttatttttattcggaatataaaaaattagttaggcgtggtggcgggtgtttgtagttttagttattcgggaggttgaggtagtatggcgtgaatttaggaggcggggtttgtagtgaggcgagagcgagattttgttttaaaaaaaaaaaagtattgagtatgggttttagtatatgggaagttttttataatgtaggtgttattattatttttattattgtttttattttatttggattattattaagtatttgtagttttatgggaatttaatattaggttattttaattttagtttatttgaagattttataagtttttattattgaatttgcgtttgtagttaaagaaataaattgatattttatggtcggtagtgatggtttatatttgtaagtttagtattttgggatgttaaggcgggaggattatttgaagttaggagtttaagattagtttggttaaaatggtgaaatttatttttattaaaaaatataaaaattagttaggtacggtggcgggtatttgtagttttagttatttgggaggttgaggtaggagaatgattggaatttaggaggtagaggttgtagtgagttattgtattttagtttgggcgatagagtgaaattttattttanaagaaaaaaaaaaaaaaaggaagaaatttatattatataatttaaagtagaagtaatatagtttagaagttttttgtatggaagaatttataagattaaaatattaaagggagaaaatattttataggatgatatttaatcgtattgataagtagagaaataatgtgtgtaatggtgtttcgttataaggtagggttttatgtttttttaggttttgttattttaagtttaattttataaaaatgggggttttaaaaatattatatatttagtgggggaggttttgcgtgtgtggagatagagtgtataggatcgttcgtattttttgtttaattttgttgtgaatttaaaattgttttaaaaaataaagtttattaaaaaaaaaaaattacggttaggcgtagtggtttacgtttgtaattatagtattttgggagatcgaggcgggtggattataaggttaggagttcgagattagtttggttaatatagtgaaatttcgtttttattaaaaatataaaaaattagttgggcgtggtggcgtacgtttgtagttttagatatttaggaggttgaggtagaagaattgtttgaatttgggaggcggaggttgtagtgagttgagattgttttatcgttttttagtttgggtgatagagtgagattttgttttaaaaaaaaaaaattatattttaaggttttaaggatataaaataagttagagattttatttagttttttgtttgttttagggatttgtaattaatttttttattgattagttttttgggttgtttagaatagatagtttatggggtattaattttatgttttattttaaggtatttttttttatgtagagcgatatagaaaaataaatttgtagtataaagtatattcgatttgttatagtttataattagttttatgaattttttttttattaatttaaagtttgtaaaaaaaagaaattatatatttaaattatttgagtatagaagtatattaaaatttaatataaataaataaaaaatttaatttattttaatatgttattgaaattgggtttaagtttttaaatatgttatgaaatattatattttgtagtaggttttttttttttttttaattggagatgaatggtagagttttgatatgaaaaagtattttatgtttgtatagaaaggtagtataggaaaagtggttaaatttaattagtttgtttttattaaataggtaattattgtttttttagtatttttaaaagaaattatatgtttgttattgtttatgttatatgtttgttaattttttatgttaatttttagtgtttttggaaaattttattgtttggtattaaaaattattattgttattgttgttgttttgttaattatgttagttaagtagatgacggtgaattaattttgtaacgttgagtatttagttggtatataagtatttagttttttaaagggatgttttttatgttttattgattttcgaatgatagttagtttgtttaaatttattttttatatttaagatatttggtgggtttttgtatgtttaggggatttttattatttgtttatgtaaatagtaggttgtataagagttttgttggtttttttttttttttttttagagatttcgtagttttttgataattatttagttatttattttaatattttgatatgatataaaggtaggtacggaattatacgtttattatatagatatacgttattttgttggagtatttattaggcgaggcgttttatcggatttattagttgtatttatgaatcggtattatttgtaggattattttttggaaatagataagaagaattgttgtgtgtttcgagatgattttattgttaaggtgttgtcgtcggtgttggggttggagtttatttttgggtttttgggtaatggttttgttttgtggattttttgtttttattttaagttttggaaatttagtcggatttttttgtttaatttggtagtagttgattttttattgattatttgtttgtcgttcgtgatggattattatgtgcggcgtttagattggaagtttggggatattttttgtcggttggtgttttttatgtttgttatgaatcgttagggtagtattatattttttacggtggtggcggtagataggtattttcgggtggtttatttttattacgttttgaataagatttttaattggatagtagttattattttttgttttttgtggggtattattgttggtttaatagtttattttttgaagaagaagttgttgatttagaatggtattgtaaatgtgtgtattagttttagtatttgttatatttttcggtggtacgaagttatgttttttttggagttttttttgtttttgggtattattttgttttgtttagttagaattatttggagtttgcggtagagataaatggatcggtatgttaagattaagagagttattatttttattatggtggtggttatcgtttttgttatttgttttttttttagcgtggttgtgcggatttatattttttggtttttgtatatttcgggtacgtagaattgtgaagtgtatcgttcggtggatttggcgttttttattatttttagttttatttatatgaatagtatgttggatttcgtggtgtattatttttttagtttatttttttttaattttttttttattttgattaatcgttgtttttagaggaagataataggtgagttagataataatcgtagtacgagcgtcgagtttataggggattttaataaaattagaggcgttttagaggcgttaatcgttaatttcggtgagttatggagttttttttatttgggtttaattttaaataattattttaagaagggatattgttattaagaattagtatttttggagaaatagttgggttgttgtatcgagtaatgttattggattcggtttaagattttttggaatttttagatttagagaatttgatttagggaaattgtggtagatgagtgggagattggttgtaaggtgtgatcgtaggaattttggaggaatagagagtaaagtttttaggtatttgaaatttgttttatttttgacgttcgtaggattgaagatgggtaaattgtaggcgtttttgttgagtagagttggagttagagatttatttgtgatttgttggttttttttttatatttgttttagattggagggggtttagtttttggggtgatatttagtttgtttgtgagttttagtagggataaggagagttgagattggagggaattgtgttgtttttggaggaagtttaggtattattaaataagttagtaggttatttggttttcgtggattaatttattttttagataatttttagtagaaatggatttagggaagagatttatatgttttggttagtatttgtgttttcggtgggtgtaataggggattagttttagaagggattgagttaaatagtgttattatgggaaaggaaatggtattgttgtttttaattagcgattaatgtaatttattttttttttgtttatagtaatttaagggttgaatagttaaaacggttttaggatagaaagttgttttttatttgtttgtttttattattaaaagggaaacgtgtttttgttttacgggtagaggggtgtacgttttttttggttttttcgtttgtgtttttgtatttattaaaaatttattattttaataaattttgataggagatagtttggcgttgttatatttgggttatggtttatagaaatggattttttatttaagtagagatttttatgggttgttaattttgttttggtagaaaattattttatattgtaaagtaagaaagagatatagatattgagttatattatgaaataattaagtagaaattatatttgtgtttaaataaagatagaaagagttgggattaaaaataatttggaaggatagtatagataggattgtaagagtatttatattttattagagtttggtgaatattgttttttatatttgtgtattaaaaagggaattaaggttaggtgtaatggtttatgtttgtaattttagtattttgggggagttaaggcgggtagattatttgaagtaaggagtttgagattagtttggataaaatggtgaaattttatttttattaaaaatataagaaaaattagttaggtatggtggcggtcgtttgtagttttagttattgggaaggttgggagaagaagaattgtttgaattcgggaggcggaggttgtagtgagtcgaggtggtgtgtttgtattttagtttgggggatagagtaagattttattttaaataataataataaataatataaaaagggaattaagttaggtagatatttttttataggagggggaagagcgagttttttatggaatggttttagtttttaattcggagaaggaaaggagatgtattggtttgagtttgtgattagtttaagtttttgttacgtttttatttttaattttgttagtttttgattatttggtaagacgaggtttgttttaattttttgatatgaatatagataaggaatttagagataggtttttagttttgggtgaatgatagtaaatgaagaaaggtggatgttttggaattatttttgtgtttttagagtagttggtttgtttgtattattaagtaatgtataggtaaaaagttaaaagtaaggattattttaaagag

SEQ ID NO: 900 - DNA, 8042 bp, Artificial Sequence
  chemically treated genomic DNA (Homo sapiens)
  unsure 4790, 5453: n is a or g or c or t
ttttttaaggtgatttttgtttttggttttttatttgtatattgtttggtgatatagataagttaattgttttgaaagtatagaggtaattttagagtatttatttttttttatttattgttatttatttagagttgggagtttgtttttaaattttttatttgtgtttatgttaggaggttgaagtaagtttcgttttgttaaataattaaggattgatagagttagaaatgaaagcgtaatagaaatttggattgattatagatttaaattagtatatttttttttttttttcgaattgggaattgaaattattttataggaagttcgttttttttttttttatggaaaaatatttgtttggtttgattttttttttatattatttattattattatttgagatgaagttttgttttgttttttaggttggagtgtaggtatattatttcggtttattgtaattttcgtttttcgggtttaagtaatttttttttttttagtttttttagtagttgggattataagcggtcgttattatgtttggttaattttttttgtatttttagtagaagtggggttttattattttgtttaggttggttttaaattttttattttaggtgatttgttcgttttggtttttttaaagtgttgggattataggtatgaattattgtatttggttttgattttttttttaatgtataaatatgaagagtaatatttattaaattttaataaaatgtaagtgtttttgtaattttatttgtattatttttttaaattatttttaattttagttttttttatttttgtttagatataggtgtaatttttgtttagttgttttatgatgtagtttagtgtttgtgttttttttttattttgtagtgtggagtagttttttattaggataaagttaataatttataaaggtttttgtttaagtaagaagtttatttttgtgaattataatttagatatagtaacgttagattgttttttattaaaatttattgaaatggtagatttttggtaagtatagaaatataagcgaaggaattaggaggaacgtgtatttttttattcgtggggtagaggtacgttttttttttaatggtaaaagtaaataggtgggaaatagttttttattttgaagtcgttttaattgtttaatttttagattattataaataagagaggaatggattgtattagtcgttggttgaaagtagtaatgttatttttttttttataataatattgtttagtttagttttttttggggttaattttttattatatttatcggaaatatagatattaattaaagtatgtgagttttttttttgagtttatttttgttaaagattgtttgaaagatgaattggtttacggaagttaggtgatttattggtttgtttaatgatgtttgggttttttttaggaataatataattttttttaattttagttttttttatttttgttagagtttataagtaggttagatattattttaggagttgagttttttttagtttgaggtagatgtgggaagaaggttaataagttataagtagatttttggttttaattttgtttagtagaaacgtttataatttgtttatttttagttttgcgagcgttagagatgaagtaagttttagatgtttagaagttttattttttgtttttttaggatttttgcggttatattttgtaattagttttttatttatttgttatagtttttttaaattagattttttgaatttggaagttttaggaaattttaggtcgagtttagtgatattattcgatgtaatagtttaattgtttttttagagatgttggtttttggtgataatgtttttttttggaatggttatttgaggttgggtttagataagaggggttttatggtttatcggagttggcgattaacgtttttggagcgtttttggttttgttggggttttttgtgagttcgacgttcgtgttgcggttattatttggtttatttgttatttttttttggaggtagcggttgattaaagtggagaagaagttgggaaaggatgggttggagaagtagtatattacggggtttagtatgttgtttatgtaggtgaagttgagagtgataaagaacgttaggtttatcgagcggtatattttataattttgcgtgttcgaagtgtgtaggagttagaagatgtggattcgtataattacgttgggaaggaagtagatgataaagacgatggttattattatgatgaaggtgatggtttttttgattttggtatgtcggtttatttgtttttgtcgtaggttttagataattttggttgagtagaataggatgatgtttaggggtaggaagaattttaggaggaatatagtttcgtgttatcggaaggtatggtagatgttgaagttgatgtatatatttgtagtgttattttggattagtaattttttttttaggaggtggattgttaggttaatagtgatgttttatagaaggtaagagatgatggttgttgtttaattggagattttgtttagggcgtggtggggatggattattcggaaatatttgtttatcgttattatcgtgaggaatatgatgttgttttggcggtttatggtaaatatgaagagtattagtcggtaagggatgtttttaaatttttagtttgaacgtcgtatatagtagtttattacgaacggtaggtagatgattagtagaaagttagttattgttaggttgaataggaaaattcggttggatttttaggatttgaggtggaaatagaaaatttatagggtaaggttattgtttagaagtttaaagataaattttagttttaatatcggcggtaatattttggtaatgaagttatttcggaatatatagtagttttttttgtttatttttagaaagtgattttgtagatggtgtcgatttatgagtgtagttagtgagttcgatggagcgtttcgtttagtgaatgttttagtaaagtggcgtgtgtttgtatggtgaacgtgtggtttcgtgtttgtttttatgttatgttagggtgttgaaatagatgattgaatggttattaggaaattacgaaatttttaaaaaaaaaaaaaaaaaagttagtaaggtttttatgtaatttgttgtttgtataaataaataataaaaattttttgggtatataggaatttattaaatgttttaaatgtaaaggataagtttaggtaagttgattgttattcgaaaattagtgaaatatgaaggatatttttttggaaggttgggtgtttgtatgttaattgagtatttaacgttgtagaattaatttatcgttatttgtttggttgatataattaataaaataataataatagtaataataatttttggtgttaaatagtgaggttttttagaaatattaagaattagtatgaaaaattaataggtatatgatataaatagtagtaggtatatgattttttttggaaatgttgagaagatagtagttgtttgtttgatgaggatagattggttgaatttgattattttttttatgttatttttttgtataaatatggagtgtttttttatattagaattttgttatttatttttagttaggaaaaaaaaaaaagtttgttgtagagtgtaatattttataatatgtttgaaaatttgagtttagttttagtggtatgttaaaataagttgggttttttgtttgtttatattagattttgatatgtttttgtgtttaagtgatttaagtatgtgattttttttttttgtaaattttgaattaatgagaaaaggatttatgaggttagttgtaagttgtagtaaatcgggtgtattttgtgttataaatttgtttttttgtgtcgttttgtatgaagaggggtattttaggatagagtatggggttagtattttataagttgtttgttttagatagtttaggaaattggttagtaagaaagttggttgtaggtttttgaaataaataaaaaattggatgaggtttttaatttgttttatgtttttgggattttaggatgtgattttttttttttgagatagagttttattttgttatttaggttggagaacggtggaataattttagtttattgtaattttcgttttttaggtttaagtaatttttttgttttagttttttgagtatttgggattataggcgtgcgttattacgtttagttaattttttgtatttttagtaaagacgaggttttattgtgttggttaggttggtttcgaatttttgattttgtgatttattcgtttcggttttttaaagtgttgtgattataggcgtgagttattgcgtttggtcgtgattttttttttttaatgaattttattttttagggtagttttagatttatagtaaaattgagtagaaagtacggacggttttgtgtattttgtttttatatacgtaaaattttttttattaagtatgtgatatttttaaagtttttatttttgtaaaattaaatttagagtgataggatttaagaggatatggaattttgttttgtagcgggatattattgtatatattgtttttttgtttgttagtgcgattgggtgttattttatagaatgttttttttttttaatattttggttttatgaatttttttatgtaggagatttttaaattatgttgtttttattttgagttatataatgtaaattttttttttttttttttttttttttntgagatggagttttattttatcgtttaggttggagtgtagtggtttattgtaatttttgttttttgggttttagttatttttttgttttagttttttaagtagttgagattataggtgttcgttatcgtgtttggttaatttttgtattttttaatagagatggattttattattttggttaggttggttttgaatttttgattttaagtgattttttcgttttggtattttaaagtgttgggtttataggtgtgaattattattgtcggttataagatgttaatttatttttttagttgtaaacgtaggtttaataataggagtttatagagtttttaagtaaattagagttaggatgatttaatattaggtttttatagaattataagtatttgatgatgatttaggtgagatgaagataatgatgaagatgatggtggtatttatattatagagagttttttatgtgttggaatttatatttagtgtttttttttttttgagataaagtttcgttttcgttttattgtaagtttcgttttttgggtttacgttatgttgttttagtttttcgagtagttgggattataggtattcgttattacgtttagttaattttttgtatttcgggtagagatggggttttatatatgttagttagnagttttagtgtttttaatagttgtttgttgttattttgattgtagtttatgtgtaaggtattattagtgattttgattttaaatgaggaaagtgaagtttagagaggataaaatatttagggttatttagtttataagagtagagtatggtcgggcgcggtggtttacgtttgtaattttaatattttgggaggtcgagacgggaggattataaggttaggagatttagattattttggttaatatggtgaaatttcgtttttattaaagtatataaaaattagttgggcgtggtggcgggcgtttgtaattttagttatttgggaggttgaggtaggagaatcgtttgaattagggagttggaggttgtagtgaattaagattgtgttattgtattgtagtttgggtgatagagcgagattttattaaataaataaataaataaataaaaaaattcgggtatagtggtttacgtttgtaattttagtattttgggaggttgaggtgggcggattacgaggttaggagtttgatattagtttggttaatatggtgaaattagatttttattaaaaatataaaatttagttgggtgtggtggcgcgtgtttgtaattttagttatttagtagcggaggtaggagaattatttgaattcggaggcggaggttgtagtgagttgagatcgcgttattgtattattttaatttgggtaatagagtgagatttttttttaaaaaaaaaaaaaagaaaaagaaaaagaaaaagaaaattaaagataaattttatttaatgtttttgatgggttgggtgtagtggtttacgtttgtaattttagtattttgggagttcgaggtgggtggattatttgaggttaggagttcgagattagtttggttaatatggtgaaatttcgtttttattaaaaatataaaaattagttaggcgtggtggcgtgcgtttgtaattttagttattcgggaggttgaggtaggagaattgtttgaattcgggaggcggaggttgtagtgagttaagattgtgttattgtttttcgatttgggtgatagagtaagattttattttaaaaaaaaaaaatataaaaaaaaattagaatgtttttgatgaagtagtaaaaattaattttattaaattttaatttttgaatttatagttagtttttatttttatgggttttgtattcgtggaattaattaatagtggattaaaaatatttaagaaaaaaaaaaaatttataaagttttaaaaattaaatatgaatttgttgtatgttaagtattatattgaatttatggggacgaagtgatttgtaggtattgtgttataagtagtttagagatgatttaaggtatataggaggatgtatgtaggtgatatgtaaatatgatatcgttttatatgaaagatttgagcgtttttagattttggtatttttgggggttttggaattagtttttttatagatacggaaagattattgtatattatattaatgtgaatttttatttgaatatatgttaatattaattaatgggaagtatatataaggtagattgtaaagaaaagtatgtatatagttgagttgtgagttgtattagttattttttatggaatattatttttaggtcgtaagtttttatatgtagagaatataaggggaggtttttttttttttgttacggattttaaaattagtattttagattttttttttttttttttttttgagaattatttgtttattggttttattttttttttttttttttgttttaattgttttagaggatatttttataggtaagaatttgaagttaaaggttatattgtcgttaggggaaattgtaagtttaatttagttagaatttagtgggtagaaggggtggtttgattagagtatgtagttagattaggttttggtggagatttgtttgtggatagtttgtttggtttttggttttaggaatgtggattgattagggagttaattattgtgaatgtagatagttagtggaaattgttaataggtgtattatttagtacgttaagtagatgttatagagattagaattaaatggagtatggtgtaagatattgtttgtttaggagatgagatagattttgaatatatatgtacgtgagtattatttgaattatttgttaatgtaattaagtatggtaaataaataggaaaaaaatgttaagttgagatgtatagaagagtttggattaagtttttagagtttacggttgtttttgatgttgtaaatataaatagtatttttgaattataattaattggacgagataggaggagatattgtattttggaaaaaaaattttaattatagttattttttaatttagtgatggattattaaaataatagatttatttttttatttatggaacggttattagataatttaaaggtagattagaaggataatgggttaatgatatttgcgtttttttttttaaagaatgtttaattttttttttgagtttttttattgttaaagatgataatatatataataaacgttaggttttagtttttttatttata

SEQ ID NO: 901 - DNA, 8168 bp, Artificial Sequence
  chemically treated genomic DNA (Homo sapiens)
gagtttggtggttttgtttttagtttggtttgtgtgttttttttttgtagtgcgtggattcgtttatttcgcgttagtacgtatagggagttttatttagtaagtatatttattatatttttaaagacggtgttataggttatgaatttgttgtataggttatagatgtttagaatttgtttgtcggagttttgtgaatttttgttggtaaattttgatttgtataggaaagaaaaagtattagatgtttggatatttttgttttattttttttatttttttttttatgataattttggtgtatattttatttagtataaattatttttttggttttttttattttataatatgtagcgttgtgtcggtagttgtatatagagaatatataaatttgattttattttttaggattttataattaatttaagtaatagattagaaaattaagtatattaatatatttatttatttagaaaataataatttaatatatggtatatgtaaaatattgtgtttggaattgaatgaaagtaaaataaattagtatttaatagggagtatttttattatgtagaagattttatttattttttaaaaaaataaaattaaaataaaatagaaaatttgtattttacgttttttagtattttttaatttttttattgttgaattttttgtttttttgtttaatttattttgataaaagagttaaaaaataaaataaggtcgggcgtagtggtttacgtttgtaattttagtattttgggaggacgaggtaggtagattacgaggttaggagatcgagattattttggttaatacggtgaaatttcgtttttaataaaaatataaaaaattagtcgggtatgggggcgggtatttgtagttttagttgttcgggaggttgaggtaggagaatggcgtgaattcgggaggcggagtttgtagtgagtcgagatcgcgttattgtattttagtttgggtaatagagcgagattttattttaaataaaatagaataaaaaaagtaggtttaaattttttggagtattttagtatgttagggttatgtagtaaatatttgtagtaaaaatatttattttttagttaaaaaaagtattgtaattaattttagttataagtgttattggttgggtgtagtggtttatatttgtaattttagtattttgggaggtcgaggcgggtagattatttgaggttaggagtttgatattagtttggttaatatggtgaaatttcgtttttattgaaaatataaaaagtagttaggcgtggtggtatatgtttgtaattttagttatttaggaggttgaggtaggagtattattggaatttaggaggcgaggttgtagtgagtcgagattacgttattgtatttttgggtgatagagcgagattttattttaaaaaaaaaaaatagaaatgttatttatataatatcggagtaggagtaggagattggtagtatttaggtattaggattttaaaattaggcggattttggggaataagtttagttttttttttgtttttttttattgagtttttatttgggagaaatttttcggttacgggagataatgataaggtagtttttaaattagtgggtaatgagtttatggtttttaaaggcgaagtagggtttacgtttattaggttggtataagtagatatatttattttcggttataatgaattgtaggttttgagaagggttatttagggttgagtagcgtaggttataattatgggtgtttaattttacgcgagggtagttttttttagaaattatataggattgttagaagtaataaaggggttaataggtttttttgaggaggtaattttaagtttttataaaggtatttttatttttatattggttttttttttttttttggtattttaaagttttttttttggttgttggttttttttattaattattatttatttattaaatatataattagagattataatttttttttttgtatatattattattatttagtatagaaattttgtaagtaagaaaaatgtaataatttattattttattaagagtatttttgagagagtagattgttgtaaatttggggtattaggaataagaaaggtaaagatatttgtttaacgttatttaaaaagttagttagaaaataggtcggtgtagtggtttatgtttgtaattttagtattttgggtggttgaggtaggtggattgtttgggtttaggagttcgagattagtttgggtaatatggtgaaatttttatatttagaaaaaatataaaaattagttaggtatggtgatatatgtttgtaattttacgtatttaggaggttgaggtgggaggattatttgagtttaggaggtagaggttgtagtgagttgagatagtattattgtattttagtttgggttatatagtaagattttgttttaaagaaaaaaaaaaaaaaaagttagttagaaataaaatttaagggttaggtgcggtggtttacgtttgtaattttagtattttggaaggttaaggtgggtggattatttgaggttaggagttggagattagattggttaatatggtgaatttttgtttttattaaaaatataaaaattagttgtatatgttggtgtgtgtttgtaattttagttatttaggaggttagaggtaggaaatttgtttgattcgggggagattggggtaatagtgagttaagatttcgttattgtatttaagtttgagtaatatagtgaaaaaaatggttttgttgggtgggggtttgaataagtaaaatttttaaaattttttaagaatgggggtaagataaaattaaaaaaaaagtttattttttatttttttttttttttggttttaggtttggggaattaaaaaaaataatggtattaattttttaatcgttcggaaaattttaattttgttaaaaattaaaattaaattaatttaaataaaataaggtttaaattattaatggttgggggtttattcggaggttaaaaaattttttttttttttttatggaggtttgtgatgggagtggaaagtatgaagaagtttgagtttaagtttttggaattttagttagatttagagggtattttgggtgtttttttttttttggagtgatgttaatagatggtttttgacgtattaaagggtatgaaattttattattaaagtatttgttttaagatttttattttatttttttttttttttttatttaaagatagggttttattttgttatttgggttgtagtgtagtggtataaatatagtttattgtagtttgaatttttgggtttaagggattttttttttttagttttttgagtagttgggatgataggtgtatgttattatgtttagataatttttaattttttttttttttggaaaaaaagtttaattttggtggtcggggtttgagtgaaagggggcgatttcggttaattgaaattttcgttttttaggttaaagcgattgtttttttttatttttcggagtagttgggattaagggtatgtataattatttttagttaattttgttttttaagtaaaaagggggtttttttattttggttagggtgtttttgaatttttaatttaaggtttaattttaaaatttttaaaaatgtaaaaatggggtttaataatttttgtttagggtggttttaaaattttggggttaaataatttttttttttttggtttttaaagtggggggaaaataagggtgaattttttatttaagtgggtgatttttaataattattatttttaattatttttaatattataggggcggggcgtatttttttaattttaatattttgggaggtcgaggtgggggaataattttgaggttaggaatttaaaattttttttaataaaaaggaaaaattttatttttatttaaaaaaaaaaaataatcgggttttgtggggggtgtttttaattttaattaatcgggggggttaggtaagaaaattttttgaattcgggaggcggaggttgtagtgaagggaaattgggtttttttaattttttttcgggtaaaaaaaaggaaaatttttttttaaaaaaaaaaaaaaattatgtttatgggaaagtattttttttaataagttttttttttattatatgtagcgtttgtgtttttattttagttatttgtttttaggtatgatttttaatttttttgaattagtttttttattttaagaattgaaatgttggttgggttagtggtttacgtttgtaattttagtattttgggaggttaaggcgagatgattgtttgagtttaggagttcgagattagtttgggtaatatagtgaggttattttttcgttgtttttataaaaaaatttagaaattagttttacgtggtgatgtgcgtttgtagttttagttgtttgggaggttgaggtggggggatcgttgaagtcgggaggttaaggttgtagtgattcgtggttatgtcgttgtattttagtttggggatatagtgagatttcgtattaaaaagaaaaatgttgtttattttaaggttgtagtaaagttaagtttgaatagagtaaaggaagcgttatagaagttgtattatttgtttatgttatagttggggaatggggtggtcgaatggggaggtttattgtcgtaatgttttaattttcgtttagagggagggatttttttttcgagggagggcgtcggaagtgacgcgaggttttgcggagattaggagttagattgtaggacgatttcgggttttacgtgttttcggtattcgtcggtcggagttttcggtttttcggggtcgggggattttagtggtatttatatatagtttattttttaagcggagttatgtttggtaacggtaatgcggttgtaacggcggtgagtgttgagtcggtgattagtatattttgggtttttggacgattcgtgtagcgattggttttaggttgttatttttagttgtttattggttagaacggttattttttttttttttttttttttttttttggttcgagtagtttttaaagggttagtagttcggttgtttttcggaaggaatggggaaattagagagcggtgatattgggttaagagtggaaggattgtttggaacggaatttcggtttttgcgggtatttgggtgggatttttattaggtttgggatgtacggttttagatttagtgatttagattaagaacgttcgtttatatagacggggtttttttattcgaggttgggttgaggcggatgtagatacggtttttttgggaagatacgttttatttttgatttataggagagagtattagttaagttttcgaattgtatataaacgttttagaagtgcgttttttttttgtgttatagtggttttttagttatagttaacgttttaagtttttagttgtgatatatttattgaattattatcgtgggtgggaggtcgtcgtgggtttttttattacgagtttgtttgtcgagttttgggtttgtgtatagataaattgtagagttggtggaggttattgttaggtcgagataagaaagagatggggagttgttaatttttttttgtttagtttgttggtgagggttgggatttttgtttttgtagttattttagagttttggattaggagtaggaagatttgaattgtggttttaattttttttcggttattagttttgtgattttaggtaagttattttattttttgatgttattcgttgtttttgtaatatggttttaaaggtgtttgttttgtttatttgataggatttttgagacgataataatatgtaaaagtaatagttttaatatagaagtgtttagtgttttattttttaatgaaacggtttgatttggatatgttgtgtatatttaatgaatttaaggaattgtttgaatttagtagttttgggattttagagttttttttgtgggttttttgtggtttagaattttggtggttacgtttaatattaagtttagtttaatttgtaaagggttttttagggttaatttattggagtgattatatggagtagattagagtttgagggtagaaagttgttatttgtttcggtaatagaggttttagatgtttgggtgtaaaagaattttatagtatttcgattaatatggtgaaatttcgtttttattaaaaatataaaaattaggtcgggtatagtggtttatgtttgtaattttagtattttgggaggtcgaggtaggtggattgtttgagtttaggagttcgagattagtttagggaatatagtgaaatttcgtttttattaaaaatataaaaaattagtcgacgtggtggtatgcgtttgtagttttagttatttgggaggttaagataggagaatcgtttgaatttgggaggtggaggttgtattgagtcgagatcgcgttattgtattttagtttgggtgatagagcgcgatttttttttaaaaaaagaaaaaaaaaaaaattatttttttttttttatatatatatatatattttagttgggtatggtggtgtgcgtttgtagtagttttagttatttgggaggttgagttaggagaatcgtttgaatttggaaggtagtggttgtagttagttgagaatatgttattgtattttagtttgggtaatagagggagattttgttttaaaaaaaaaaaaaaaaggaattatataggatgaatattttagattagggaatgttgattgtcgatagtattagtatttatagtggttattgtttgatgtagagaatgggattaggttaggcgtgtgtttacgtttgtaatttcgagtattttgggatggttgggtgtagagaggatatattaagttcgatgattatgtttgtgttaatatagtagaaatttttgtttttatataaaaatgtagaaaattagttgtggtatgtgtggaatatgtttgatagttttagattagaatttatggggtggaggtttgtagtgagtttagattacgttattgtattttagtttgagtaaaatagtgagattttgtttaaaaaaaaaaaaaaaaaaaaaaaaaatggggattttcgttttaaaaggaaaaatttagttttaggtgtttagcggggaatatttttggtttagggtattttgggggggggaaaaggggtgtttttttgagtttttgattggggttttggtttgtaaatatttttatgttggtgaaattagaggtagtattttaggtgtacgaattttaggtagcgtagttttttagttttatggaatatttgaggtagaagaaatttgagtttaatttttttattttatagatgaataaatagattttgatgggatagtgtatttaaggttatttagttaagaggttgagtaggattgtacgttagattcgtttattttagtttttaatgtatgtagtttagttaagattaaaggggatttttaattattgttaagtttttttttattgtggggatttttatttttttgattttttttgtagttagatatttgggttttttgttggagaaggtggtagtttgttgtttttagattttagtttattttatgtggtatttggatggtattgaaatttttttaagtgttttgtttgttgtagataatgaatttattttttagtgatttagtataggttttttagtgtggttttggttgttttgtttttgttagttgtaggttttattttttttgtggttaggttgatgggttttatttttttatttatttggttgtgtatagtatttttattgataattgttttggttaaggtgggttttagggtttagtgttttggttattgtagcggtagtaatagtaggttttattatcgtttttttttagtttttgtttttttggatttttgaggagggtagaaggtattgaggaaggttaaagggattagttttggagtatttttttattttgagatttagttggttataggttaggttttgaagttttttttttttaagttagtgattttggtttttggataaggtgttgaggaatattagaaatagaggggattgtgatttggggattttttttgtagg

SEQ ID NO: 902 - DNA, 8168 bp, Artificial Sequence
  chemically treated genomic DNA (Homo sapiens)
tttgtagaaaaagtttttaggttatagttttttttgtttttagtgttttttaatattttgtttaagaattagaattattggtttggaagaaaggaattttagaatttggtttgtggttagttgagttttagagtggggaaatattttaaggttggtttttttaattttttttagtattttttgttttttttagggatttagagaagtagagattagagggaggcgatagtaggatttgttgttgttgtcgttgtagtaattaggatattgagttttgaagtttattttgattaaggtagttgttagtgggagtgttgtgtatagttaggtgggtaaagagataaggtttattagtttggttataggaagggtggggtttgtagttggtaggggtagggtagttaggattatattggggaatttgtgttgagttattggaggatagatttattatttataatagataaggtatttgagaaaattttagtgttatttagatgttatatggagtagattagagtttaagagtagtaagttgttattttttttagtaagaggtttagatgtttggttataaaagaagttaagaggatgaagatttttatagtggggaaaagtttgatagtaattaagggttttttttaattttggttggattgtatgtattaaggattgaggtaaacggatttgacgtatagttttgtttagttttttggttgggtgattttgggtatattgttttattaggatttgtttgtttatttataaaatgaaaaggttggatttaggttttttttgttttagatgttttataagattaggaggttgcgttgtttaaagttcgtgtatttagagtgttgtttttggttttattaatatggaaatatttataggttagagttttagttaaggatttaagaggatatttttttttttttttttaaagtattttggattaaaagtatttttcgttaaatatttagaattgaatttttttttttaaaacgggggtttttattttttttttttttttttttttttttagatagagttttattgttttgtttaggttggagtgtagtggcgtgatttaggtttattataaatttttattttatgggttttaatttggaattattaggtatgttttatatatgttatagttaattttttatatttttatgtagagataggggtttttattgtgttggtataggtatggttatcgaatttagtgtattttttttgtatttagttattttaaagtgttcgggattataggcgtgagtatacgtttagtttgattttattttttatattagatagtagttattgtagatattgatattgtcgatagttaatattttttgatttgggatgtttattttatgtagttttttttttttttttttttgagatagagtttttttttgttgtttaggttggagtgtagtggtatgtttttagttaattataattattgttttttaggtttaagcgatttttttgatttagttttttaagtagttgggattattatagacgtatattattatgtttagttaaaatatgtgtgtgtgtgtaaaaaaaaaaaaataatttttttttttttttttttttgagggggagtcgcgttttgttatttaggttggagtgtaatggcgcggtttcggtttagtgtaatttttattttttaggtttaagcgatttttttgttttagttttttaagtagttgggattataggcgtatgttattacgtcggttaattttttgtatttttagtagaaacggggttttattgtgttttttaggttggtttcgaatttttgagtttaggtaatttatttgtttcggttttttaaagtgttaggattataggtatgagttattgtgttcggtttaatttttatatttttagtagagacggggttttattatgttggtcggggtgttatggagtttttttgtatttagatatttggggtttttattgtcgaagtaggtgatagttttttgtttttagattttggtttattttatgtgattattttaataaattaattttgggagattttttgtaaattaggttaggtttgatattaaacgtggttattaaaattttgggttatagggagtttatagaaaggattttaaggttttagaattattaggtttaaataattttttaagtttattgaatgtgtatagtatatttaagttaaatcgttttattaaaaaataaaatattgagtatttttatgttgaagttattgtttttgtatattgttgtcgttttaaaaattttattaggtggataagataggtatttttgggattatgttatagaagtaacgggtggtattaagggatgaggtgatttgtttagggttatagagttaataatcgaaagagagttggggttataatttagatttttttatttttagtttagggttttggaatgattgtaagagtaaagattttagtttttattaataggttggatagggggagattagtagttttttattttttttttatttcggtttggtagtggtttttattagttttgtagtttgtttgtgtataagtttagggttcggtaagtaggttcgtaatggaaaggtttacggcggttttttatttacggtagtaatttagtaggtgtgttatagttggggatttggagcgttggttgtggttgggagattattataatataaaaagaaggcgtatttttaagacgtttgtgtgtagttcggaggtttggttgatatttttttttatgaattaaaagtggaacgtgtttttttaaaggggtcgtatttgtattcgttttagtttagtttcgaatgaaaggatttcgtttgtgtagacgaacgtttttggtttgggttattaaatttagagtcgtgtattttaggtttgatgggaattttatttagatgttcgtagggatcggagtttcgttttaaataatttttttatttttaatttagtattatcgttttttgatttttttatttttttcggagggtaatcgagttattggttttttaaaagttattcggattaaaaaaaaaaaaaaaaaaaaaaaaaagatagtcgttttgattaataaataattgaggatggtaatttggggttaatcgttgtacggatcgtttagaagtttaaagtgtgttggttatcggtttagtatttatcgtcgttgtagtcgtattgtcgttattaaatatggtttcgtttggaaagtaggttgtgtgtgggtgttattaaggtttttcggtttcgggaagtcgggggtttcggtcggcgagtatcggggatacgtgggattcgaggtcgttttatagtttgatttttggttttcgtagagtttcgcgttattttcggcgttttttttcgaaggggaggtttttttttttgggcgggaattggaatattgcgatagtggatttttttattcgattattttattttttagttgtgatatgagtaagtagtgtagtttttatggcgttttttttgttttgtttaaatttagttttgttataattttgaaataggtagtatttttttttttgatacggggttttattgtgtttttagattagagtgtagcggtatgattacgggttattgtagttttgatttttcggttttagcgatttttttattttagttttttaagtagttgggattataggcgtatattattacgtgggattaatttttagatttttttatagagatagcggggaggtggttttattatgttgtttaggttagtttcgaatttttggatttaagtagttatttcgttttggttttttaaagtgttgggattataggcgtgagttattggtttagttagtattttaatttttaaaatgaggaaattggtttagagagattaaaggttatgtttaaagataagtaattgaagtgggagtataaacgttatatgtagtgagaaaagggtttgttaggaaaagtgtttttttatgaatataatttttttttttttttggaaagggattttttttttttttgttcggggggggattggaagggtttaatttttttttattgtaattttcgtttttcgggtttaagaaatttttttgtttaattttttcgattagttgggattaagggtattttttataaaattcggttattttttttttttgggtaaaaataaggttttttttttttattggggggggttttgaatttttgattttagggttatttttttatttcggttttttaaagtgttgggattaaaggggtacgtttcgtttttgtaatattaaaaataattaaaaataataattattaaaaattatttatttgggtggggggtttatttttattttttttttattttaggaattaagggggggaggattgtttggttttaggattttgaaattattttgggtaaaggttattaaattttatttttatatttttaaaaattttaaaattaggttttaggttaagagtttaaaaatattttgattaaaatggaaaaattttttttttatttaaaaaataaaattagttgggggtggttgtgtatgtttttaattttagttatttcggagggtgagggaggataatcgttttaatttgggaggcggaggttttagttagtcgaaatcgtttttttttatttaaatttcggttattaaaattaaattttttttttaaaaaaaaaaaaaattaaaaattatttgggtatagtgatatatatttattattttagttatttaggaggttgagggaggaggattttttgagtttaggagtttaagttgtaatgagttatgtttgtattattgtattatagtttaggtgatagagtgagattttgtttttaaataaaaaagagagagagagtaaaataagaattttaagatagatgttttaatggtgggattttatgttttttgatacgttaaaagttatttgttggtattattttagggagaaggaggtatttagaatgttttttaaatttaattagaattttaggagtttgaatttagatttttttatgttttttatttttattataaatttttataagaaaaaaaaaaaaattttttaattttcgggtgagtttttaattattaataatttggattttattttatttgggttaatttaattttaatttttggtaaaattagggtttttcgggcggttggggggttgatgttattattttttttaattttttaagtttagggttaaggaaaaaaaagggtggggggtgggttttttttttggttttgttttgtttttatttttaaaaaattttggaaattttgtttgtttaaatttttatttaataaaattattttttttattgtgttgtttaggtttgagtgtaatggcgagattttgatttattgttattttagtttttttcgggttaagtaaattttttgtttttagttttttgagtagttgggattataggtatatattagtatgtatagttaatttttgtatttttagtagagataggggtttattatgttggttagtttggtttttaatttttgattttaggtgatttatttattttggttttttaaagtgttgagattataggcgtgagttatcgtatttggtttttgaattttatttttaattagtttttttttttttttttttttgagataggattttgttgtgtaatttaggttagagtgtaatggtgttgttttagtttattgtaatttttgttttttgggtttaagtgatttttttattttagttttttgagtacgtgggattataggtatgtgttattatgtttggttaatttttgtattttttttagatatgggggttttattatgttgtttaggttgatttcgaatttttgggtttaagtaatttatttgttttaattatttaaagtgttggaattataggtatgagttattgtatcggtttattttttaattaattttttaaatgacgttggataagtatttttattttttttgtttttggtgttttagatttataatagtttatttttttaggaatatttttgataaagtagtagattattatattttttttatttgtagaatttttgtattagatagtgataatatatatagagaaagaaattgtgatttttggttatatatttaatagatgggtaatggttaatgaagaaggttagtagttaagagaaagattttagaatgttaagagggaaaaaagagttagtatggagatgggaatatttttgtgaaggtttagagttatttttttaaaggagtttgttaatttttttgttgtttttggtagttttatatagtttttggaaaagattattttcgcgtggagttggatatttatggttgtggtttgcgttgtttagttttaagtgattttttttaggatttgtagtttattgtggtcggggatgagtgtgtttatttgtattagtttgatgaacgtgggttttgtttcgtttttgagggttataagtttattgtttattggtttagaggttattttattattgtttttcgtgatcggaaggttttttttaagtaaggatttagtgagaagggatagggagagggttggatttgttttttagaattcgtttgattttaaaattttaatgtttggatattgttaattttttatttttatttcggtgttatgtaggtaatatttttgttttttttttttgagatggagtttcgttttgttatttaggagtgtagtggcgtgatttcggtttattgtagtttcgttttttgggttttagtgatatttttgttttagttttttgaatagttgggattataggtatgtgttattacgtttggttattttttgtatttttagtagagacgaggttttattatgttggttaggttggtgttagatttttgattttaagtgatttattcgtttcggttttttaaagtattgggattataggtgtgagttattgtatttagttagtgatatttatagttagagttggttataatgttttttttaattgaaaaatggatgtttttattgtaggtatttgttatatagttttagtatattagaatgttttagggaatttggatttgttttttttgttttgttttgtttgagatggagtttcgttttattgtttaggttggagtgtagtggcgcgatttcggtttattgtaagtttcgtttttcgggtttacgttatttttttgttttagtttttcgagtaattgggattataggtgttcgtttttatgttcggttaattttttgtatttttattagagacggggttttatcgtgttagttaggatggtttcgattttttgatttcgtgatttgtttgtttcgtttttttaaagtgttgggattataggcgtgagttattgcgttcggttttgttttgttttttaatttttttgttaaaataaattgggtagaggaataagggatttagtagtggagaaattagaaagtgttgggaaacgtaggatgtaagttttttgttttgttttggttttatttttttaaggggtaagtggggttttttgtatgatgaaagtattttttgttagatgttggtttgttttgtttttatttagttttaggtatagtgttttatatatattatgtattggattattattttttaaatgaatggatatgttagtgtatttaattttttaatttgttatttgggttaattgtaggattttaaagggtaagattaggtttatgtgttttttatgtataattatcggtatagcgttgtatgttatgggatgagagggattagagaggtgatttgtgttgggtgaaatgtgtattaaagttattatgggaaaggaaataggggagataagatagagatgtttaaatatttggtgtttttttttttttatgtaggttagagtttattagtagggatttatagagtttcgataagtagattttaaatatttatgatttgtgtaataagtttatagtttatagtatcgtttttgaggatgtagtggatgtgtttgttgagtggggttttttgtacgtgttgacgcgggatgggcgggtttacgtattgtaggagaaggatatatagattaaattggaggtaaggttattaggttt

SEQ ID NO: 903 - DNA, 5912 bp, Artificial Sequence
  chemically treated genomic DNA (Homo sapiens)
agagataggattagaatattaggttttttgatttttgttattataggaatgtttataaagtagttttgaatgtatattagataagtagattttaaagagtagtttagggatatatagggatttaagggtttttaaggttaaaattatttttgtaataatgttaagatatttttttttttatttttttatgagtgtatagtggtgttttttaggggttatatgatatgtaaaattgtaatgggttgaagaagtagatatgagaatttagttgttttttattaagttagatagtaaagagatttgtaaaaatgtaaaataatgttatttttttgtgattttttgttttgggaaatagttattttttataattaaaaatgtggtatgttggttgggcgcggtggtttacgtttgtaattttagtatttagggaggttaaggtgggtggattattttaggttgggagttcgagattagtttgattaatatggagaaatttcgtttttattaaaaatataaaattaggttaggtatggtggtttacgtttgtaattttagtattttgggaggttgaggtgggtggattataaggttaggagatcgagattattttggttaatacggtgaaatttcgtttttattaaaaaatataaaaaattaaaaaaaaaaaaattagttaggcgtggtggcgggcggttgtagttttagttatttgggaggttgaggtaggagaatggtgtgaatttaggaggcggagtttgtagtgagttgagatcgtattattgtattttagtttgggcgatagtgagattttattttaaaaaaaaaaaaaaaaaaaaaatttgttgggcgatgtggtttacgtttgtaattttagttattcgagaggttgaggtatgagaattgtttgaattttggaagtggaagttgtagtgagttaagatgggttattgtattttagtttgggtaattttattttaaaaaaaaaaaaaaaaaggaaaagaaaaaagaaatatatgggggcgttttcgttataaattgtagagaaaaatgattttaaaattaaggatattggagggttttggatgtttgggtggttgttattataatatttttttgattatattgttattaattttggtttttttttttaggttataggtagtgatagggatggttgggaaatgtagttaattttatttttttgtaagttttgttttttatgaattattttgtattttggtgtattgatgtaattttttggttataatttttataagtttataaaaggtaatgtgaggttttatgatatttatttttggttttttaggttatgtttttgaaagtatttgtggagtgttgggaaggaaattggttttggtatttaaagattaagtattaggttttagttttattattttttggttgtgtgattttttatttttttgagttttattattttattattaagagaaggacggtaatagttgtttttatagaattattgtgaagagtagatgagtagtaaaatggttttgttaattgtaaagtattgtacgaaggtttatatttgttatgatattggtttgtggagttaagtttttgtttagggtgggaagggtggagagggtagggagaatagaggaggggaaggagaggttttatttgggagagatgtttttaggtttattaagaagtttgtttggttgagtgtggttaaggttatgatgagaaagaacgagatgattgagatgatgtagttatagtttttatagattatagttaagattaatagggtagggtttcgtattttgggggaaatagtggatcgatggataattttgtttaggttagacgttttttttttttttttttttagttttttcggatttttttttttagttattatttttagtttttattttggttttttttttttttttttttttttttttgttttttttttttattttttttttttttgtagggatttattagaagaatttagatttaggaggttggttagttgagtgagttatttggtttttttttgttttagtttatttattaagagaatggggtggttaggtgtggtggtttatgtttgaaattttagtattttgggaggtcgaggtaggcggattatttgaggttaggagtttaagattagtttggttattatggtgaaatttcgtttttattaaaaatagaaaattagtttggtgtggtggtatatatttgtagttttagttatttgggaggttgaagtaggagattcgtttgaattcgggaggtagaggttgtagtgagtcgagattgcgttattatattttagtttgggtgatagaatgagatttcgttttaaaaaaaaaaaaaagaaaaaaattgattttttagttataatagttaaattttaagtgttaagagttatatgtggttcgtaattaatatttaataatatggatataaaatatttttgttattataaaaatagaaagttttttttttttgtttttttttttttttttttgtggagaatagggtttcgttatgttgtttaggtaggtttcgaatttttgggtttaagttatttttttatttttgtttttttgagagttaggattataggtatgcgttattgtatttggtaaaattagaaggttttattgaatagtattgtttttggagaaattatttgattgtttgaaaatgtaagtttgagttatggtgttaggggatttgagtttttgtttagttttattattgattggttaggtagttttggataaattatatatttttgcgttttattttttttatgaattgtgggtagaggtgggattaggtaatatgtgagttttttttaagttttgattttttggggtgaattttatgagttttgaatttagtttttagttatttttattttagtttttttggagtgttttagttggtttagattttttttgtttattaagaggagattagatgaatttatttgttttcgggttgtgacgtattatgtgttttttaagggataatatttgattggatttggtttagtgtgagttaattagaatttttttaattagaatttggtttagggatttagggttagttagtgagtttttgtaggtagttgagattgtttttgggagaagtaggtggttgtagttatgaggttgtgcgtgattgagtggaggagaatgttagtttggagagaagataggagagggtgagagagaggaggagagaggaaaatatagtcgatttttagggattagtagtgagaagaatttttagtttaggtttttggaatttgtgatatttttgtgttttttaatatattttttttattttttattatttttacgagttttaatttatttttgttttttgttattaaagatttttaatttatataggttaaagtgaaggggtttgttttattatttttttgaaaagttgagtaagtttttagttggaaaaaagtgtaaggtaaaaaaggatatatatatatatatatacgttatgtacgtaaaattaataagaataaacgaaaggaaaatagttatttgttattgatttgataagtgtttttggagtatttatattatgttaggtattgtatttagagttttagatatatgattttgtttaattttttttataatttttgaaaggtgggtaatgttttttttattttagagataagggaattgaggtatagagaggttaaaggatagggtaaggatatatagttggttagtagtagagataatttgagttagggtttggcgagaggatagttagttgggtttttttgatattagtatagtttttgagtaaggagattttttgggtggggatttatttggtttagagagtgtagtaagttagaaagattttattttgttatgagggcgtaattcggttattttggttataggggagtatagtggtttttttacggtttgaagcgggaagggtaggtttaagaagaaaatttttcgaagtaaaaaatatttggaattttttaagattttttgttttttattttttttagattttttttataaaaaagtttttttggattgagagtataaattattttttttttagttttatggaggaagggaagaggtaatattaaaattgtttttggaattaagagtttattttgtagttgttcgatttaatatataaaaattttttacggttaggtgcggtggtttatatttgtaattttagtattttgggaggtcgaagtaggcgaattatttgaggttaggagtttgagattaatttggttaatacggtgaaatttgtttttattaaaaaaaaaaaaaaaaaaagtaaggtttggtggtaggcgtttgtaattttagttatttgggaggttgaggtaggagaatcgtttgaattcgggagacggaggttgtagtgagttgagattatgttattgtattttagtttgggcgatagagtaagattgttttaaaaaaaaaaaaaaattttttttaaattaataagaggaggttattggttggggtagtttatgtttttaattttagtattttgggaggttgaggtaagaggattatttgagattagaagttggagattagtttgggtaatatagggagatttcgtttttataaaaaaaaaaattttttttaattggttgggtacgatgttttatgtttgtaattttaatattttgggaggttaaggtgggtggattatttgaggtcgggagtttaagattagtttgattaatatggagaaattttatttttgttaaatatataaaattagttaggtatggtggtatatgtttttaattttagttatttgggaggttgaggtaggagagttgtttgaattcgagaggttacggtgagttaagatggtattattgtattttagtttgggtaataagagtaaaattttattttaaaaaaaaaaaaaaattggttgggtatagtggtttatgtttgtaattatagtattttgggaggttaaggcgggcggattatttgaagttaggagtttgagaatagtttggttaatatggtgaaacgtcgtttttagtaaaatatataaaaattagggttaggagcgttggtttatatttgtaattttaatattttgggaggtcgagataggcggattacgaggttaggagatcgagaatattttggttaaaagggtgaaaattcgtttttattaaaaatataaaaaattagttgggtatggtggtgggcgtttgtagttttagttatttaggaggttgaggtaggagaatggtgtgaatttaggaggtagaggttgtagtgagttgagatcgtattattgtattgtagtttgggtaagagagtgagattttagtttaaaaaaatatatatatattagttaggtatggtggtgtgcgttattcggaggttgaggtaggagaatcgttttaattcgggaggcgttattgtattttagtttgggtgatagagtaagattttgttttaaaaataaatatataaataaaaataaaaattagtgaagtatggtgatatatatttgtagttttagttatttagtataattgtttgggtgtgtagtgagttgtgattttattattgtattttagtttgggcgatagagtaagagtaagattgttttttttaaataaaaggtaaattaaaatagtatattatttttttttattttttaggtttttaagtaatagaaaaattataaaaattattgttgatgaagatgtaggaaaataggtattttcgtcgggcgtggtggtttatgtttgtaattttcgtattttgggaggttgaggtgggtggattacgaggttaggagatcgagattattttggttaatatagtgaaattttatttttattaaaa

SEQ ID NO: 904 - DNA, 5912 bp, Artificial Sequence
  chemically treated genomic DNA (Homo sapiens)
ttttagtagagatggggttttattgtgttagttaggatggtttcgattttttgatttcgtgatttatttattttagttttttaaagtgcggggattataggtatgagttattacgttcggcgagagtgtttgtttttttgtatttttattaataatggtttttataatttttttattgtttgaaaatttggaagataaaaagaaatgatgtattgttttaatttgttttttatttagagaagatagttttgtttttgttttgtcgtttaggttggagtatagtggtgagattatagtttattgtatatttaagtaattgtattgagtagttgggattataggtgtgtgttattatgttttattaatttttatttttatttatgtatttatttttgagatagagttttgttttgttatttaggttggagtgtagtgacgtttttcgggttgaagcgatttttttgttttagttttcgagtagcgtatattattatatttggttgatatatatatatttttttgagttggagttttatttttttgtttaggttgtagtgtagtggtacgattttagtttattgtaatttttgttttttgggtttatattatttttttgttttagttttttgagtagttgggattataggcgtttattattatgtttagttaattttttgtatttttagtagagacggatttttatttttttagttagaatgttttcgattttttgatttcgtgattcgtttgtttcggttttttaaagtgttaggattataggtgtgagttaacgtttttggttttaatttttgtatgttttgttagagacggcgttttattatgttggttaggttgtttttaaatttttgattttaggtgattcgttcgttttggttttttagagtgttgtgattataggtatgagttattgtgtttaattaatttttttttttttttgagatggagttttgtttttgttgtttaggttggagtgtaatggtgttattttggtttatcgtaatttttcgagtttaaataatttttttgttttagttttttaagtagttgagattaaaggtatgtgttattatgtttggttaattttgtatatttagtagagatggggtttttttatgttggttaggttggttttgaattttcgattttagatgatttatttattttggttttttaaagtgttgggattataggtatgagatatcgtgtttaattaattaaaaaaaatttttttttttgtagagacggagtttttttatattgtttagattggtttttaatttttggttttaagtgatttttttgttttagttttttaaagtgttgggattagaggtatgagttattttagttagtggtttttttttattgatttgaaagagatttttttttttttttgagatagttttgttttgtcgtttaggttggagtatagtggtatgattttagtttattgtaattttcgtttttcgggtttaagcgatttttttgttttagttttttaagtagttgggattataggcgtttattattaagttttgttttttttttttttttttttagtagagataggttttatcgtgttggttaggttggttttaaatttttgattttaggtgattcgtttgtttcggttttttaaagtgttgggattataggtgtgagttatcgtatttggtcgtaagagatttttgtatattaagtcgagtaattgtaaagtaagtttttgattttagaagtaattttggtattgttttttttttttttttatggagttaggagaggaatgatttgtatttttaatttagaaaggtttttttataggagaaatttggagaagatggaaaataagagattttgaaagattttaagtattttttatttcggaggattttttttttgaatttatttttttcgttttaaatcgtggaaagattattgtgtttttttgtggttagaatgatcgggttgcgtttttatggtagggtggggtttttttggtttgttgtattttttgagttaagtgggtttttatttaagaaatttttttgtttaggagttgtgttgatgttagaaagatttagttgattgttttttcgttaagttttggtttaagttgtttttgttgttggttagttgtgtgtttttgttttgttttttaatttttttgtgttttaatttttttgtttttgaaatggagaaaatattgtttattttttaagggttgtagggaagattagataaggttatgtgtttaaggttttggatataatgtttggtatggtgtaggtgttttagaaatatttgttaaattagtaataaatagttgtttttttttcgtttgtttttgttagttttgcgtgtatgacgtgtgtgtgtgtgtgtgtgtttttttttattttgtatttttttttaattgaaaatttatttaattttttagaaaagtaataaagtaaatttttttattttaatttatgtgggttaggaatttttggtgataagaaatagaaataagttggaattcgtagaaataatagaaagtggggagaatgtattaaaaaatataagggtgttatagattttaagagtttaaattggggattttttttattattaatttttggaggtcggttgtgttttttttttttttttttttttttatttttttttgttttttttttagattggtatttttttttatttagttacgtatagttttatggttgtagttatttgttttttttagggatagttttagttatttgtaaagatttattaattgattttaagtttttaaattaggttttggttagggagattttgattggtttatattgggttaggtttagttagatgttgttttttgagaaatatatagtgcgttatagttcgagggtaagtgagtttatttgatttttttttggtagataggaaaagtttgggttagttgagatattttagagggattggggtggaggtagttggaaattgaatttagagtttatggaatttattttagaaggttagagtttgaaggagatttatatattgtttgattttatttttgtttatagtttatagagagaatgaggcgtagaggtatgtggtttgtttaagattgtttggttagttagtgatggggttggatagaaatttaggttttttagtattatggtttaggtttatatttttagatagttagatgatttttttaagagtagtgttgtttaatagaattttttggttttgttaggtgtagtggcgtatgtttgtaattttagtttttagggaggtagaggtgggaggatagtttgagtttaggagttcgagatttgtttgggtaatatagcgagattttattttttataaaaaggaaaaaaaaaagataaaaaaaaagaattttttatttttgtggtaataaaaatattttatatttatattgttgaatattggttacgagttatatgtggtttttagtatttgaaatttagttgttgtggttgaggaattaattttttttttttttttttttttgaaacgaagttttattttgttatttaggttggagtgtaatggcgtaatttcggtttattgtaatttttgtttttcgggtttaagcgagttttttgttttagttttttaagtagttggagttataggtgtgtgttattatattaggttaattttttatttttagtagagacggggttttattatgatggttaggttggttttgaatttttgattttaggtgattcgtttgtttcggttttttaaagtgttgagattttaggtatgaattattatatttggttattttatttttttaatgagtaaattgaggtagaaagagattaggtggtttatttaattagttagttttttaagtttgggtttttttggtgaatttttgtagaagaggggaaggtgggaagaagaaatagagagggagagggaggagggggaagggttagagtggggattgaggataatgattgggaggagaagttcgggaggattgaagggaggagggaagagagcgtttaatttggataggattgtttatcggtttattattttttttaaaatgcgaggttttgttttattggttttggttgtgatttatgggggttgtgattgtattattttagttatttcgtttttttttattatgattttgattatatttaattaagtaggttttttggtgaatttgaagatattttttttaggtggggtttttttttttttttttttattttttttattttttttattttttttattttgggtaaaggtttggttttataggttagtgttataataaatataggttttcgtatagtattttatagttgataaagttattttattgtttatttgttttttataataattttgtgagggtagttattatcgttttttttttagtggtgagataatgaggtttagagaggtgaaaggttatatagttaggaagtggtgaagttgagatttggtgtttagtttttggatgttaaagttagttttttttttaatattttatagatgtttttagaagtatagtttgaaaggttagagatgggtgttatagggttttatattattttttatgaatttgtgggagttatagttaagaaattatattaatatattaagatgtaaaataatttatggaaaataaagtttataggaaggtgaaattagttatattttttaattatttttattattatttgtaatttaaggggaaagattagaattggtgataatgtgattagaaaagtgttgtaatagtagttatttaggtatttaaggttttttaatgtttttggttttaagattatttttttttgtagtttgtggcgagagcgtttttatgtgttttttttttttttttttttttttttttttttttgagatggagttgtttaggttggagtgtaatggtttattttggtttattgtaatttttatttttagggtttaagtaatttttatgttttagtttttcgagtagttgggattataggcgtaagttatatcgtttagtaaattttttttttttttttttttttgagatggagttttattgtcgtttaggttggagtgtagtggtgcgattttagtttattgtaagtttcgttttttgggtttatattatttttttgttttagttttttaagtagttgggattatagtcgttcgttattacgtttggttaatttttttttttttaattttttgtattttttagtagagacggggttttatcgtgttagttaggatggtttcgattttttgattttatgatttatttattttagttttttaaagtgttgggattataggcgtgagttattatgtttggtttaattttgtatttttagtagagacggggtttttttatgttggttaggttagtttcgaatttttaatttaaagtgatttatttattttggtttttttaagtgttgggattataggcgtgagttatcgcgtttagttaatatattatatttttaattgtgaagaataattattttttaaagtaaaaaattatagaaggatggtattgttttatatttttgtagatttttttattgtttggtttaatagaagatagttagatttttatatttgtttttttagtttattgtaattttatatgttatgtagtttttagaaaatattattgtgtatttatgggagaatgagagggaaaatgttttagtattgttatagaaatagttttgattttgaaaatttttaggtttttatgtgtttttagattattttttgggatttgtttatttaatgtatatttaaaattattttgtaaatatttttatagtagtaaaagttaggaggtttggtgttttagttttgttttt

SEQ ID NO: 905 - DNA, 6508 bp, Artificial Sequence
  chemically treated genomic DNA (Homo sapiens)
tgggtttagttttttttgttagtttttttttttttgggttttttaggtagtgggatttggtttgtttttttagattagaagggttgtggagaagtaggaataataagtcgaggtttggaggagatagagtagatttgataaataggaaaaacgatgtttaaaatttggggaggagggtgttttttttttgtttattttagcggagaattttttttattttttatcgatataaaattttagaaataaattttttttagtttttttttaaggcgattcggagatatttatttaattttttttggagagaaggggtcgaagtaacgtaggggttaatttttttgaaaatataattaattttttttaattttgcgtggggtgggggagagatatatttatttaattattcgggagtggggtggttttaatttaaacgttttttttttttttaaaggtattgagtttgttttatagattttacgtaggtggaataggacgcgttgtgttgttggggagagagaggagaaaggcgaaggagaaggaggaaaaaaaaaaggttgataggtttgtgcgcgggtttttcgtgcgggttgcgttttttttgggtgttatttgataatttttgtttttgttattggttagtgttggattagatggttgtatttttttttggtttttattggtatttcgttatttttttttagttaaaatttaatttcggatatattattaataggcgcggcgttcggattataaaatataataaattataaattcggcggagtagtagcggtcgcgcgcgtttttttttttaatgagtttttatttcgtgaattttatttttttcgttattttggttagcgggtaggagttttttttgggttagttatcgttttattcgtcgggttatgcggattcgttgagatattatttcgcgttttacgggttagggtcgggttaggataagggttttgttatttttttttattattcgtcggcgggcggtggttacggtcgagcggcgttttgcgattacgggtcggcgtcggttttttatcgcgagaaagagtcggtttgcgtatttttcggcgtcgacgagtagttttcgttttatttcgagtcgcggaagtcggattgcgcgtaggataagagcgtgttcggcgagatagaagagtagaagtgttttatttcggtttattcgtggatgtagcggatgaattcgtgtaatagtgagtgagatttttcgtcgtcgtcgtttcggtttttttgggcgtttatttcgggatatagaattagtgagcgttttttgttttaattttttatagggtgttgggtgggtattttagttaggagatagaagaagattgggcgtcggtcgggggtttttcgttgtgttttttattaggtaggagttataaagtttgtaaagttttagtcgtattgggagttatggggagtaagtgtgtttttttggggcgtttggttagagtcggggttttaggatagggaagggagtaggagtttgtagttattggtttggttttattttgagtttttaattttttttttttagttttggtagggttttttaattaaagacggttttattaaaaacggagtgcgttatgtaagggggtagggggtgacgttgaagaggaagagttgagtttgtttgggattgtgtttttttgtgggtggggagttggggtaagatgaggtattaggaaaggggtggtagttagaggagggaggaggaataaggggaaggaagagagagggagtaggcggagcgagagagggagaaataggcgcggggttttaggttggattatttgttggttttaagttttaattgatgtttattagtcggattcgaaagtgaggagtcgttaatgtggattatggatcgatttacgttattacggattaacggtttggatttattattgggttggggggatgacggggggtgggaataagatggatggaaagggagggaaagataagatgtaattaggaagagatatatttgattagtttttttttttaggtttaggtgggagtttaaattgtttttttttttttttatttagagtttagatagacggtataggtttaggagattaggagggaatttggagggggcgttggaggagtgcgaaacgggggaagggagtcggtagaatagagggtatttcggtattggttggagtttgtgttcgagggtcgattaggggagggggttttgggttcggtgatcgtaggttttagtatttttattttgcgtaataggttttttttttgggtttagcggtcggcgaggtcgttagatatatatacgttattagacgttggagttggagaaggagttttattataatcgttatttgacgcggcggcggcgtatcgagatcgcgtacgttttgtgtttgacggagaggtagattaagatatggttttagaatcgacgtatgaagtggaaaaaggagagtaaattgtttagcgcgttttagtttagtgtcgaggaggaggaagaaaaataggtcgagtgaaggtgttggaaagggagggaggacgcgaggggaaaggtttgtggggagttacgggcgttagagagattcgggaaggaaggttttcgggtgggggagttaggagatttgtttttcggcgtagataggcggggtttagcgtttttttggacgttttcgttcgtatagttttcggcgggtgttttgaggttttattattcgagtttatttagtatttcgcgcgtttttttttttcgaggaattcgttttagtttgattaggttttttggtgagaattgaggagcggatttatttgatgttttttggaagtagagtaaaatgtttttgtttttgtcgcgttttattttgtttatgtttttcgtgtacggtttaatggtagattcgttgtttttttagcgggggttttgaagattttttgattttagatttgtcgttttttttattttttttttaaagttattggaaggagtatatattatttagaagtaagaagaggagttttagaagaaaataaagttttattttattaattttttatgtgttgtgtttgtagttttgttttagttttggacgtgaaatatttcgatgatgatgatgatgatgatgatgataataataataataataataataataataataataataaagatgtgaaaattcgacgttcggttatttttaatttttttttgttatttttttttttttttttaatttttagtttttttattttttttgagttagaattttttagtaaaggcgagagttttggttcgtcgaagcgagttttgttcgattgggaagttatagttgagataaaggttggagcgattagttttgtttaggttttagcgttgcgtttttttggtgttgaggtttatagtcgttttttttcgtgtagatttgggggatggagaggtgttgtgttttttttattttttagttttttttcgtgtatatatagtattaagggagttattgaggtttttaaagttttttggcggagacggagttatagtttgggggtttttgtagcgtttttttgtttttattttcgtagcgatttttggtttttggttcgtttatatggttaggttttttcgttagttttggtttttcgtttttggtttgtggttttggagattgaaaaatggggttattgggtattttttattttgtagttgaaggttttaggtgtttttttttattttaagtagtagattagttttaagtaggagattagttttaagtaggggaatgtaaagttattagttaggtataggtcgaaggttataatttttttttgttttttggagattttagggtaggaggttaggtgatggggtttttagtgttatttttttaatttagaatggtttattttttttttgtttgtatcggtatttagaaggtaagttgcggttattgtttttttttattttttcgttttttcgtttttttttttatttttaaagaaaatagtttttttttaataggagattagttgcggcggtttttggtcgtttagcgtgtttagtaaagtatgcgggtttttggaatttttttttcgggaaggcggttgttattaggtaaatttttaaattgtttagttgcgagtgaggggtttgtagtggggttttcgaatgtaatagtcgaggaggaggggaagggatttcgttttataaatttttagatatatgttattatttaaattaagtagtagacgcggtggtcgttgtagttttttcggtaattaggtcgtttagttttagttgtgttcggtttttggggtttttgttttgttttgttattttttacgtttgggttaaggattattaaggaggttcggaaggggatttcgaatttttaagtggtttaggagaagtgaacgttttttttttttttttaagtttttcgtttagttttgtcggttcggtttgggcgttgtggatcggtaatagtagttttattaggatgtaggtcggattaagtttttggggaaaattcgttgtaataattgttttttatatataatttttaattttttttttattttcgtttttaattcggagatttgtaaagtttaagaaagggaaaagtaattttatttttgatttttttatttaaagttaaaataataacgataatgatgatgtagggagaaagaattaaatagagaggttaattttatttataagaaagtgggtaaaaagtttaatttttgttttaaaaggtttaattttgtggttgagttttggtcgggtttttttttttttcggcgattgtagggagtttgtagggagttagtagggaggtagtcgttcgtcgttatggcggttttacgttcgcgttttcgtcggtcgtcgggaggtggcgcgttttgtttagaggttaaagttaattttttttttgttttttttttttttttttttttttttttttttcggaggttcgtattgaatcggttttaacgattttcggatcgttattatttgtaattatagagtatgaattattttttgaggttattagcgagaatttacgattggttaataaaagtacgtgattttttaacgtttttttattttttttttaatttttttttttatatttggtcgtatatatagtaaaacgaagtatagtgtatcgttataatttattaatatattataaatcgtgaagtatagggttataacgattacgatttataaattaagttttttaaaattatttaaatgagttcgtattttgtaaattttttttcggggcgttatttaaatggttcggattattagttgttaaattatggtagtggtagttttttgagcggtttttatagggatttcgttgttatgtatatcggtttttacggttataattataatgggatggattttagcgttaatcgtttttcggttttttttagttattttggggcggtgggcgagagttcgcgcgtttttttcgcgttcgtttaggagtttcgttttaggtaagcggtttcgagttgttttttgttttcgttcgagtttttgttttgtattaacggcgatagttacggcgttaagttttttgtttcgttttttttcgattaggcgattttagttagttttagcgttaattttatcgaaatagacgaggttagcgcgttttcggagtttgaggaagcggtaagttagttaagtagttttagtttagttcgggcgtagttagagtttatggttatttttatagtcgcgttcgaggggtagatttcgtagatatttttttggatgaggaagttttatattagttatggtaatttttttttttttttttgttttttcggttttttttttttgcgttttggggtgggatgggggggataaggagagtttggttttattttaaatatagatttatttttttaagggggagaagtatttaagaggggttttatagtttcgtagatagagttaaaaagggtttttttgttaagaggggggtatttttaataatttgtttttagtttcggtttaggtttttattagcgtagttgaattagttttaggataaaggatggggtttatataatgtggggaagggttttgtttatttttgaaattttgagattgtcgttagtaaagaaggggtgaatagtaaaaggagtttttcggggtaaaagtgtaatcgtttttttttttttcggggcgagcggtcgtttgagtttagttaagggtgaggtattaggagcgagtaagagataaagtcgggcgtattggttgtttgtagaagtgggggatgtagtagaaaggggtgtagaaatcgagtttgaatgtgggtatttggagtagagaggattggagttgtggtgagttgggtgtcgggacgtttgggttttgttttttcgtttttttttatttagtgtttttttttttaatcggaataatgttgttttgcggtttttttttatttgttttaga

SEQ ID NO: 906 - DNA, 6508 bp, Artificial Sequence
  chemically treated genomic DNA (Homo sapiens)
tttggagtagatagaggaaagtcgtaaggtaatattatttcggttaagggagggggtattgggtgggagggggcgggggagtaggatttaggcgtttcggtatttagtttattatagttttaattttttttattttagatgtttatatttaagttcgatttttgtatttttttttattgtattttttatttttgtaggtagttagtgcgttcggttttgttttttgttcgtttttagtgttttatttttggttgggtttaggcggtcgttcgtttcgggagggaggagagcggttgtatttttgtttcggaaagttttttttattgtttattttttttttgttagcgatagttttaaaattttaggggtaagtaggatttttttttatattatatgaattttattttttattttaaagttggtttagttgcgttaataaaaatttaagtcgaagttggaaataaattattaaaaatattttttttttaatagagagattttttttggttttgtttacgaagttatgaggttttttttagatattttttttttttagaaaaatgaatttatatttagggtaaagttaagttttttttgttttttttattttattttaaaacgtagagaaggaaagtcgagaagataaaaaagagagagagaattattatggttgatgtgaagtttttttatttaggggaatatttgcggagtttgtttttcgggcgcggttgtggaggtggttatgggttttggttgcgttcgagttaggttggggttgtttagttggtttgtcgtttttttaggtttcgaggacgcgttggtttcgtttatttcggtgaaattggcgttggagttggttgaggtcgtttggtcggagggggacgaagtagagggtttggcgtcgtggttgtcgtcgttggtgtagggtagggattcgggcgaggatagggagtagttcgaagtcgtttgtttgaagcggggtttttgggcgggcgcggggaaggcgcgcgagttttcgtttatcgttttaaagtggttggaggaggtcgaggagcggttgacgttgaggtttattttattgtaattgtagtcgtaagagtcggtgtgtatggtagcgggatttttgtaagagtcgtttagagagttgttattgttataatttagtaattgatagttcgggttatttggataacgtttcgagaaggagtttataaagtacgagtttatttgggtgattttggagggtttgatttgtggatcgtggtcgttataattttgtgttttacgatttatgatgtattaatgaattatagcgatgtattgtatttcgttttgttatgtatgcggttaaatatgggggggggggttggaaggggggtgggggggcgttagggaattacgtgtttttgttgattagtcgtaaattttcgttgatgattttaagaggtaatttatgttttatggttataaataatgacgattcgagaatcgttagggtcgatttaatgcgagttttcgagagagggggaaaaaaggagaagggggagaaatagagagaaggttggttttggtttttgagtagagcgcgttatttttcggcgatcgacgggagcgcgggcgtgagatcgttatggcggcgggcggttgtttttttgttggttttttgtaggttttttgtagtcgtcgggagagaaagaaattcggttaaggtttagttatagggttgagttttttagagtaggggttgggttttttatttatttttttgtgggtggggttagtttttttatttggttttttttttttatattattattgtcgttattattttaattttggatgagaagattaaagatagagttgttttttttttttttgggttttgtaagttttcgaattggaggcggaaatgggggaagggttggaagttgtgtgtgaaaaataattattgtaacgggttttttttaggagtttagttcggtttgtattttggtggaattgttgttatcggtttatagcgtttaggtcgagtcggtagggttgggcgggaggtttgaaaaagaaggagaagcgtttattttttttgggttatttggaagttcgaaattttttttcggatttttttggtggtttttagtttaggcgtggggagtgatagagtaggatagggattttagaaatcgagtatagttggggttaagcggtttagttgtcgaaaagattgtagcggttatcgcgtttgttgtttagtttgagtagtaatatgtgtttgagagtttgtaaagcgggatttttttttttttttttcggttattgtattcggaggttttattataggttttttattcgtagttaggtagtttgagaatttgtttggtggtagtcgttttttcggaaaaggggttttaaggattcgtatgttttgttgagtacgttgggcggttagagatcgtcgtagttggttttttattaggaggggattattttttttaaaaataagaaaggaagcgagagggcggaggaataaaggaaaatagtgatcgtagtttgttttttgggtgtcggtgtaagtagagagagaatgagttattttgggttgagaggatgatattaaaagttttattatttggttttttgttttggggtttttaaggagtaagggaaagttgtggttttcggtttgtgtttggttggtggttttatatttttttatttgaggttgattttttatttgaggttgatttgttatttgaggtgggaaggggtatttggagtttttagttgtagggtgagagatatttagtggttttattttttagtttttagagttataggttaggagcggagggttaaggttggcgaaaaaatttggttatgtggacgggttaaagattaggggtcgttgcgaaggtgaggatagaaaagcgttgtagaggtttttagattatggtttcgttttcgttagagagttttaggggttttagtggtttttttagtgttgtgtatatacgaggaaaggttagagaatgagagggatatagtatttttttattttttaagtttgtacggggagaagcggttgtgagttttagtattagggaaacgtagcgttggggtttgggtaggattgatcgttttagtttttattttagttgtaattttttagtcgaatagggttcgtttcggcgggttagggttttcgtttttgttgaagaattttggtttaggaaagatggagaggttgggggttgaggagagaggaaaaaatggtaggggaggattggaggtgatcgagcgtcgagtttttatatttttattattgttgttgttgttgttattattattattattattattattattattattattattatcgaagtattttacgtttagagttaagataagattataaatataatatatagaaaattaataaaatagaattttgtttttttttgaggtttttttttttatttttaggtagtatgtgttttttttagtggttttggggagggggtgggagagacgataggtttgggattagggagtttttaaggttttcgttgaggggatagcgaatttattattgaatcgtgtacgggggatatggataaaatgagacgcgatagggataagagtattttgttttgtttttaggaaatattaagtgagttcgttttttagtttttattaggaagtttgattaggttgaggcgagtttttcgggaaggaagggcgcgcgggatgttgggtgggttcgagtagtgaggttttagagtattcgtcgggagttgtgcgggcgggggcgtttaggagagcgttgggtttcgtttgtttgcgtcggagagtaggttttttggtttttttattcgagagttttttttttcgggtttttttgacgttcgtggttttttataggttttttttttcgcgttttttttttttttttagtatttttattcggtttgtttttttttttttttttcggtattgagttgagacgcgttgagtagtttgtttttttttttttattttatgcgtcggttttggaattatattttgatttgttttttcgttaggtatagggcgtgcgcgatttcgatgcgtcgtcgtcgcgttaggtagcgattgtagtgaaattttttttttagttttagcgtttggtaacgtgtgtatgtttggcggtttcgtcggtcgttgggtttaaaggaggaatttgttacgtagagtggagatgttgaggtttgcggttatcgggtttaggatttttttttttagtcgattttcgaatatagattttagttagtatcgggatgttttttattttgtcggtttttttttttcgtttcgtatttttttagcgttttttttagatttttttttagttttttaggtttgtgtcgtttgtttagattttagatgggggaggggaggagtagtttgaatttttatttgagtttggggggaggggttggttaggtgtgtttttttttagttgtattttgtttttttttttttttttatttattttgtttttatttttcgttatttttttaatttaatgataaatttaggtcgttaattcgtaatgacgtagatcgatttatagtttatattaacggttttttattttcgagttcggttaatggatattagttgggatttaaggttaataaataatttaatttgagatttcgcgtttgtttttttttttttcgtttcgtttgtttttttttttttttttttttttatttttttttttttttttgattattattttttttttggtgttttattttgttttagttttttatttatagggaaatatagttttagatagatttaattttttttttttagcgttattttttatttttttgtatgacgtatttcgtttttaatggagtcgtttttggttggggaattttattagggttgggagaggggggttgggggtttaaagtaaagttaagttagtgattgtaggtttttgtttttttttttgttttggaatttcggttttggttaggcgttttaggagagtatatttgttttttatggtttttagtgcggttgggattttgtaaattttgtaatttttgtttaataggggatatagcgagagattttcggtcggcgtttaatttttttttattttttaattgagatgtttatttagtattttgtgggagattggggtagggggcgtttattagttttgtgtttcggggtgggcgtttaggggagtcggggcgacggcgacgggaagttttatttattgttgtacgaatttattcgttgtatttacgggtagatcggagtggagtatttttgtttttttgtttcgtcgaatacgtttttgttttgcgcgtagttcgattttcgcggttcggggtggaacgggggttgttcgtcggcgtcggagagtgcgtaggtcgattttttttcgcggtagaaggtcggcgtcggttcgtagtcgtagggcgtcgttcggtcgtagttatcgttcgtcggcgggtaataggaggaagtggtaaagtttttgttttggttcggttttggttcgtagggcgcggggtaatgttttagcgggttcgtatagttcgacgaatagagcggtagttggtttaggaaggatttttgttcgttggttagagtgacggggaaggtggagtttacgaaataggaatttattgggaggggaggcgcgcgcggtcgttgttgtttcgtcgggtttatgatttgttgtgttttatagttcgagcgtcgcgtttattagtagtatattcgagattgggttttagttgaggggggatggcgaggtgttagtgagggttagaaggaaatataattatttgatttaatattgattaatggtagaggtaggaattgttaaatagtatttaggaggagcgtagttcgtacgagggattcgcgtataaatttattaatttttttttttttttttttttttttcgttttttttttttttttttttaataatataacgcgttttgttttatttacgtaggatttgtgaaataggtttagtgtttttgagggaggagggaacgtttagattgagattattttattttcgggtgattaaataaatatgttttttttttattttacgtaggattggaaaaagttaattgtgtttttagaaaagttaatttttgcgttgtttcgattttttttttttagggagggttgggtaaatgttttcgaatcgttttgagagagaattaaagaaggtttgtttttagggttttgtgtcggtagaaggtgagaagagtttttcgttaagataagtaaagaagaaatatttttttttttaggttttgaatatcgttttttttgtttattagatttgttttgttttttttaagtttcggtttattgtttttgtttttttataatttttttggtttgagggggtaggttagattttattgtttagaagatttagaagaggaggagttggtaggagggattgagttta

SEQ ID NO: 907 - DNA, 6677 bp, Artificial Sequence
  chemically treated genomic DNA (Homo sapiens)
ggattgaaaagttttttttgttttaaaggagtaatgattttgaagaggtttaattttttggttaggtttttagattaaatatttgttttttgagtagtagcgggttttttgaggtgaagtggtaaatatttttggtttatgattgtaggtaataaaaatttgttcgggttgttcgaggggaggggcgtcggtaaagtcgtagttgtagcgaagtttcgcgtttgtcgttgtcggagtttggttttttttttacgcggggggttgcgggtaattggggtcgataatttgcggtttcgttttgggacgtatgtttgttcgagagttggggttgtagggtgtagtgggatagtaggatcgcgaaagtttgggtttcgagtttcgggttttttgtttttaggcgaagtgcggtttttacgggtgtaggtttcgttgtataagggaagatttagatttcgagttttcggtaggttagtttttagttttttgtttttttcgggttttttcggttgtttttgttttttttttttttattttcgtcgtaatttcgcgttttacggaggaaggtcgtggtgcgggagttgggggatattttttttttgggttcggtttacgtagatttatcgtttgtttcgagtttttgtgtttttagacgttacgggaaaatttgtagggatatttagcgttaggcgtggggaattgcgcgtcgtcgggtcgggaagtggagtcgaatattgttttttcgtttttttttcggttttttttttcgtgtttgggtattttttttatttttatttttttgttttgtcggtaaggataatgtggattttttatagagataatggattttgcggaatggagataggtaggtagatagatatttttttttattttaagttatcgatagagtgagaatttattggattttttagtagttttgttagggaagtgtattttaaggataattttttattttgaaatgtcggataaaattttagtaaattagggttttagtttttattttttaaaaaaaggtaataagttattttgggtttttggtttttgttttatttttttgcgttttttttatagtgagattagtgtttttttttaaaggaaagaatttttattgtgtttaattttttttaaggttggagaagttttttttattttaaagaagggttcgttgttttgtatgaggtaaatttggttttattaaataatgtttttgatttggagggggtttggaattgttgttgttgtaaacgatttttatttgataaagtttaatcgtgttgtgaaatttaaacggaatatgttttaaaggtagaaagtatttaaatgtggtttttattgtttagttgttgttagggttttttttttttataataggtttggtttgttgttgttgttgttgttgttgttttttttgatatttttaggttgagtaaaattgggtgttgtttggagagggaaaattagttttaaagttggtagaatatagatttggttaagaatattgtttagttatttttgttagatttaagattttattttggaattaagattttatttttatattaaatatttggttttttataagttaattaggagggtgttttgtattttttgattttggttattaagataagtgtttttaaaggagtttttaggattttattttgatagaattttgtgattttggttttaatggttattgattatgtggttaattgagtttattgttgttttggtaagtagagtaattttaataaatttaaattatagtttgtatttgtttatttttttaaattaggataagagtaaaatttgaaagattatttattaggttgaaaggagagaatatgatttttagaatagtattgatgtttaaaaaggatgtttttggaagaaaaggaggaagaggagtaagtgatgggagaatatagtgggattttgggtattatagggttattttgagttttttattaaaattaggaatagcggtaaaattggttttattgaagaagatatacgtttggagatatgtgtagtttttaaggatttttatttaataaagtttatttttgttgttaaaaatttttgtataatgtatttatatataaatataaggtttggtttgtgtttttggttatttaaagaaattgatttttagtaagtttaaatttgaatgaaatgtttttgtaaatttagttttaaaattttttttttatttggtatttttggtttgtaaattatgtgttttattagtttataaataaagtagttttgattttgttttgtatttaattatagttttaggagttagtagaatttgtttagaggtgttgggttttggagtttaagtggataaagttagattttttttttttagggtaaagtttttttatagggttgggattttaaaggttatgttggaagtaggtttagtagtaggatattaaggggtaaagtttttaatttaaaatttttttggtttttgaataattattaggatggatagagaaaatttttgttttgttttgagagggttttatagggtttttggaagtagagttattattgagaaattttttttaatttgagtagtaatttagattttttttttatttttgtataatttaatttgttgaatggaaaatttagttagaagtgatgggttgtttgaaattaataaaatttgatatattttttttatttttattttattttattgttaaatatataattgattattaaaatgtatttattagtgagaaaatgaagtagaagtttaaggtataaaattatagggatatttaattttaagagattgaaagtttgttggttttatttatattttagaaatattttaacgaatttgttttttggagttataaaaagttaaaattatttttatgttttttttgtttgaggaagaaaaaatgagataaagggaaaataaaagtattttatggtggtttatggttggtggtttggtattaaaattgttttataaagatttagttaaattttttttaaaagttagtaattttgtcgtttcgttatagttggtttttttaaaatgttggttgaatttttattgttgatttttgttttttttttttaaatagtgaaaaaaatttttttattagtaaatttttattttttatgattttttgtaaatttaggttttttttattttaaatttgattatgaatatgtttagaattttaaaacgatgaaacgaatttttttgttttttttttttaatattttttttataatttttttttttatttgagttttttatggttattgcgttttgtatgttaatatttttaatattagtagtttattttgaaatgttaggttaggttaaggagggtttttttggtttttttttttattttatttagggtatttttggtcggggaatagtggtgttgggtgataagtttttattaattataggtttaggggagtgatttttttggagatgggttggtttggggagtgtatgttatagaattaaatgggttttgaaggattttatatttatttttagaattttgggtttattggatttaatattgtttttaaggtagagttttaaagttatagtaggatttttattggtgttttattagttgttgagattgagggatggtgggttggagttttgaggttgaggagtaatagaaagggatgatgagggatagggttgtaatttttaatattttggtagtttggttttagagttggatttagttttattagtattgttttgagtttatttaattttttgaagttagatcgtttttttgggttgtttttattataaaattcgaatttgtttggaataagcgtttttttaatttgttttttttagttttttgtagttgatagtttggaaaaggaagcgaaataaaggtttttgggaaagtgaagtttttaattaatttggtgtgagaaacgggcgggagtgggtggtgattgtaaaatgcgaggtcggtcggttgttggagagatatagaagttttacggtgggaggttgagtggttttttttttcggcgtcgtttttagggtttttttgcgggtcgaagaaggattcgcgggagttgagaggtttaggtcggaagtattttcggttggtttaagagtagaggcgaagagcgttgagtaggtatttatggatttttttttttgggatagattgttaggtttattgcgtcgatgtttgttttttatttgtttaagtttttgtcgttagttttaagggcgttttatgggtatttttcgaacggatagcgtgtgtgtataggaagggtttgttttaatgttttttatttgtgtgaaatgtttttgtcgggtattagtgtataaggtagggtaaattagtttattcggatttggggtttagaagtcgattaattgagggatttagtaataggataaaaaaatgggtttgtttttatattattttgattatttttgtttttcgtttttattttgttgtgtaattcggggagtcgaggagaggtggtaaaaatagcggttgtcgagataaggcgtaggttttggcgttcgttttagtcgtagatagggtttgggatgggtcgtcgcgtaattaattcgtgggggtggttgtagcgcgtacgtttgggtcgggggggagggcgggaatgggaggtggattttgtaaggggtaggagaggggtgggggtcggagtgggtgggtttagttaggtttgggtcgggagttaggttttttcgcgtttttatttttacgtggtcgcgcgtagttaatggtacgttttcggcgggggttttcggggcgggaggcggtttttcgatcggtttaggtttttttttaatttgaatttcgtttttataaacgtttcgcgatgagttaatttgttggagggtaggcgggtcggaggcgggaggtttatagagggagagagggttagaggaagagggcgggagcgagcgaattagagagaaaggagaggagggaggaggcgcgtcgcgttatggtgttttgcgcggggttagggttagggtcggggtcgggttaggtcgggttatgagtcgcgtcgggagttgggatatggacgggttgcgggtagacggcgggggcgtcggtggcgtttcggttttttttttttttttatcggtggcggcggcggcggcgttaggttagtgtcgcggtttttttttcgcgtttgtgttcgtcgggacgtattcggggcgggcggcggcggcggtagcggcggttgcggcggcggcggcggtagttttcggttttgcgtatttcgggatttttgagcgtacgggttttttttcgtcgtcgtttttttttgtcgttgtagcggcgcgttcggaggtttttttagttaaagagtgtttagtatttacgtttgtagcggtcgttgtagcgttttcgagcgttttagcgttgggttacggttattatttcggtaacggttattatagttgtcgtatgtcgtacggcgtgggtttatagtagaatgcgtttaagttatcgtcgtacgtttcgttgggaggttttttcgtggagaagtatatggacgtgttaggtttggcgagtagtagcgtatcggttaacgaggtgttagcgcgagttaaggaggtatttttttattagggttatacgagtttttattagtacgtgttcggttatatcgatatggtgtttattttcggtttcggggagtttcggtacgaggtttatatttttatggaggggtattagttttggacgttggttaacgggtggaatagttaggtgtattgtattaaggattagttataggggttttatttttggaaatttttttttttaggtaggggcgatggagaaaagggatcgatacgagggagggggagagagaaggagaaaagaaaggattaagagtatgcgtttttatttgggagtgggagttgtgtttgtgttttatacgtgattagggttaatttagtggaaatttgtttagttcgtgtgaaatttgtaaattttttttttgattttaattgttttcgttattgtttttttttttttgtgtgtagcgtagatacgttttttttttaaagttgagagtttttgcgtgttttttttttgggtttttttttttttttttaaagagaatttttttttaagaaatttgatagagttgggtttttttatttttaaagatattattgttttaagatgattattaaagtttgttagattaagtttacgaatttttaatataggaacgcgggaaattaaaatttgagtaaaagatttgagttggtatgtgtttatgtatgtaagtttgtttttatataatcgatatttgtagaaattgtttttatgaacgtgtttaataattatattataaaattgtaagtttgttaagatgtcggtttgagaaattatgataattaattaaattaattattgttgttaagtgtaaataatttttttttaataataggtaagtgttatgtttatgtatataataaagattaaatagtatggtattttttaaaaattttttgtatttttgtaaacgtatatatatatatatatatatatatatatataatttttagttaggtgtttcgaatattttagtttaattttttttgtgtttttgtttgtattagg

SEQ ID NO: 908 - DNA, 6677 bp, Artificial Sequence
  chemically treated genomic DNA (Homo sapiens)
tttgatataaataaaagtataagaaaaattaggttgggatattcggagtatttagttgaggattgtgtgtgtgtgtgtgtgtgtgtgtgtgtgtgcgtttgtaggggtgtaggaaatttttaaaaaatgttatgttgtttggtttttattatgtatatagatataatatttatttgttattaaagaaggattatttgtatttaataataatggttaatttgattgattattatagttttttaaatcggtattttaataagtttgtaattttatggtgtggttattgggtacgtttatgaggatagtttttgtaaatgtcggttgtataaaaataaatttatatatatagatatatattaatttaggttttttgtttaaattttgatttttcgcgtttttatgttaggagttcgtgagtttgatttaataagttttagtagttattttggggtagtgatgtttttgaaaatggggggatttaattttgttaggttttttaggaaaaagttttttttaggagaaaagggagaggtttaaggaaagggtacgtagagatttttaattttaggagaaaaacgtgtttgcgttgtatataggaaagaaagggtagtgacggaggtagttgaaattagaggaggaatttatagattttatacgaattggataaatttttattgggttaattttggttacgtgtggagtataggtataatttttatttttaagtaggggcgtatatttttagtttttttttttttttttttttttttttttttttcgtgtcggttttttttttttatcgtttttatttggaaaggaagatttttaaaagtgggatttttgtggttggtttttggtgtagtatatttggttgttttattcgttagttagcgtttaggattggtatttttttatggagatgtaggtttcgtgtcgaggtttttcggagtcgaaagtggatattatgtcgatatagtcgggtacgtgttggtaagggttcgtatagttttggtagaaggatatttttttggttcgcgttggtatttcgttggtcggtacgttgttgttcgttaggtttgatacgtttatgtatttttttacgggaaagttttttagcgaggcgtgcggcgatgatttgagcgtattttgttgtaagtttacgtcgtgcgatatacggtagttgtagtagtcgttgtcgaagtggtagtcgtagtttagcgttggagcgttcgggggcgttgtagcggtcgttgtaggcgtgggtgttgggtattttttggttgggggagttttcgggcgcgtcgttataacggtagaagaggacgacgacgaggaagagttcgtgcgtttagaggtttcggggtacgtaaagtcggaggttgtcgtcgtcgtcgtcgtagtcgtcgttgtcgtcgtcgtcgttcgtttcgaatgcgtttcggcgaatataggcgcggagagaaagtcgcggtattggtttgacgtcgtcgtcgtcgttatcgatgaggaggaggaagaggtcggggcgttatcggcgttttcgtcgtttgttcgtagttcgtttatgttttagttttcggcgcggtttatggttcggtttggttcggtttcggttttggttttggtttcgcgtaggatattatggcgcggcgcgttttttttttttttttttttttttttggttcgttcgttttcgttttttttttttagttttttttttttttgtgagtttttcgttttcggttcgtttgttttttaataggttagtttatcgcgggacgtttataaaaacgaagtttaggttgggagggggtttgggtcggtcggggggtcgtttttcgtttcgagggttttcgtcgggggcgtgttattggttgcgcgcggttacgtgggggtaggaacgcgggggagtttggttttcggtttaggtttggttggatttatttatttcggtttttattttttttttgttttttgtagggtttattttttattttcgttttttttttcgatttaggcgtacgcgttgtagttatttttacgagttgattgcgcgacggtttattttaggttttgtttgcgattgaggcgggcgttaaggtttgcgttttgtttcggtaatcgttgtttttgttattttttttcggtttttcgagttgtatagtaaaatgaagacgaaggatagagatgattagaatgatgtgaaaataggtttatttttttattttgttgttgaattttttagttagtcgatttttagattttaaattcgagtgagttaatttgttttattttgtgtattggtattcggtaaaggtattttatataggtaagaggtattggagtagattttttttatatatatacgttgttcgttcggaaaatgtttatgaagcgtttttggggttggcggtagagatttaaatagatgaaagataggtatcggcgtagtgagtttgataatttgttttagaaagaaaagtttatggatgtttatttaacgtttttcgtttttatttttgggttagtcgggagtgttttcgatttgggttttttagttttcgcgggttttttttcgattcgtagaaagattttgagaacggcgtcgggggagaaagttatttagttttttatcgtgaaatttttgtgtttttttagtagtcgatcggtttcgtattttgtagttattatttattttcgttcgttttttatattaaattaattgaaaattttatttttttagggatttttgtttcgtttttttttttaagttgttaattgtagagaattgagaggggtaaattaagagggcgtttgttttaagtaaattcggattttgtgataggagtagtttagagaaacggtttgattttaaggggttaggtgggtttagggtagtgttggtggggttaggtttagttttggaattaagttgttagggtgttagggattatagttttgttttttattatttttttttgttgttttttagttttagagttttagtttattattttttaattttagtaattaatggggtattaatgagagttttgttgtgattttggggttttgttttaggaataatattagatttaatgagtttagggttttgggggtggatatgggattttttagagtttatttggttttgtggtatgtattttttaagttagtttatttttaagaaaattatttttttaagtttgtgattggtgaaagtttgttatttagtattattgtttttcgattaaagatgttttgagtaagatgaggaagagagttaggaaggttttttttggtttggtttggtattttagggtaggttgttggtgttaggagtgttgatatgtaaaacgtagtaattataaaaggtttaaataaaggggaaagttatgagaggggtgttggaaaggaaaagtaagagaattcgttttatcgttttgaagttttagatatgtttatgattaaatttgagatgggaggggtttgaatttataggaaattatagggaatagaagtttgttgatgagaaaattttttttattatttgggaaaagaaggtaaaagttagtaatgaaagtttaattagtattttaaaaaggttaattgtggcgaggcgataggattgttaatttttaaagagggtttggttgggtttttatgaaataattttggtattaaattattaattatgggttattatgaaatgtttttattttttttttgttttatttttttttttttagatagagaaaatatgaagatagttttaattttttatgattttaaaaaataaattcgttgaaatatttttaagatataagtagaattaataaatttttagttttttaaaattaaatatttttgtggttttgtgttttgggtttttgttttatttttttattgataagtatattttaatgattaattatgtgtttaataataaagtaaaatgaaaatgggaagaatgtgttaagttttgttgattttaagtagtttattatttttggttgaattttttatttagtaaattaagttgtgtaggagtgggagaaaaatttgaattattatttaggttgaaagggattttttaatggtggttttgtttttaaaagttttgtgggatttttttagagtagggtaaaagttttttttgtttattttaatggttgtttagaagttaggaagattttgaattaggagttttgttttttgatattttgttgttgaatttgtttttagtatagtttttggggttttagttttgtgggagggttttgttttgaggaaagggggtttgattttgtttatttgggttttaaagtttagtatttttggataaattttattggtttttagggttgtggttgagtataaggtaaagttagggttgttttgtttatgaattaatgagatatatagtttataagttagggatgttaggtagaggaggaattttgaggttgaatttgtagaaatattttatttaggtttaaatttattgggaattagtttttttaggtggttaggaatatagattaagttttgtgtttgtgtgtgggtgtattatgtaggggtttttaataatagaaataggttttgttaagtgagaatttttggagattatatatgtttttaaacgtgtgttttttttagtgaaattagttttgtcgttgtttttgattttggtgaaaaatttaggatgattttatggtgtttaaagttttattgtatttttttattatttgttttttttttttttttttttttagaggtattttttttaagtattagtgttgttttggaagttatattttttttttttaatttagtagatgattttttaaattttgtttttgttttggtttgggggaatgggtagatataggttgtgatttagatttattgaagttgttttgtttgttaagatagtaatgagtttaattaattatataattagtggttattaaggttaggattataggattttattagagtggggttttggggatttttttgaaagtatttgttttgatggttaagattaggaagtgtaggatatttttttaattaatttgtaagaagttaaatatttggtgtagaaatagagttttaattttaaagtaaaattttaagtttagtagaagtggttggatagtgtttttaattaaatttgtgttttgttaattttggagttaattttttttttttaggtaatatttagttttatttagtttggagatattaaaagaaataataataataataataataataaattaaatttattgtgaaaaaaggggattttagtaatagttagatagtggaagttatatttgagtattttttatttttgagatatatttcgtttgggttttataatacgattaggttttattaaatgaaaatcgtttgtagtaataatagttttaaattttttttaaattagaaatattatttggtggaattaggtttgttttatgtaggatagcgggtttttttttgggatggagagaatttttttagttttggaaaaaattaaatatagtgaggatttttttttttgaagagaagtattaattttattgtgaaagggacgtaggagggtggggtaggagttagaggtttagagtaatttgttgtttttttttggaaaataaaagttgggattttaatttgttgaagttttattcgatattttaaggtgaggggttgtttttggaatatatttttttagtaaaattattgggaagtttagtaaatttttattttgtcggtagtttgagataaaagaaaatgtttgtttatttatttatttttatttcgtagagtttattgtttttatggggaatttatattgtttttatcggtagggtaaagggatgaaggtgaggaaagtgtttaagtacgaaggggggagtcgaaagggaggcggaggggtagtgttcggttttatttttcggttcggcggcgcgtagttttttacgtttggcgttagatgtttttgtaagttttttcgtggcgtttgagggtataggaattcgaggtaggcgatgggtttgcgtagatcgagtttaggaagaaagtattttttaattttcgtattacgattttttttcgtggggcgcgggattgcgacgggagtgggaggaggaaagatagaagtaatcggagagattcggaagggatagagagttagaagttggtttgtcgagggttcgaaatttgagtttttttttatgtagcgaaatttgtattcgtggaaatcgtatttcgtttgaagatagggagttcgaggttcgaagtttaggttttcgcggttttattgttttattgtattttgtagttttagttttcgagtaagtatgcgttttaaggcgggatcgtaagttgtcggttttaattgttcgtagtttttcgcgtaagaggagagttaggtttcggtagcggtagacgcggggtttcgttgtagttacggttttatcggcgttttttttttcgggtagttcggatagatttttattatttgtagttataggttaaaagtgtttattattttattttagaggattcgttgttgtttaagaaataaatatttagtttggaaatttaattaaaaaattaggtttttttaaagttattatttttttagaataaaaagggttttttagttt

SEQ ID NO: 909 - DNA, 6535 bp, Artificial Sequence
  chemically treated genomic DNA (Homo sapiens)
tgagatagggttttattgttatttaggttgaagtgtagtggtatgattatagtttattatagttttaatttttaggtgtaagtaatttttttattttagtttttagagtagttgggattataggtatgtgttattgtttttggataattttttacgtattttttgtagagacggagttttattatgttgtttattttattttatatggtttttaatttttgggtttaagtaatcgattcgttttggttttttaaagtattgggattataggtatgagttattatgtttggttggtagagtgaatttttaaaaattatattttttttttaaaattaaaatttttttttttaagtttttttgttaattgttgttttggtttattaatattttaagtttttttgttttttatttttttaagaaaatatatgtttattttttttggtggagttttttgatttgttattttttattttgatttgtttagtgatagagagaagttttttgggttggattttgtttttttttaagttaatgaaagatgtttagggtaggaaggttgtgtgtgaatgtttttttgttgtttaagataaggggttagagtaatagagtttagggtatgtttagaggaggaacgtgaatttttacgtatttggtgagtaaataattgttttataaaagtggtgagaaatgttttattttagatattttaggagggtattagtttgaggaggaagtttttttttttattttataggattagtattttttttatttttttgaggatttatagagttgtagaaatagaggttattttttttttttgtggaaaagtagtagtaattggatagaaaagaaaaaagaagtttggggttgtgatatttgtaagattttagatagaggattgtgagaggttgagatttgatagtttttgtggggagggatgatggattggatgaggtgggagggggaggagggtatgaggatgttataggatagaagtgttttaggtttagtggaattttttatagtttatagtgcgggttttttttggaaaacgtagggtgtagttttttttttttggttattgaaggaagatttgggtggtaaagtataggtaaagataagttgtgatagaggatagtaggaatttagggatttagggagtagaattttaatatttttattttagatttagttagagtagttttatttttattattgtatatattagttttattggttaatatttgttatttatgagtgttttttacgttttgtagtttaggatagttattttttatttagtttatgattttgtgggttagtaatgtgggttgggtttagttggaggtggttttggttaggattagttttagttgattttggtaggagtttatttatgtatttgtggaggatttttggaaatttggggttggttgtttgttagttggaatgtttgggttttattttatggggattttttattttttagtaatggaggaataatttgggtttatttatagggtagtttttagatttcgggtgttgtaaaagtagttaaattttaatttataagtatgttttaagattatttttgttatatttgttattattttaatatagttatagagttaattttagattttaggggtggagaaatgggtttttatttatgattgaagagttgtagtttattgttttatatttgtagggttggggagaagttatggacgtttgaaatgtagatttttatatttttatatatatttgttggatttaatttatggaaaaggggttttttattatgtttttcgggtgatttttttttttttaatattttaaaatattttatttgatatttataatatattatatgtgatatatatgtgtgggtatatatgtgttttattaaaaataaagtataataatataatgtacgttaatgaatttattatttagtttaaaagttgggttattaataatttatttatatttatttaagtgttttttttttatgttttttttttatttttttttgagatgtaatattttatattttgggttttttattttaataagaaatttaaaaatatagttttgattttttgatatttatgtttgaataatatattgttgagttttttttttttttttttttttttttttttttttttttttttttttttttttttttttttttttttttttttttttttttttttaataaaaataagtttatttatttattttttgaattttttgtgttaaaatatttgtaatataaaattttcgattttaattattttgaagtgtataattcggtagtatttattatattagtaatgttgtgtaattattattattattagtttttaaaatttttttattattttaaataggaattttgtatttattaagtaattattttttattttttgttttttttagtttttagtaaagtttaatttatttttttttttatgtatttgtttattttttagatattttattataagtggaattaagtaatatttgtttttttatgtttggttttttttatttagtatgtttttaaggtttatttatgttgtagtacgtattaattttatttttttttatacgtgaataatattttattgtatgtagatattatagtttgtttatttatttgtttgtggatggacgtttggattgtttttattttttggatattgtgaaaatgttgttatgaatattggtgtatacgtttttgagtttttgattttaattttttgggtgtatattttgaagtggaattgttgggttagatggtaattttatgtttagttttttgaggaacgataaaattgttttttatagtaattgtattattttatatttttattagtaaggtaatgtattagggttttaatttttttatatttttgttaatattttttttttatatatatatatatatataaatttgtagttattttagtaggtgtgaagtggtgttttattgtggtattgatttgtaaatttttttattgatattttttaatggtgttgagtgatttttttttttttttttttgacgacgtttcgttttgttgtttaggttggagtgtagtggtgcgattttagtttattgtaaattttgttttttaggtttaagtaatttttttgttttagttttttaagtagtagttgggattgtagatgtatgttattacgtttgattaatttttgtatttttagaaaatatggggttttattatattcgtattggttagattggttttaaattttcggttttaggtgatttatttatttcggttttttaaggtgttgggattataggtgtgagttattttttagttttgagtattttttatgtgttttttggtattttatgtatattttttggagaaatgtttatttaaattttttgtttatgttttaattgtttgtttttttgttgttgtagttaggatatgttttggataataattttttattagatatagaatttgtaaatatttttttttattttgtagattgtttttatttttttttttgagatagagttttgttttgttatttaggttggagtgtagtggtgcgatttaggtttattgtaatttttgttttttaggtttaagtaatttttttgttttagttttcgagtagttgggattaaagtatgcgttattatgtttggttaatttttgtatttttagtagagatggaattttattatattggttaggttggttttaaatttttgattttatgattcgtttattttagtttttcgaagtgttgggattataggcgtgagttattacgtttggtttgtttttattttattaatattgttttttgatatataaatgtttatttcgatgaagtttaatttatttaatttttttttgattgttggtgattttggtgttattatttaagaatttattgttaagttttatttggttttgatttttagaagattgttattatattgaaggtaattttttgaaatttgcggtttttttttaaaaattatgtttataagatgatttatgtttttgtagagtttatttattttatgttgtataatattttattatatttatatataatgtagtattgatttttttttttgttgatgggtatttgttttgtttttagttattttgttattatattagtgttattatgattatttaaaagtaatttttttgtatattttaatttaagaataattaattttttttaatgaataaattaattttgtattgagttgttattaagttttagttgattagtatttgggatatatataggtgtagatatttgattgagatatattgattttttttatttgtttatttaggttaattattagattataaaattatgagaattattgttattgagtatagtttgtgttagtttatattatagttttaattagttgtgtgattttttgtaaagagtaattagagaagatataataaatatatttattgattttaggttggagagtttttaagtaatagggagatggttatatataaggtggagaaaattattgtgaaaaggaagtattttttttagagttttatttaagttaggttgtagaaatgtttataatgggtttgaaaaaatttaaaatgagtttttttgtagtgtgaaaattttttaagataaagagatagattgatggtttttgtcgtcgttttgttttgtttagttgttgattttaggaaatattttggtaggtttgtgggttatagagttgttaggttttttgggatttgtaatagaatattataagaaaattaagtgtgaagtaagagtttaatttttaataggggtattgtttgtggttttgttattggaaaagatagtgattttattagggttaaagtttgtagatataggaattacgaaatggagaagggggagaagtgagttagtggtagtataaaaagattagtagatgttttatagtattgtttttttagaggtaagattaattaagatgaggtgggtttatagtttttttttttgttttttttttggttttttattttagttttttttgtatatatcggtagagatgtagaaatagaataaagaaacgggtaaatgggttaaattatagtgaattaaagggtttagtgtgttaaattttttttttttttgtatttatagaagatagtgttgttgttttttttaggagataagatttatttttaggagtgttttttttttttaggttatatttttgattttatagggtatgttattagttttcgtggtaggttttttggtattttgagtatatttattagtagatatttttttttttaaaaatgtataataaggaagattaatagtaatatatttgaatgatataattaattgattagtatttgggatatatattaatatttgggatatatttaattaaggtatttagattttataaaaataaatattttttgaaatgttgaaataataagattagaaattttttttttttttgagatggagtttcgttttgttattaggttgtagtgtagtggtatgatttcggtttattgtaatttttattttttaggtttaagtgatttttttgttttagttttttaggtagttgggattataggcgtgcgttattatgtttatttaatttttgtatttttagtagagacgggtttttattatgttggttaggatgatttcgattttttgatttcgtgatttgtttgttttggttttttaaagtgttgggattataggtatgagttatcgtgtttggtttagaaattattttaatagaagtaagtagtgttcgaatggttggtatttgttagtgagatggtgaattggtagacggtatttgtgggttaatgtttatggttatcgttttgtttttggatattagtttttttttaggtaattttttggtattttggggttttagatattattttttaaaggtgaattattataaaatattagaaatatttacgtgtttaaaattatatatttaaggaattttttattacggaaaatattaagaagtagaggaatagtatagtaagtttaaagtttttatttttgagttatttatattttattattattatttttgcggtgtttgagggaggttttttttttttggagggtttttgtattattgttaatgtatttttttgaatgtagttagaaattgagtttatttttttatttatgtgtttttttatttttttttgaagtttttgtagaatttttagtaggatagggtttgttggaagtttggtatgtttagaagttgttaaagtgtgtatgggtaggtgtgggggtaattttttggttttagtatttttatatatcgatttttttttttggttgttaagtgggaggagtgtgtgtgtatgtatgtgtgtgtgtgtgtgtgtatatgtatgtgtgtgtggatgtatgtatgtgttgtgaagtagggagattagttttttatttttttttgttttttttttgtagt

SEQ ID NO: 910 - DNA, 6535 bp, Artificial Sequence
  chemically treated genomic DNA (Homo sapiens)
attgtagagagaagataaggaggagtggaaagttagtttttttgttttatagtatatgtatgtatttatatatatatgtatgtatatatatatatatatatatgtatatatatatattttttttatttagtagttagaaaagaaagtcgatatatggaagtgttaggattaagaaattgtttttatatttgtttatatatattttagtagtttttgagtatattaagtttttagtaagttttgttttgttgggaattttgtagaagttttagagagggatagaaaggtatataggtggaggggtgggtttagtttttggttgtatttaggaaagtatattggtaataatataggagttttttaggaaagagaaattttttttagatatcgtaaagatagtggtaataaaatgtagataatttagagatgggaattttgggtttattgtgttatttttttattttttgatatttttcgtaataaaaggttttttaaatatataattttaaatacgtgggtatttttagtattttataataatttatttttaggaaatggtatttgaaattttaaaatgttagaaggttatttggaagagaattggtgtttaaaagtaggacggtggttatgggtattgatttataggtgtcgtttgttagtttattattttattaataaatgttaattattcgggtattatttgtttttattaaaatagtttttaggttagatacggtggtttatgtttgtaattttagtattttgggaggttaaggtaggtagattacgaggttaagagatcgaggttattttggttaatatggtgaaagttcgtttttattaaaaatataaaaattaggtgggtatagtggcgtacgtttgtagttttagttatttgggaggttgaggtaggagaattatttgaatttgggaggtggaggttgtagtgagtcgagattatgttattgtattgtagtttggtgataaagcgagattttattttaaaaaaaaaaaaagtttttagttttattattttaatattttaaaaagtgtttatttttataagatttaagtgttttaattagatgtattttaggtattagtgtgtattttaggtattagttaattaattgtgttatttaaatgtgttattattagttttttttattgtatatttttaaagaggaaaatatttgttaataaatatatttaggatgttaggaagtttattacgggagttgatgatatattttataaagttaaaaatgtaatttgaaggaaaaagatatttttgagagtaaattttattttttgggaaagatagtagtattgttttttatggatgtagaaaaggagaagatttaatatattaagttttttggtttattataatttagtttatttgttcgtttttttgttttatttttgtatttttatcgatgtatgtaaaaaagattgaaataaagaattagaggaaaggtaggagggaaagttgtggatttattttattttggttggttttgtttttggaagagtagtgttgtggggtatttgttggtttttttatgttgttattagtttattttttttttttttttatttcgtaatttttgtgtttataaattttggttttggtaaggttattattttttttagtaataaaattataaataatatttttgttaagagttgagtttttgttttatatttgatttttttgtgatgttttattataaattttaagaaatttggtaattttatgatttataaatttgttaaagtattttttgaaattagtaattgggtaggatagggcggcggtaggaattattaatttgtttttttattttggaggatttttatattgtagaaaggtttattttgagtttttttaaatttattgtagatatttttgtagtttagtttaggtggggttttaaagaaagtattttttttttatagtaattttttttattttgtgtgtggttatttttttattgtttaaaagttttttagtttgaaattagtaaatgtgtttattgtgttttttttgattgttttttgtaagaaattatataattagttaaagttatagtgtagattgatatagattatatttaatggtagtggtttttatggttttatagtttggtgattagtttaaataggtagatgagaaaaattaatatgttttagttaaatgtttgtatttgtgtgtattttaggtattagttaattgaaatttagtagtaatttaatataaggttgatttatttattaaaaagggttagttgtttttaaattagagtgtataaaagaattatttttggataattatggtgatattgatataatagtaaagtaattagaaataagataaatgtttattaataggaggaagggttaatattgtattgtatgtggatataatggaatattatatagtataaaatgaataaattttgtaagaatatggattattttataaatataatttttgaaagaaaatcgtaagttttagaagattatttttagtatgatggtagttttttagagattaaaattaagtaaaatttggtaatggatttttagataatgatattaaaattattagtaattaaagaaaaattagataaattgggttttatcggaatgaatatttgtgtattaaaagatagtattaataaaatgaagataggttaggcgtggtggtttacgtttgtaattttagtatttcgggaggttgaggtgggcggattatgaggttaggagtttgagattagtttgattaatgtggtgaaattttatttttattaaaaatataaaaattagttaggtatggtggcgtatgttttaattttagttattcggaggttgaggtaggagaattgtttgaatttgggaggtagaggttgtagtgagtttagatcgtattattgtattttagtttgggtgatagaataagattttgttttaaaaaaaaaagtgaagatagtttatagaatgggagaaaatatttgtaaattttatatttgataaagggttgttatttagagtatattttaattataataataaaaagataaataattaaagtatgggtaaaggatttaaatagatatttttttaaaaaatatatataaagtgttaaaaagtatataaaagatatttaaggttggggagtgatttatatttgtaattttagtattttgggaggtcgaggtgggtggattatttgaggtcggaagtttgagattagtttaattaatacgaatatggtgaaattttatattttttaaaaatgtaaaaattagttaggcgtggtggtatgtatttgtagttttagttattatttgggaggttgagataggagaattgtttgaatttgggaggtagagtttgtagtgagttgagatcgtattattgtattttagtttgggtaatagagcgagacgtcgttaaaaaaaaaaaaaaaaaagttatttaatattattggaaaatgttaatagggaaatttgtaaattaatattataatgaaatattattttatatttattaggatggttataaatttgtgtgtgtgtgtgtgtgtgagagagaaatgttggtaaggatgtggaagagttagaattttggtatattattttgttagtaagaatgtaaaatggtgtagttgttgtagaaaatagttttatcgttttttaaaaagttaagtatagaattgttatttgatttagtaattttattttagggtatatatttaaagaattaaaattagagatttagagacgtgtatattaatgtttatagtagtatttttatagtatttaaaaggtagaagtaatttaagcgtttatttatagataaatggataaataaattgtgatatttatatataatggaatattatttacgtataaaaaggaatgaagttgatacgtgttataatatgaataaattttgaaaatatattaagtgaaagaagttagatataaagggataaatattatttgattttatttataataaagtatttagagaataggtaaatgtatagaagaaaaagtaggttagattttattaggggttgggagaagtaagaaatgggaagtgattgtttaatgggtatagagtttttgtttggggtgatgaaaaaattttggaaattgatagtggtgatggttgtataatattgttggtgtaataaatgttgtcgaattgtatattttagaatggttaaaatcggaaattttatgttataaatattttagtataaaaaatttaagaagtaaataagtaaatttatttttattggagaaagagaaagaaagagaaggaaggaaagaaagaaagaaaaagaagagagaaaaggaaggaagaaagagaaagaaagaagatttagtagtatgttgtttaggtatagatattaaagagttaaaattgtatttttaaattttttgttggaatggaaaatttaaaatgtaaaatgttatattttaagaggaggtaggaggaaggtataagagaaagatatttaggtaaatataaataaattgttaatgatttagtttttgggttgggtagtaggtttattaacgtatattatattattgtgttttatttttaataaaatatatatatgtttatatatatatgttatatataatatattataagtattaaataaaatattttaaaatattaaggaggagggagttattcgaaggatatagtgagaggttttttttttatgaattggatttaataggtgtgtgtggggatgtgagaatttatattttaagcgtttataatttttttttagttttgtaggtatgaggtaatagattgtagttttttagttataagtaggagtttatttttttatttttggaatttggggttggttttgtgattatgttgaaatagtagtagatgtaataaggatagttttgaaatatgtttgtgaattggggtttgattgtttttatagtattcggaatttgggggttattttgtgaatgagtttaagttatttttttattgttggagaatgaaaggtttttatagagtggaatttaggtattttagttgatagatagttagttttaaatttttagaagttttttatagatgtatgagtgagtttttgttaagattagttgaaattgattttgattaaaattatttttagttaagtttagtttatattgttgatttatagaattataagttaaatagaagatgattgttttaagttataaagcgtgaggaatatttataggtagtagatgttaattagtagaattggtgtgtgtaatgatggaaatggagttgttttggttgaatttggggtgaaggtgttagaattttgttttttaggtttttgggtttttgttattttttgttatagtttgtttttatttgtgttttgttatttaggtttttttttaatggttagaaggagggagttatattttacgttttttaaagagaattcgtattgtagattgtgaaggattttattaaatttggagtatttttgttttatggtatttttatgttttttttttttttttattttatttagtttattatttttttttatagaaattgttaaattttagttttttatagttttttatttagagttttgtaaatgttatagttttaggtttttttttttttttttgtttagttgttgttatttttttatagagggaagagatggtttttatttttgtagttttgtgggtttttagggaagtggggagaatgttggttttatgaaatggagggagagattttttttttagattggtgtttttttagggtgtttaaaatgaaatattttttattatttttgtagaataattgtttatttattaggtacgtgaaaatttacgttttttttttgaatatattttgaattttattattttgattttttgttttgggtaataggggagtatttatatatagtttttttgttttgggtattttttattaatttgaggagaaatagaatttagtttaaaaggtttttttttattattggataagttaagatgggagatagtaagttagaagattttattaaggaaagtaggtatatatttttttgggagaatagaaagtaggaaagtttgaaatattaataggttaggatagtagttgatagaggagtttgaaggggagagttttgattttagaaggaaaatatgatttttaaaagtttattttgttagttaggtatagtggtttatgtttgtaattttagtgttttgggaggttaaggcgggtcgattgtttgagtttaagagttggagattatatggaataaaatgggtaatatggtaaaatttcgtttttatagaaaatacgtaaaaaattatttaagaatagtggtatatgtttgtagttttagttattttggaggttgaggtgggaggattgtttgtatttgggagttgaggttgtagtgagttatgattatgttattgtattttagtttgggtgatagtgagattttgtttta

SEQ ID NO: 911 - DNA, 6217 bp, Artificial Sequence
  chemically treated genomic DNA (Homo sapiens)
ttcgaatttttgattttaggtaatgatttatttgttttggttttttaagggtgttgggattataggtgtgagttattgcgtttggtttgagttttttttttttaggattgtttattgtatgatattatattttatagtttgtgttattattagtatttattattatatgtagttttttatgttggttttgtagagtttgtgttttttgtattatttatttagttttagtgttttttatttattatatgtagtattgttttttaaatattatttattatattatagtattttatattatttattataggatattttatattatataatatattttattattataatattgttaaatataatagttttttgttttttgttaaagagattaagttttgttttgttgtttaggttgggatattgtggcgtgattatagtttattgtagtttcgaattttcgaaatttagcgatttttttgtttgagttttttacgtagttgggattataggtgtgagttattacgttcggtaattttttttttttttgtagagattggattttgttatgttgtttaggatggttttgaatttttggttttaaataattttttttttttagtcgtcgtaagtgtcgagattataggagagagttttcgcgtttggtttatagtatttttattataatttattatattagcgtatttttaacgttttttattatggcgggtatttttattatttattatgttatgttatagtattttaaaaattaattttattgtagtatgtaaaaatattttattttatattatattatatttattattatttttgatattatagtatttttaatatgatttattgtgttattgtatttttttattatttataatattataatattattgtatttgttagtattgtttgttattttttattattattatttttgtaatggagtttcgttttgttatttaggtaggttggagtgtagtagtataatgtcggtttattgtatttttcgggtttaagcgatttttttgttttagttttttaagtaggtgggattataggtgtacgttattatgtttaattaatttttgtatttgtagtatagacggggttttattatgttggttaggttggtttcgaatttttgattttaggtgatttatttattttagttttttaaagtgttgtgattataggcgtaagttattatgtttagtttattattattattattattattattattattattttaagttagagttttattttgttatttaggttggagtgtagtggtacgattttggtttattgtagtttttatttatttttcgggtttaagcgatttttttgttttagttttcgaagtagttgggattataggtacgcgttattacgttcggttaatttttttgtatttttagtagagatagggtttcgttatgtagattaggttggtttcgtatttttggtttttagtgatttatttattttggttttttagagtgttggaatgatacgtatgagttattatattgatttttttattatttttatttattatttcgttgtaattttagtattgtttatcgatttatattgttttttggtaatgatttttgaggaatgagttatgttatttttataggtggaggcgacgggttatggtggtgagaattttattgatttggaagaggtggagaagatgttgggaagttgttgagggttgtttatttgtgttaggagaaggtagatggggatttatggggatagtaatattattttggatttatataacgggagtggaaaatgttttgaggtatagtagcgtttgaggcgggtgagaaattcggtttgtagagtcgcggttggtttttagatttgcgggttgtttgtgagatgtcgtgttatttaaatttatttgggtattgagttttaggagtgggggtaagaatttcgatgacggggttttattcggtgcgtatttagtttagagtggtttttgagattagttattatgggtagttaggatgtgtttatttttgaggtttttcgaggtattaaggagatggttggataaagaatttagtatagagtttgattgatggtaggcgtttataatatgagatatattaataatgtgtgtggaggttaggtgtagtggtttatgtttgttattttagtattttgggaggtagaggtgggaagattttttgaggttaggaatttaagattagtttgggtaatatagcgagattttatttttattaaaaaaaaaaaaaaaaaaggaaaaaatttatttggtttagtggtgtatatttgtagttttcgttatttaggaggttgaggtaggaggattgtttgagtttaggagttttaggttgtagtgggttatgattgtattattgtattttagtttgggtaatagagtaagattttgttttttaaaaaaataaagtttgttgaaaagaatgaatgaaggaaggaaggaatgagagggaaattttgttttagtttttttcgtagggaagttggggtagggtaggtagggggggtattcggtttcgtttttttttttattttggtttagaaagtattggtgttatttgtatagggtggagttaaagaaagtgttttatttatagtagagggaggttatttgaggatagtagggaaaatgggattttagttatttaggagggggttagagatgtgggatggatatttaggaaatttagtcgaggatattagagtggtttttgattttggttttttggttgaacgcgttttttttatagtttaaatttaggtttaaggagaagaagttggtaatcggtagggttagtgttgtagagaggatgtagggttttcggaaaatagttaatattttagtagtgttggttgcgagtttatttaagtatgttacgggtgttaatttattttttttttagtaattttgtgagagggtttgagtgtttttatttttattttatagaggtttagagaggtgtagttttttgtttgaggttatatagttagtaagaggtagagtcgggatttgaattttggtagtttggttttagagttttagttgttaattattaggttttatagttttagttataataataataataatattaatataagtgaatttttattgagtgttatttatagattaagtattattttaaggattttaaagtatatttaatttttatagtattttgatgaaggaggtatttattttataattgaagaaatagaggtttagagatattgagttatttgcgtaaggttatatagttggttagtggtagagttagtttttgaatttgagttttttggttgtagagttacggtttttaggtatcgtgttgagggtttttagaatgatatagatgtggtttcgagttatatagggaggtaggttgagggtgatttttattaggtttatttaaggttgggtattaataattatagtgtatatattaggtttagggaggttgagttatttatttaagtttatatagtaagtttatagtatatttaggttgttatgtagtttgggttatttttttaattttgtttggtttttgtagttaatagagatatggtatttatcgtgtttgagattatgatgtatgtgtttattgtggtgttgattatatggttcgtggtagagatgatttattgttataagaagatcgttgtcgttacggagattgttgtataggagaatgcgtgagtagggtggttgggaggtgggagggtatttagggtatcgttatatttgttagagaggaatttcggagttcgggtagggaggaggtagcggagcggtttagggcgttattttttagtattatttagaggggagtgttttttgttagatataggataggggtcgttagatttagtttttttttttttttaatttaggagtttaggtttttagttagattttttaaagattttgaggagtttatttatagattttttttttttttaattaaggagttttgtgtatttggggtggagatcgttatttttttttatttttcgggggttgggtcggtttgatgatggggttattgtatatttggttttttttttatagttcggaatatttggttattatttttgaaagtaaagagaattgtacgggcgtttaggtggtcgaatagttttggtaaggcggatgggttggtagaggggaaggggattgggaggggtcgaagttttttaggtttttaatttttttttttttgtttttttttaggttttgggtttcgttttaaggaagagttagtcgtaatggggattttttaggtatcgtttgtttttagcgtgggggtggttatttttgggttttagaaagttttagagttttgtcgacggagttattggggtgggagggggtagggggtttggttcgtatttttattttcgttttttttagtttttgtttcgtcggtcgcgtatcgttatgtatgatgggtaaagtaatattgtcgttgtttttattttgtttttgttgtttgtttggggaggggggcggtgaggtgggggtagcggtttcgtattttttttttttgttgatttgtatatattggtcgttttagatacgtatttttggggttagttttttttcgttttttttttgtttggcggtaggggtcgcgatgatgggttggagtagtttggggtagggggttttgggatttatttcgatttttttttttcggtattattttttttttcgtttttttcggttggatttggggttttttttttttgtaatgtatttttgtttcggtttaatttcgtttttttttattagttttgaattgtggttatttagaaaggggtttatttagtttcgtttttttatagaagtagttttgtttatgaaataaagatttttggatttgatgtatagtttcgattgtgagtttcgttattttttttttattttcgttttcgaattttcgagttcgttttttagggattttatttgagggtttataggtgaagttatttagtgtttgatttgtgtcggggttgggggagttatgggtttaggggtgagggagagtggaacggagttaggaagggagggggtgtcgtggagggaagagaatcgaggttgatgttggggtgtaggggtggtatggggtgtgtggtgtgtttagtagtgtgagtttttggagaggtgggcgttggggagaaggagagggaaggagagacgggtatggatggaaaggtagaggaagttaggttaaattagcgtgttttaatgaggggttttgggttgagtggaggaaatgggtgcggtggaggtgggtttggttgggtatagcgggtacgtgtgggtaagcgggtggggtcggttgtgcgggtggtttatttggggtaagtagtcgaggtcgattgtgttcggcgtgtggttgagtacgggtaggtgtttggcggtgattttgtacgtttggtgtttatttggttttgggtttgacgtgggtcgcgtttggttgttggcgggatagtgtgttatttgtttgcggacgttttcggttatttggtttgggtttttgtttttagcgttgtgttttttcggttaagttttttattttttttatttagtgttaggattttttggttttagaggttatcgcggtcgggcggaggttgttaaagtaaattagtttcgtgatttgtaggaagttagcgggggaggggtcggggtaggatgagtagggtaggcgggagaggttggggttggggttggggtttaggaattgggtagggaattaggtagaggtgtagtaagtggcgggtatagttaggatttggggttggaggacgtagaaagggcggggggaagggttcgttgggtgagggtggagtgggtttagggtagttggggttttttatttgattttttttggttagatttttattttttagtttgtattttttttttaaatttttagttttcggttaggtttgtttttgtttttatattttcgtagataggtatatttgggtttttttggaggtttaaggtaagtttcgtagttgggttcgtttggtttagtttttataagttcggttttattagttaggtggtttttagtgttgttaatcgaatggttcggttttttttcgtttttttattcgtttttcgtttagtttttttttttttagg

SEQ ID NO: 912 - DNA, 6217 bp, Artificial Sequence
  chemically treated genomic DNA (Homo sapiens)
tttgaggaggagggggttgggcgaggggcgggtgaaggggcggggaggggtcggattattcgattggtagtattggaggttatttggttgatggggtcgggtttgtgggggttggattaggcgggtttagttacggggtttgttttggatttttagggggatttaggtgtgtttgtttgcggggatgtgggaatagggataggtttggtcggaggttgggggtttagggagaaagtgtaggttgaagggtgggggtttgattagaagagattagatggagggttttagttgttttaagtttattttatttttatttagcgaattttttttttcgttttttttgcgttttttagttttaggttttggttgtgttcgttatttgttgtatttttgtttaattttttgtttaatttttgggttttaattttagttttagtttttttcgtttgttttgtttattttgtttcggtttttttttcgttggttttttataagttacggggttggtttgttttggtagttttcgttcggtcgcggtgatttttggagttagaaagttttagtattagataggggggatggggggtttggtcgggaaaatatagcgttaagggtagaggtttaggttaagtggtcggaagcgttcgtaggtagataatatattgtttcgttagtagttaggcgcggtttacgttagatttagggttaggtaaatattagacgtgtagggttatcgttagatatttgttcgtgtttaattatacgtcggatatagtcggtttcggttgtttgttttagataggttattcgtataatcggttttattcgtttatttatacgtgttcgttgtgtttagttaaatttatttttatcgtatttattttttttatttagtttagggttttttattgggatacgttggtttagtttggttttttttgtttttttatttatattcgtttttttttttttttttttttttttagcgtttatttttttagagatttatattgttgggtatattatatattttatgttatttttgtattttagtattagtttcgatttttttttttttacggtattttttttttttttggtttcgttttatttttttttatttttgagtttatggtttttttaatttcgatatagattaggtattaagtggttttatttgtgggtttttaggtagggtttttggaaagcgggttcgaagattcggggacgggaatggggggaaggtgacggggtttataatcgaaattatgtattaagtttaagagtttttattttatgaataaaattatttttgtaaagagacgaggttgaatgggtttttttttaggtggttatagtttaaggttggtgagagagggcgaggttgggtcggggtaggagtgtattatagggaggggggattttaggtttagtcggaggaagcgggaggggaaatgatgtcggggagggggagtcggagtgggttttagaattttttgttttaaattgttttagtttattatcgcgatttttgtcgttaggtagggaggaggcggggaggggttggttttagaagtgcgtgtttgaagcggttaatgtgtgtaaattagtaaggaggaggggtgcggggtcgttgtttttattttatcgtttttttttttaaataggtagtagaagtagggtgggggtagcggtagtattgttttatttattatgtatggcggtgcgcggtcggcggggtaggagttggaggaggcgaaagtgggggtgcgagttaagttttttgtttttttttattttagtggtttcgtcggtaggattttgaggttttttggggtttaggagtggttatttttacgttgggggtaggcggtgtttggagagtttttattacggttggtttttttttgaggcggggtttagggtttgaaggggagtaagagagggggaattagggatttgggggatttcggttttttttaattttttttttttttgttagtttattcgttttattagggttattcggttatttggacgttcgtgtagttttttttgtttttagaggtgatggttaggtatttcgagttgtgggggaaaggttaggtatatagtgattttattattagatcgatttaattttcgggggatgggggaaggtagcggtttttattttaggtatatagggttttttagttagagagagaaggagtttatgggtggattttttagggtttttgaggaatttggttgggagtttgggtttttgagttggagggaggaaggggttgggtttgacgatttttattttgtgtttgatagggagtatttttttttgggtagtattgagagatggcgttttgggtcgtttcgttgttttttttttgttcgggtttcggagtttttttttggtaagtgtgacggtgttttgggtgtttttttattttttagttattttatttacgtatttttttgtgtagtagttttcgtggcggtagcgatttttttgtagtagtaaattatttttgttacgagttatatggttaatattataatgagtatatatattatgattttagatacgatggatgttatgtttttgttggttgtaggggttaggtagggttaagggggtagtttaggttgtatgatagtttgagtgtgttgtgagtttgttgtgtgagtttggatgagtggtttaatttttttgggtttggtgtatgtattgtgattattaatatttagttttgggtaggtttggtgggggttatttttaatttgtttttttgtgtaattcgaggttatatttgtgttattttggaggtttttagtacggtgtttaaaagtcgtagttttgtaattagaaggtttaggtttaaaggttggttttgttattggttagttgtgtgattttgcgtaagtgatttaatgtttttaggtttttgtttttttaattgtaaaatgaatattttttttattagagtgttgtgagaattaaatatgttttaaaatttttagaatagtgtttgatttataaatggtatttagtgaaggtttatttgtattagtattattattgttgttataattggggttataaagtttaatggttaatagttggggttttagggttagattgttagggtttaaatttcggttttgttttttattagttgtgtgattttaggtaaaggattgtatttttttgagtttttgtaaaatggagatgggaatatttagatttttttatagggttgttggagaggaaatgagttaatattcgtaatatgtttggatgagttcgtagttagtattgttgaagtgttggttatttttcggaaattttatattttttttatagtattggttttgtcgattgttagttttttttttttgagtttaaatttaaattgtaaagggaacgcgtttagttaggggattagagttaaaagttattttggtgttttcggttggattttttaggtgtttattttatatttttggtttttttttagatggttgagattttattttttttgttgtttttaaatggtttttttttgttgtgagtggggtattttttttggttttattttgtgtagatggtattagtgttttttgggttagagtaagggagggagcggggtcggatgttttttttgtttgttttgttttagtttttttgcgggaggagttgagatagggttttttttttatttttttttttttttatttattttttttaatagattttatttttttaagagatagggttttgttttattgtttagattggagtgtagtgatgtaattatagtttattgtagtttggaatttttgagtttaagtaatttttttgttttagttttttgagtagcggagattataagtgtgtattattaggttaggtgaattttttttttttttttttttttttttggtagagatgaggtttcgttgtgttgtttaggttggttttgaatttttggttttaagaaatttttttatttttgttttttaaagtgttggggtgataggtatgaattattatatttggtttttatatatattattaatgtgttttatgttgtgggcgtttgttattagttaagttttgtgttaaattttttatttaattatttttttgatgtttcggaaagttttaaggatgagtatattttggttgtttatggtggttggttttaggaattattttgagttggatgcgtatcggataaagtttcgttatcggaatttttgtttttatttttggaatttagtgtttaaatggatttaggtaatacggtattttataggtagttcgtagatttgaaggttagtcgcgattttgtaggtcggattttttattcgttttagacgttgttgtgttttaaggtattttttattttcgttgtgtggatttaaaatagtattattgtttttatgggtttttatttgtttttttttaatataggtgggtagtttttagtagttttttagtattttttttattttttttaggttagtgaagtttttattattatgattcgtcgtttttatttatggaaatggtatggtttattttttaggggttattattaggaggtaatataggtcgatgggtaatattgaaattgtagcgagatggtggataaaaataataaaaaggttagtgtggtggtttatacgtgttattttagtattttgggaggttaaggtgggtgaattattggaggttaggagtgcgagattagtttggtttatatagcgaaattttgtttttattaaaaatataaaagaattagtcgggcgtggtggcgcgtgtttgtaattttagttatttcggaggttgaggtaggagaatcgtttgaattcgggaggtggatggaggttgtagtgagttaagatcgtgttattgtattttagtttgggtgatagagtgagattttaatttgaaataataataataataataataataataataataggttgggtatggtaatttacgtttgtaattatagtattttgggaggttgaggtgggtggattatttgaggttaggagttcgagattagtttggttaatatggtaaaatttcgtttgtattataagtataaaaattagttgggtatggtggcgtgtatttgtaattttatttatttgggaggttgaggtagaagaatcgtttgagttcgggaggtgtagtgagtcgatattgtattgttgtattttagtttgtttgggtgatagagcgagattttattgtaaaaataataataataaggaatggtaggtagtgttaataaatatagtaatattgtggtattgtgggtaatgaaaaaatataatagtataatgagttatgttaaaaatattgtagtattagaggtaatgatgaatatagtatggtatagaatggaatatttttatatgttataataggattaatttttgaaatattatagtatagtatggtgggtaataaaaatattcgttatggtggggaacgttaaaaatacgttagtatgatggattataataaaaatattgtaggttaggcgcggaggtttttttttgtaatttcggtatttacggcggttaaggagggaagattatttgaggttaggagtttaagattattttgggtaatatagtaagatttagtttttataaaaaaaaaaaaaattgtcgggcgtagtggtttatatttgtagttttagttacgtgggaggtttaagtagaaggatcgttggatttcgggagttcgaggttgtagtgggttatgattacgttatagtattttagtttgggtaatagagtaagatttggtttttttaataaaaaataaaaaattgttgtgtttggtaatattatgatagtaaaatatattgtgtaatataaaatattttatagtgggtaatataaaatattataatatagtgggtaatgtttaaaaggtaatattatatatggtgggtaaaaaatattagaattgggtggatagtgtagaaaatataaattttgtagggttaatataaggaattgtatatgatggtaaatgttggtaatagtataggttgtgggatgtagtgttatatagtgggtaattttaaaaaagagaggtttaggttaggcgtagtggtttatatttgtaattttagtatttttgggaggttaaggtaggtggattattatttaaggttaggagttcgag

SEQ ID NO: 913 - DNA, 18133 bp, Artificial Sequence
  chemically treated genomic DNA (Homo sapiens)
tttgtatatgatgaaaagtgaagtattatttgtaatgcgtagttttattagtagaattttatagttaaatgatgttagtttaatgttgatatttttagatggttttaatagaaaattagttgtattagtcggggttttttataaaaatagaagtaataggatgtatttggatttatttcgatttatttatatgtttatatgcgaggttgggagagatttatttattttaaggaattggtttacgtaattgtggaggtttgttgagtttaaaatttgaaggtgtaggtttgcggtttgaagatttagggaggagttgtagttttaatttaaaggtaatgtgttggagaatgtttttttgattaggggaggttagtgtttgttttattaaggtttttagttgatgaggtttatttatattatggagggtaatatgtttttttaaaatttatcgatttaaatattaattttatataaaaaatatttttatagaaatatttagaagaatgtttgattaaatatatgggttaagttgatatataaaattaattattatggttaggtacggtggtttacgtttgtaattttagcgttttgggagattgaggtaggtagattacgaggttaggagttttagatcggtttggttaatatggtgaaattttatttttattaaaaatataaaaattagttcgacgtggtggtatatatttgtaattttagttatttaggaggttaaggtaggagaattgtttgaattcgggaggtggaggttgtagtgagtttagatcgcgttattgtattttagtttgggttatagggtaagattttgttttaaaaaaaaagaaaaagaaagaaattaattattatgttagttaattttaattatggtttaattttatattttatttatggaataaaagtaaagtttatggaggtcgggtacggtggtttatgtttgtaattttagtattttgggaggtcgaggcgggtagattatttaaggttaggagatcgagattattttggttaatacggtgaaatttcgtttttattaaaaaatataaaaaaaattagttaggcgtggtggtaggtgtttgtagttttagttattcgggaggttgaggtaggagaatggcgtgaattcgggaggtagagtttgtagtgagtcgagatcgcgttattgtattttagtttgggtgatagagcgagatttcgtattaaaaaaaaaaaaaaaaaaaaagtaaagtttatggaaagttattttgatgaaagtgaaatatttggtattattgagaaaattattattaatttattgaaaaagtaaatatttagtataaatatttttgtgatgattgttttttatagaaatataaattttggcggagtatagtattatggttaaaaatagattttttaataaagaaatttttagagaagaaatatagttggatttggttgtggcgtataaataatttataattgtgtttaaataagtcgattataaaattgtttttggttgggtgtagtggtttatgtttgtaattttattattttgggaggtcgaggtaggcggattatttgaggttaggagttcgagattagtttgattaatatggtgaaattttgtttttattaaagatataaaaattagtcgggtgtggtggcgtgtaattgtagttttagttattcgggaggttgagaaaggagaattgtttgaatttggaaggtagaggttgtagtgagttgagattatatcgttggattttagtttgggtgatagagtaagattttattttaaaaaaaaaaaaattgtttttggaaaggtatcgggaagaggaattttaggttatatttatgttttttttatttttttttgtatgtagatattttagtaaagaatagtgatatatttagtatataggacgtttagagtagataattttttaatattttttatttttatgataaaattatttttaataataattatataataattaggaataattatttttttgtttttgtttgtagtgggaaaataatattttagaagaatatatttttattttaaatataatgtggaaatttagtaaattattttatatgtgaattagatttttatttattaagaaaaagttttatattttgtagattgtagtgtttgttgttttttattttaaatataaataaaaagtttaaattgttatatagaatgataagattgaaagaatagtattgtttttttgtttttataattatttggttattattatttgttttaaatttattattaaaatataggagtatttggtattgtaggatttggagaaaggaattgtaagttagaggtaagttggaaggattttgaattgttgggtatttaatttagaaataaatttgagtagttgagattatatgtgttaggggacgaatatataatcggaagttttttgaattaattttttgatagaatataatgtttgttaaaaggataagtaatgaaaatgttttaatatgaattttaagttttatgttaaatagaaatgtatttatatatttattaaaagatatgtataaaatgtttatagtagtattatttttaatagtttaaatttggaaattgtttaaatgtttattaataggggaatggataagaagttttagaggtaggttgggcgtggtggtttatatttgtaattttattattttgggaagttaaaatgggcggattatttggggttaggagtttaagattagtttggttaatatggtgaaattttattttttattaaaaatataaatattagttaggtttggtgttatacgtttgtagttttagttattcgggaagttgaggtaggagaattgtttgaattcgggaggtagaggttgtagtgagttgagattatttaattgtattttagtagagtagtagagcgagattttgttttaaaaaaaaaaaaaaaagttttagaggttagaagaaagtgaattgtttaaggtaaaattattatggaatacgtaatattggtattattatgtattgagttaagttttatgttaggtatttttgtatatattattttgtttaatttttattatattttgtgatagagatattaattttatttgacgtataagaaattaagtacgtagggattaaggattttgtttaaagttaaaatgttataatagtggggaatttaggatttgaatttagtttaaagtttatatattttttttttattatagtttgttgtttttttaggataaagagggaagatagggaaagtagggaagtatggattttataaatttatatatgttaaaattataatagttattgttttttgagtatttattatgtggtaaatattatatgaggtattttatataaatgatttttagaattttcgtaaaattttttatggtagtagttattattttttttttttttttttttttttttttttgagataggatatttttttgttgtttaggttggagtgtagtggtatagttttggtttattgtagtttggattttttgggtttaagttatttttttattttagttttttaagtagttggggttataggtatatggttattaggtttagataattttttatttttgtagagattgagttttattatgttatttaggtttattatttttattttttagatgaagagattgaggtttagagaagtttaatgatttgtttagttttataaattttttgttattatatattttttagcgtttttaataagagggaggttattaattatgtgttgggtattgtggtggatgttggagttatagggttgagtatataagaaatggtgttgttggagtaattgttgtttgtttatttgatttatttgagaattaattagtaggggaatatatttttgtttttagatttaatataagaatttgtgtgggtaaaaataaagattagtagtaataatagtagtttttatttgttgattgtattgttttaagtgtatatatatatatatatatatacgtatatttatatttttttaatatttaaaatgattttgtttatgtattgttaatatgtttattttatttttaaatttttatttatttttatttttatttatttttgagacggagttttattttgtcgcggaggttgaagtgtagtggtgcgattttagtttagtgcgattttcgtttttcgggtttaagtgatttttttgttttagttttcggattagttgggattataggcgttcgtttttacgtttagttaatttttgtatttttagtagagatggggtttcgttatgttggttaggttggtttcgtatttttgattttgagtgatttatttgtttcggttttttaaagtgttgggattataggtatgagttatcgcgtcgggttaatatgtttattttagtgaggtaaaaatagaggtttagagtttgatttgtataaaattatagagtagttaagtgtttttttagatgtgtattttgatttgggtgattttaggattttaggttttaattgttataattagttaagggtttggggaagtattgggttaagagttaggaaaatggaagttataggtagtgtaaggttttgggaatgggacgtttggtttaaggatttacgcgatgattggaattcgaagagtcggggttcggtttacggtcgttatgaagtaacgcgcgtcggtaggtttgggaattagggagttttttgaataggagattgagttgggagggaaaggggtttcgttgggggagtttcggttttttttgggagaaaatttttacggttatttagtgagtttgtaaattggtaggcgtcggcgtaggcgcgcgggcggggtcgggggcggggtttgcggggcgtggcggggcgggtagagggcggggtttgtttttttttagttttaggcggttgcgacgagtttttaggcgaatttttcggttttttcgcgcggcgtcgttttttgttgcgttttcgtttttttttttgtttcgttatcggttttttttttttgagtagttagttcgcgcgtcggtcggtttcgttatggcgattcgtagttttggcgtcgtggtgagtagttcggtttgtcggttttggtcggtttaggtttacgcggtaggtggcggtcgggttttgaggcgcgggattcgtagtgcgggttcgggcggtcgggtttagggaatttcgtaggcgggggcggttagtttttcgggttcggttttacgttacgcgagggcggtagggaggacggaatggcggggtttggggtgggttttttttcgggggagttttgggaaaagaggattgcgtgtgggaagagaaggtggaaatggcgttttggttgatatgtgtcgtttgcgagcgtgttgcggggaggggtcgagggtagattcgggaatgatggcgcggggtgggggcgtgggggttttttcgggagaggtttttttttggaagtttggggtgcgatggtgaggttttcggggtatttttggaggggtttcggtacggaaagcgattatttgggagggcgtgtggggattaggttttgtttttagttttgtatatattgtagtttatttttatggagatgtttatggttttattgaagttttattatagttttggtagcggtaattatgcgtatttgatatacgaaggaattagggaaaaggtattaggttattttaagtcgaaatttatatgtgttagaatttagattttatgttgatcgatgttttaggatatagaaaatgagaatttggtttttatttttaagaatatttttaatcgtaattagtttttggtattttagttttatttttattggtttttttttgtttgttgaatcggttaagttgttggtttttttttttaatcgttttgattatgtttgttaaaatagttaaaatttcggttagttaaatatgttttagtttgttttattatgattatttttgttgttttggtaatgatttggttatttgttgttttttttattaaaattttttaagggtaggaattatcgtcgtaattttagtatttagtatagtatttggtttgtaagaggttttcgatgatggtttgttgaatgaatatattaaataattaattatttgaattttaagaaagaagcgattttattttatattaggtattgtaatgatttaaggtaaagagtagtgttattaacggagtttaattgggaatttagtttgtttgggttatttattagttgtgtggttgtgggtaatttattttatttttttgggtttaagttattttatgtatatttgaggtgttggttattttttggagttattgagaggattataagatagtttatgtgaattagtaatttttgtatggtttttggcggggaatagtaataatagttattattatgtttatttatatagttttaattagtttttaaaatagttttgtagtaatggtatgattattattattttatagatgaggaatttttgaagttttagagaggttaatagatatattttaggttatatagttattaagagaaggagttttgtttcgaatttagttttttttttttcgagtaatattagttaaaaaataggttataaataggtatttaaaaaaatggtagtggttgttgtttttatttagttgttgaggaaaaaatgttgattttttatttttaaatattaatttatttaattttgttaattttttttttttgagatagggttttattttgttatttaggatggagtgtagtggtataattattgtttattgtagtttcgatttttcgggttcgggtgattttttttaggtttaggggatttttttattttagttttttaagtagttgggattataggtgcgtattattatttttggttaatatttgtattttattttatttatttatttatttattttttgagatggagtttcgtttttgttgttcgggttggagtatagtggtatgatttcggtttagtgtaatttttgtttttcgggtttaagcgatttttttattttatttttttgagtagttgggattataggcgtttgttattatgtttggttaattttttgtatttttaatagagacgaggttttattatgttggttaggttattttcgaatttttgattttaggtgatttattcgttttggttttttaaagtgttgggattataggcgtgagttattgcgttcggtttaatatttgtattttttgtagagatggtgttttgttatgttgtttaggttggttttgaatttttgagtttaagcgatttgttcgtttttgttttttaaagtgttgggattataggtatgagttatcgtgtttggtttaggtagacgtttttagttttggggtgtgatgtttgttttagtatatagtgaatttaattattgttagagttggttgtttgttagttttttttgaatataagatatttattgtttttagtttgtaaatttttttttttttttaaaaaattttttttttttaaattgtttgtatgttagtaataataaatgtttaaatggtgttatgtgttagatatttttttaagttttgttatgtatattaattaattttttaaattatataaattagagaggttaagtaatttgtttaagattatttaataatattaggatttgaatttaagtttgttttattttagattttgtttttaatttttaaatttttaagttagtagtgataatagtaggtatttattgaatatttaattatgttttaggcgttgaagtaaatattttgtaggtattatttaatgtaaatattttaaagttatataataggtattttttaggtaaataaatattagtatgattttggaggtatagatagttgaagtaatttgtttaatattatttatatgaaattggtttttaaatgtgtttgatataatttatgttgtttgtaattatcgttttaaattgttagggtaaatttggatatatttgagttaagaaaaagtttttagatttttgtaaattaatgtgaaagatatgttttatgtggatataatattttttaaatttcggggatggtagttttagaaatgtaattttgttttagtcgagtttattttgttaataattttttatagaattggtaaaacggagtattttttttttgtttttggttatattgttattaatagggtgtagattgatattaatttgtaggtgtaaattagaattattttttgtgattattaggaaatagagtagtttagtttaggggtttttttttgtgaatttagtattgtgatttgtatattataagtttattttgttttttatttattgtttgtatttgggtattgtaaaaggtaggaaaaggattaattagattagtagagaagagttgttttggagtttttttttagttttttgtagtttattagatagtaattaggttatgttattttatttttttgtagtgaagatatgttgaagttgtattggtatatttttttatttttttgtaattttatattgtgtagatttgataaaatttatgtgttaattattattattaatattaatattgagttttaatttttatttttttgtttagtggttgttaaattattaatatttataataatttattattattaagataatttattagttcgattatatattttaaattgttatggaattattgtttttagtattgtgtttttgataattgataagtataattttttttttgtttagagtgaatatgtttatttttttattgtatatattaataaaaggaaaaattgtaatattgggtaaatttatgtttttatatatgtagtagttatgagtttatgtttttagaatgagtaataatttattttttttttggttgaatagttaagaatgttgattttaatttttttaatagttttattttttagaagggaaggtaagtaagttatatatgtagtttatttgtaagattgatatgaaattggaagatgaatttattattagttttaattatttttatatttaggaatattgtattagtaatttataattttggttttttgttattttgagttaatataaattatttaaggagatggcggattatttgttttgaggtgtttttttttgagaattttaatgtatttgaatataaaaggtaaaaatatgttaattagtaatttttgtttattttagaagtttggaaatattatttattattaggaattaaataaaatatggtttatttattgttatattttttttaatttatatagtttatttttattttttatttttgtttgttttttttgagatggagttttgttttgttattaggtaggagtgtagtgatgtaatttcggtttattttagttatcgattttttggtttaagcgatttttttgtttgagttttttgagtagttgggattataggtaggtattattacgtttagttaatttttgtagagataggattttatcgtgttggttaggatggtttttattttttgattttatgatttgtttgtttcggttttttaaagtgttgggattataggtgggagttattacgtttggtttatatagtttatttttagatttatttttattaagttttgtttggatttacgaatattgtttttttttttttaagatggagttttatttttgttgtttagattgtagtgtaatggtgtaattttagtttattgtaatttttgttttttgggttttagtaatttttttgttttagtttttcgagtagttggaattataggcgttcgttattacgtttagttaatttttgtgtttttagtagagacggggttttattatgttgggtaggttaggggtgattcgtttattttagttttttaaagtgttgggattataggtgtgagttatcgtatttggttaatatgtttttttttttttttttttttttaattataaagagatttaagtagtttttgttatagatgatgaattgatgttgtaagtattgttttagtttggattaatttttttgtttattgtaattttagataatatagttttgtaattagagattttatgtgtaaattataaaaatgtttatatgaaggttattattatagatgtgacgtgtataattattagtaatttgtatgtttatatgggttagtttggtaaaaaattatgaagttttaaaaattaaaaaaaattataatgttagttttattggaaagtaaaattattttagtaatcgattatagtaaaagtattgatttttattttagataaaagttagaatgaaaggtaattttttaatatttttttagattaataaaagtatttgtagcgatttttattatttataagtatattataagtaagttagaatttgagaattgtgttttagatttttgaggagatgtagttagatttttgaattgttttagtaaatggtaagtaatttagagttagtaattaataatttgttttttgatttttgatttagttaagaatggttatatttgggaaaggtagatttggagagtaattacgtttttatttatttattatttttaggtttttttagagtttttagatattttggggttgagtttttttttaaagttatataggattttttttttgtgatttgttttagttatttttatgttgggtgtttgttatggattgagtatttatgtttttttatattttttttatattttttttgaagttttaatttttagtgtgatggtatttggagatagggtttttggaaggtaattatagttagaagaagtcgggagggttgggtttaggtttgattggattagtgtttttatatgaaaagatattaggacgggcgtagtggtttatatttgtaattttagtattttgggaggttaaggtgggtggattacgaggttaggagtttgagattagtttggttaatgtagtgaaatattatttttattaaaaatataaaaattagttgggtgtggtagcgggtttttgttatttaagttattcgggagggtgaggtatgagaattatttgaattcgggagttggaggttgtagtgagtttagattgtgttattgtattttagtttgggtgatagagtgagattttgttttaaaaaagaaaaaaaaaaaaaaagagatattagagagtttgttagaagaggttatgtgagtatatagttagaagatttttaagttaaagaagaggtttgagattgaaatttattttgtaggtattttaattttggattttttagtttttaaaattgtgagaaataagtttttgttaagttatttagtttgtggtattttgttatggtagtttgagtaggtagttgtttttttagaaggtgttgataataattatatgtaatattaagttataaataataaaatagatgtaatttatatttatatagaaagttgggtattgttattgttttgttggtttatacggttgtgttagtttagtagtagaaaggtgttggttttttttatttagtttataatttaggtagtagaatgtaattattgttttaaatttgatattgtttagggagagaattattggtgttgggtaattttgggttttaggtttattttttgtgtatatataattgtttttggtaaattataagtttttgggtttgtcgaattagattttgttatagattatgagttttattatgttatatagttagttgtatgtatatatgttttttttattagattttaagttttttttttttttttttttttgtgacggagttttgtttttgtcgtttaggttgaagtggagtgtagtggtataatttcggtttattgtagtttttattttttaggtttaagcgatttttttgtttcggttttttaagtaattgggattataggtacgtgttattatattcggttaatttttgtattttttgtagagatagggtttcgttatgttggttaggttggttttgaatttttggttttaggtgatttattcgttttagttttttaaagtgttgggatttataggtatgagttattacgtttagttataagttttttaagggttgtaaatttataattatttttttatttttttgtaaattttgttgtatattgttttaattaaggtagatgttgaatgtatttttgtataattgaatatgttgtaatttttaattttttttaattgtttttgttaaagtagttattggattgttaattaatttatattagatggggttaattaatattagatgggataagtaagggttaataagattataggttattaagtagatttttgtttagtttttatagagattgagtttattggatttgtttgataggaagttttggtgtttgggatgattaaaattgaagtttttatttattgaattatatttatttatattattttatattagtggtttatatgtaagtgaggtttttgagatagagtttgagttttttttttaattattataatatttaatttgtatttttttttttttttttttttttagacggagtttcgttttgttatttaggttggagtgtagtggtatgatttcggtttattgtaatttttgttttttggatttaagtagttttttatgttttagtttttttagtagttgggattataggtttgtgttattatgtttggttaattttttttttgtatttttagtagagacggggttttattacgttggttaggttggtttcgaatttttgatttcgagcgattaatttgttttggttttttaaagtgttgggattataggtatgagttatagcgtttagtcgtttttttttttaaatagtaatttaatattgtttatagttatttatgtatatgttatgttatttattatattgtaagttttgtgagggtagttgtattaaatttatttaattttttttagtatgtatgatatagtaagtatttaataaatatttgtatattagtgataaggatataggttttgaatagtgggtttttattatttaagaattagtatttgatggtcgggcggggtggtttacgtttgtaattttagtattttgggaggttgaggcgggcggattatgagattaggagatcgagattattttggttaatatggtgaaatttcgtttttataaaaaaaatataaaagaattaattaagtgtggtggtgggtgtttgtagttttagttattgttttgtgaggttgaggtaggtagattatttgaggtgggaaatttaagattagtttgattaatatggagaaattttatttttattaaaaatataaaattagtcgggcgtggtggcgtatgtttgtaattttagttattcgggaggttgaggtaggagaatggcgtgaattcgggaggcggagtttgtagtgagttaggatcgcgttattgtattttagtttgggcgatagagcgagatttcgttttaaaaaaaaaaaaaaaaaaaaaattagtatttgatatttgattattaaatatgaattaagaggatttagattttttgttaaatgttaagttgggaaaagttgttatttaaatgaattgttttttatttaatttcgtttgatgatatattttgtttttattttgtaaaaaattattttttttttttttggagatagggttttgttttgttgtttaggttggttataaatttttgattttaagtaatttttttgttttagttttttaaaatgttgggattataggcgtgagttatttcgttcggttttgtattatgatatattttgaataattataagtagatttggtataatgaatttgtacgtatttattgttaagttttgataattgtttgtttatagttaattatgtattttttaaattagaatttttttaatatatttaaatatatatatatgtgtgtatatatatagtaagttgtaataaagttgtgaatttatatttgaagtattttaagtgatgtaagttttatgaatttttgtttatgttttttgggaagagttgtattgataaattttttatgtttaaagtaaattataaattaaaaaaataaaatttaggatgtaataaaataaaataattttttgatataagtatggtatgtaaatttgttttgattggaaattaatttgttatattgttagaatttttgttttagaatatatttttgttgatttgtttgtatttttagattgtatatttgggatgaattttgggtagaatttatatgggttttttttgaaataaataagattttttaaatttttagtcgatttgtagaatttgtagttaggtattgaattattttgatagatgtagtaatcgttgtaagtgtatattttaaggagttttggttgggttttagtttatgtttgtggtagaagtagtgagtaattgggaggaagttggtgagtaagttttaaggaagaagttatttttagtattttggatttttttgattttaaagtattataaaatggtgtatttttatttttgttaagtgataatagatatattttgatgagtttgaaatgaatatatattgtattatttttataatatttagtaaggtttgtatttttttagaatttgaattaaattttagtttataaaatttataaaatatttagttgttgtaaaatatttttggaatgtttatataggtgatatataaatgttttatttttattttttttatagtaaatatgttttgatatgtgaaggtttagtagatgtattagtatttaattttagaggatttggtataatttttttttttaagaatagaaattttttttgtttatgaaagtagtatatgtttttttaaaaataaattaatattgatttttgtttgttgtatagtattatgtttttatttggttatgattaggggtatgttttggtttatttatttgaaaatgtttgtaattagttttttggttatgtgtataggggttgaagttgttttataggtattacgggttaatttgataatatatgaagttttattaaagtttgagaatttagaattgagttttggggattgaaagatagtataaattttaaattttttagtattggaaattttaaaatataattgaattttataaataagattttaagttttaaatatgtatttttaaatgtattaaaagttaagttgtttgtatttaagtatttaatataatgtttaggttgtaaaaggagatgtttaataggtattaattgatatattgagatttaattatggtttgattaatatttattggaaatcgttaaagtttaaattattagttttttgaatgtgatttgaaaggtaatttagtattgaatagtatgtgagttagagtattttattttttttggtttatttttttaaatagattttgaatataatggtgaatgggtattataaattaattaataaaaatgatattgaaaatgaaaaaatatatatattaaagtgtagaaagtgattaggcgtggtggtttatatttgtaatttaagtattttgggaggttgaggtaggaggattttttgattttaggagtttaagattagtttgggtaatatagcgagatttcgtttttaaaaaaaaaaaagagagagaaaaaaattttttttatttaaaaaaagtgtagaaagtgttaagattttattttttattattatttggtatatttttttatatttatttattttttttttttattttttttttttttttttaatttttttatttttttgtattttgattttttgtttgtatattttgttttaatttaatgtattttttaaaaattttttatatattttatatgtatatataaaaacgtatgttgttaaagataatttataagaaagattattgaatttttttaaaagtgatatatatttattgaaaaaaatttagaatatatagtaaagtaataaagaattaaataaaattgttgtaattttttttttaaagataagtgtttttatgattttgttgtatttttttttgtatataggtatatatatagtatttataaagttgtatttatagtatatttttatattataggtattatattagtgttattaaatattttgtatgttaggggttagatatattaagataattaatatgtggttttatttaaataatattagagtattttttatgatgatattttatgagttgattataataattttagatttttaagagtttgggtttttaaaagattatttagtttttttgggtgattttttttttttattgtgagatgagagaggttgtttggatttgggattggggtagcggggatagtaatttttttttttttttttttttttattttgaggtagggtattgttgtgttatttaggttggagtgtagtggtgtgatttcggtttattgtaatttttatttttcgggtttaggtgatttttttgttttagtttttttagtaattgggattataggcgcgtgttatatgtttggttaattttgtatttttagtagagatggggttttattatgttggttaggttggtttttaatttttgattttaggtgatacgtttatttgggttttttaaaatattgggattataggtatgagtcgttgtattagttagtagttttttttgtggttttttttgtttgttttgttttgttttgtttttgagatagggttttattttgttgtttacgttggagtgttgtggtatgatcgtagtttattgtagttttaaatttttgggtttaagtgattttttttgttttcgtttttcgagtagttgggattataggtatgtattattatatttggtaaatttttataaagttttttgtagggacggggttttgttatattttttatgtcggttttgaatttttggttttaagtaatttttttgttttagttttttaaagtattgggattataagtgtgagttattatattatgttagttttttttgtttagtgtgatattttattttgttagattatagtgtgttaaaatttgttttattaaatttttaaatatatttaaaagtggagagaatagtataatgaatattcgtatgtttattatttatgtttagaatattattaaatataaagattttgttgcgtttgttttagttttttaaaatttttttttttttttttgtgatttaaaggaaattttatattttattattttatttttatatttttgattaagatgattaagatatatagttatatggttttttgttttgttttttgttttttaaagacgaaatttcgtttttgttttttaggttggagtgtaatggtgttattttagtttagtgtaatttttgttttttgggtataagcgatttttttgttttagttttttaagtagttgggattataggtttttgttattacgtttggttaatttttgtatttttagtagagacggcggggggaggttttattatgttgataaggttggtttggaatttttgattttaggtgatttattcgtttcggttttttaaagtgttgggattataggcgtgagttatcgcgtttagtttgtttttttgtttgtttgttttgttttttttgagatagagttttgttttgttttttaggttggagtgaagtggcgtatttttggtttattgtaatttttattttttaggtttaagtgatttttttgttttagttttttaagtagttgggattataggtatgtgttattatattcggttaatttttttgtatttttagtagagacgggattttatcgtgttgtttaggttggtttcgaatttttgagtttaggtagtttgtttgttttagttttttaaagtgttgggattatacgtgtgaattaattcgttcggtttgttgtttttttatataatttattattatatttataaagttaatagttattaatattattttatatttaaatttttttgatagattaaggttattttttaatattttaatttaattaaatgtttgtattttgtaatgtttttattgaaatagttatattttttttttaga

SEQ ID NO: 914 - DNA, 18133 bp, Artificial Sequence
  chemically treated genomic DNA (Homo sapiens)
tttgaaaaagaaatatagttgttttaatgagagtattataggatataaatatttgattggattaagatgttaaaaaataattttagtttattagagaaatttaggtgtaagatgatattagtaattgttaattttgtaggtatgataatgaattatgtaagaaaataataggtcgggcgggttggtttatacgtgtaattttagtattttgggaggttgaggtaggtagattgtttgagtttaggagttcgagattagtttgggtaatacggtgaaatttcgtttttattaaaaatataaaaaaattagtcgggtgtggtgatatatgtttgtagttttagttatttgggaggttgaggtaggagaattatttgaatttgggaggtgaaggttgtagtgagttaagaatgcgttattttattttagtttgggaaatagagtaagattttgttttaaaaaaaataaaataaataaataaaaaaataggttgggcgcggtggtttacgtttgtaattttagtattttgggaggtcgaggcgggtggattatttgaggttaggagttttagattagttttgttaatatggtgaaattttttttcgtcgtttttattaaaaatataaaaattagttaggcgtggtggtaggagtttgtaattttagttatttgggaggttgaggtaggagaatcgtttgtatttagaaggtagaggttgtattgagttgagatggtattattgtattttagtttgggggataagagcgagatttcgtttttaaaaaataaaaaataaaataaaaaattatgtaattatatgttttagttattttagttaagaatgtagaagtaaagtgataagatatggaattttttttaggttataaagagaaaaagaaaaattttaaagagttaagataaacgtagtaaaatttttatatttaataatattttaaatatgggtgatgaatatacgggtatttattatattattttttttatttttgagtatgtttgaaaatttagtaaaataagttttaatatattgtagtttaataagataaaatattatattgaataggaaaaattggtatggtgtggtggtttatatttgtaattttagtgttttgggaggttgagataggagagttgtttgaggttaggagtttaagatcgatatggggaatgtagtaagatttcgtttttataaaaaattttgtaaaaatttgttaggtatggtggtgtatatttgtagttttagttattcgggaggcggaggtagaaggaattatttgagtttaggagtttgaggttgtagtgagttacgattatattatagtattttagcgtggataatagagtaagattttattttaaaaataaaataaaataaaataaataaaaaaaattataagaaaaattgttggttgatgtagcggtttatgtttgtaattttagtattttgggaggtttaggtgggcgtattatttgaggttaggagttagagattagtttggttaatatggtgaaattttatttttattaaaaatataaaattagttaggtatgtggtacgcgtttgtagttttagttattggggaggttgaagtaggaggattatttgagttcgggaggtggaggttgtagtgagtcgagattatattattgtattttagtttgggtgatatagtaatattttattttaaaataaaaaagaaaaagaaaagaaaagttgttgttttcgttattttaattttaaatttaaatagttttttttattttatagtaagggggaaaaattatttaaaaaagttaagtgattttttgaaaatttaaatttttagaagtttaagattattatagttaatttatgaagtgttattataaaagatattttaatattatttaagtagaattatatattggttgttttggtatgtttagtttttggtatataaaatatttaataatattgatatggtatttgtgatgtgaaaatgtattatgagtatagttttataaatattatatatgtatttatatatagaaaaaaatataataaaattataaaagtatttatttttgaaagaggagttatagtaattttatttagttttttattgttttgttatatattttaaattttttttaatgaatatatattatttttaaaaaaatttaatggttttttttataaattatttttggtagtatgcgtttttatatatatatataaaatgtatgggaaatttttaaaggatatattaaattaaagtaaaatatataaataaaaaattagaatataaaaagataaaaagattgggaagggagggagggagtaaggaggaagggtgggtgggtatagagaaatatattaaataatggtaagaagtggggttttgatattttttatattttttttaaataaaaaaaattttttttttttttttttttttttttagagacgaagtttcgttatgttgtttaggttggttttgaatttttgggattaagagatttttttgttttagttttttaaggtgtttggattataggtgtgagttattacgtttggttattttttatattttaatatatatatttttttatttttaatgttatttttattagttaatttataatatttatttattattatatttaaagtttatttgaagaaataaattagaaagaatgaaatattttagtttatatgttatttaatattaaattattttttaaattatatttaagaagttgatgatttaagttttggcggtttttaataaatattggttaaattataattaaattttaatatattagttagtatttattgagtatttttttttataatttaagtattgtattaggtgtttaaatataagtagtttgatttttaatatatttaaaaatatatatttaagatttaaaattttatttatggaatttagttatattttgaggtttttagtgttgagaaatttgaggtttgtgttgttttttagtttttaaagtttagttttgagtttttagattttggtggaattttatgtattgttaggttggttcgtaatatttgtgggataattttagtttttgtgtatatggttaggaggttggttgtaaatatttttaggtaggtggattaggatatgtttttggttatggttaggtggaggtatagtgttatatagtaggtagaagttaatattgatttgtttttaaagaaatatgtattatttttataagtagaaaaaatttttatttttgggggaaaagattatgttagattttttaggattaaatgttgatgtatttgttaaatttttatatattagaatatatttattatagaaagaatgaaaatgggatatttgtgtgttatttatgtgaatattttaaaaatattttataataattaagtattttataaattttatgaattgaaatttagtttaagttttaggaaaatataaattttgttagatattataaaaatgatataatatatatttattttaggtttattagaatatatttgttattatttgataagaatgaaaatgtattattttgtagtgttttaaaattaggaagatttagagtattaaaaatgattttttttttgaagtttatttattaatttttttttagttatttattgtttttgttataagtataaattaggatttagttagaattttttgaaatatatatttgtaacgattattgtatttattaaaatggtttagtgtttggttataggttttgtagatcgattaagaatttgaaaagttttgtttattttaaaggaagtttatgtgaattttgtttagagtttattttagatatgtagtttaagaatatagatagattagtagagatgtattttaaaataggaattttggtaatataataaattgatttttaattaaaatagatttatatattatatttatgttaagaagttgttttgttttattgtattttagattttatttttttgatttatggtttattttaagtataaaaaatttgttaatataattttttttaaaaggtataaataaaaatttataaaatttgtattatttgagatattttaggtatgaatttataattttgttataatttattatatatatgtatatatatatatatatttgggtatattgggggggttttaatttaagaaatgtataattggttatagatagatagttgttagaatttggtaatgggtacgtgtaggtttattatattaagtttatttgtagttgtttaaaatgtattataatataaggtcgggcgaggtggtttacgtttgtaattttagtattttgggaggttaaggtaggaggattgtttgaggttaggagtttgtgattagtttgggtaatagagtaagattttgtttttaaaaagaaaaaaaataattttttataaaataaaaataaaatgtattattagacgaaattaaataagaggtaatttatttaaatgataattttttttagtttgatatttaataaaaagtttaagtttttttaatttatatttaatgattaaatattaaatattaattttttttttttttttttttttgagacggagtttcgttttgtcgtttaggttggagtgtagtggcgcgattttggtttattgtaagtttcgtttttcgggtttacgttatttttttgttttagtttttcgagtagttgggattatagatatgcgttattacgttcggttaattttgtatttttagtagagatggggtttttttatgttggttaggttggttttgaattttttattttaggtgatttgtttgttttagttttataaagtagtagttgggattataggtatttattattatatttggttaatttttttgtattttttttgtaaagacgggattttattatgttagttaggatggtttcgattttttgattttatgattcgttcgttttagttttttaaagtgttgggattataggcgtgagttatttcgttcggttattaaatattaatttttaaatggtaaggatttattatttagaatttgtatttttattattaatatgtaaatatttattgaatatttattatgttatgtatattagagagagttagataaatttgatatagttatttttatagaatttatagtgtaatagatggtatgatatgtatatgagtaattgtgaatagtgttaaattgttatttaaaaaaaaagacggttgggcgttgtggtttatgtttgtaattttagtattttgggaggttaaggtaagttgatcgttcgaggttaagagttcgagattagtttggttaacgtggtaaaatttcgtttttattaaaaatataaaaaaaaaattagttaggtatggtggtataggtttgtaattttagttattagggaggttgagatatggagaattgtttgaatttaggaggtagaggttatagtgagtcgagattatattattatattttagtttgagtgatagagcgagatttcgtttaaaaaaaaaaaaaaaaaaaaagatataggttaagtgttatggtagttgaagagagaatttaaattttgttttagaagttttatttgtatgtggattattgatatgaaataatataaataggtataatttaataaataggaattttagttttaattattttaaatattaaaattttttattaaataggtttaataaatttaatttttataagagttagatagaaatttatttggtggtttataattttattagtttttatttgttttatttgatattaattaattttatttaatatggattagttaataatttagtggttgttttgataggaatagttggagagagttggggattgtaatatatttaattatataaaaatgtatttagtatttattttgattaaggtagtgtgtaatagaatttgtaggagagtaaaagaatgattataaatttataatttttaaagagtttatagttgggcgtggtggtttatgtttgtaaattttagtattttgggaggttgaggcgggtggattatttgaggttagaagtttaagattagtttagttaatatggcgaaattttgtttttataaaaaatataaaaattagtcgggtgtggtggtacgtgtttgtagttttagttatttgggaggtcgaggtaggagaatcgtttgaatttaggaggtggaggttgtagtgagtcgagattgtgttattgtattttattttagtttgggcgataagagtaagatttcgttataaaaaaaaaaaaaaaaaaaaagtttaaaatttagtgggaaaggtatatatatatataattaattgtatagtataataaagtttataatttgtaataaaatttaattcgataagtttagaaatttgtgatttattaaaaatagttatatatatataaaaagtaaatttagaatttaaagttatttagtattaatgattttttttttaagtagtattaagtttaaagtagtgattatattttattgtttagattgtaaattgagtaaaggagattagtatttttttgttattgaattagtatagtcgtgtaaattaataaggtaatggtagtgtttaattttttgtatgaatataagttatatttgttttattatttgtgatttggtgttgtatgtggttattattaatattttttgaaagaataattatttgtttaggttgttataataaaatattatagattgagtgatttaatagaaatttattttttatagttttggaggttgggaagtttaaaattaaggtatttgtaaggtaggttttaattttaggttttttttttggtttgaaggttttttaattgtgtgtttatatgattttttttaataagttttttggtgttttttttttttttttttttttttttgagatagagttttattttgttatttaggttggagtatagtggtataatttgggtttattgtaatttttaattttcgggtttaagtgatttttatgttttattttttcgagtagtttggatgataggagttcgttattatatttagttaatttttgtatttttagtagagatggtgttttattatattggttaggttggttttaaatttttgatttcgtgatttatttattttggttttttaaagtgttgggattataggtgtgagttattgcgttcgttttggtgtttttttatataagggtattaatttaattagatttgggtttaattttttcgattttttttaattgtaattattttttaaaggttttgtttttaaatattattatattgggggttaggattttaaaaaaggtatggggggggtgtgggaggatataaatgtttagtttataataagtatttaatataaaaatggttagaatagattataaaaaaaaggttttgtatggttttggggaagggtttaattttaaaatatttgagagttttggaggggtttagaagtggtaaatgaatgaaaacgtggttattttttagatttgttttttttaaatatggttatttttggttgaattagaaattaaaggataggttattaattattagttttaagttatttattatttgttgagatagtttagaaatttgattgtatttttttagagatttagaatatagtttttaaattttaatttatttgtgatatatttgtgaatgataaaaatcgttataggtatttttattaatttgaaagagtattgagaaattattttttattttgatttttgtttggaatgaaaattaatatttttgttataatcgattattgaaataattttattttttagtaaaattggtattataattttttttaatttttaaaattttataattttttgttagattgatttatgtaaatatataaattattaataattatgtacgttatatttgtaataatggtttttatgtaaatatttttgtggtttatatataaaatttttaattataaagttatattatttaaaattatagtaagtaagaaaattaatttaagttaagataatatttgtaatattaatttattatttgtgataaggattgtttaagtttttttgtggttaaaaaggaaaaaaaaaaaaaagatatgttggttagatgcggtggtttatatttgtaattttagtattttgggaggttgaggtgggcggattatttttggtttgtttaatatggtgaaatttcgtttttattaaaaatataaaaattagttgggcgtggtggcgggcgtttgtaattttagttattcgggaggttgaggtaggagaattgttagaatttaggaggtagagattgtagtgagttgagattgtattattgtattatagtttgggtaataaaagtgaaattttattttaaaaaaaaaaagataatgttcgtgggtttaaataagatttaatggaagtgagtttaaaaatgagttatgtgggttaggcgtagtggtttttatttgtaattttagtattttgggaggtcgaagtaggtagattatgaggttaggagatggagattattttggttaatacggtgaaattttgtttttataaaaattagttgggcgtggtggtgtttgtttgtaattttagttatttagaaggtttaggtaggagaatcgtttgaattagggagtcggtggttagagtgagtcgagattgtattattgtatttttgtttggtgatagagtaagattttattttaaaaaaaataaataaaaataaaagataaaaatgagttatgtgaattaaaagaggtataataatagataaattatattttatttaatttttagtaatgagtaatatttttaaatttttggaatgggtagaaattgttagttggtatatttttattttttatatttagatatattaaaatttttaaaaaaaaatattttaaagtagatgattcgttatttttttggataatttgtgttaatttaggataatagaaaattaaaattatgagttattgatgtaatatttttaaatgtaaaaataattaaagttaatagtagatttattttttaattttatattagttttataaataaattatatatataatttgtttgtttttttttttgagggataaagttgttagaagaattaaaattagtatttttgattatttaattaagggagggataaattattatttattttagggatatgggtttataattattatatgtgtaaggatatgaatttatttaatattataatttttttttttattagtgtgtatagtggaagaatagatatgtttattttggataaaaaaaaaattatatttattagttattagaagtataatgttgaagatagtagttttataataatttgaagtatgtgatcgaattagtagattattttagtagtagtgaattattgtaaatgttagtaatttggtagttattgggtagaaaaataagaattgaggtttaatattgatattaatggtggtgattgatatataaattttattaagtttatataatataaaattatagaaaggtagaagagtatattagtataattttaatatatttttattataagggagtaaaatgatatggtttagttattatttaatgaattgtagaaaattaaaagaaaattttaaggtaatttttttttgttgatttggttggttttttttttattttttgtaatatttagatataaataatggatagaaaataaagtagatttgtagtatgtaggttatagtgttaaatttatagaaagaaatttttgaattgaattgttttattttttggtggttataaagagtaattttggtttatatttatagattgatgttaatttatattttgttgataatagtgtggttaaggataaaaaaaaggtgtttcgttttattaattttgtaaaaaattattggtagggtaagttcggttagggtaggattatatttttaggattattattttcgaaatttagaagatattatatttatataaagtatattttttatattaatttgtaaaaatttaaaagtttttttttagtttaagtgtgtttaagtttattttggtagtttaaaacgatagttataagtagtatgggttgtattagatatatttgagggttaattttatgtaagtgatattgggtaagttattttaattatttgtgtttttaaggttatattagtgtttatttatttaaagggtatttgttatgtaattttagggtgtttatattagataatgtttgtaaaatatttattttaacgtttaaaatatagttaagtatttaataaatatttattattgttattattaatttaaaagtttagagattaagagtagaatttggggtgagataaatttaggtttaaattttagtattgttgggtaattttgggtaagttatttaatttttttgatttgtgtaatttaaaaaattagttaatatatataatagggtttagaagagtatttagtatatagtattatttaagtatttgttattgttaatatgtaaataatttaagggaaagaaattttttaaaaaggaagagggatttgtaaattaaaaataatgagtattttatgtttaaagaaaattaataaatagttagttttagtaataattaaatttattatatattggggtaggtattatattttaaagttaaaagcgtttatttaggttaggtacggtggtttatgtttgtaattttagtattttgggaagtagaggcgggtagatcgtttgagtttaggagtttaagattagtttggataatatggtaaaatattatttttataaaaaatataaatattaggtcgggcgtagtggtttacgtttgtaattttagtattttgggaggttaaggcgggtggattatttgagattaggagttcgagagtagtttggttaatatggtgaaatttcgtttttattaaaaatataaaaaattagttaggtatggtggtaggcgtttgtaattttagttatttagggggatgaggtaggagaatcgtttgaattcgggaggtagaggttgtattgagtcgagattatgttattgtattttagttcgggtaataagagcgaaattttattttaaaaaataaataaataaataaataaaataaagtataaatattagttagggatggtggtgcgtatttgtagttttagttatttgggaggttgaagtgggagaattttttgagtttggggagaattattcgagttcgggaagtcgaggttgtagtgagtagtgattgtgttattgtattttattttaggtgatagagtgagattttgttttaaaaaaaagaaattggtagaattaagtaagttgatgtttagagatgaaaaattaatattttttttttagtaattgaataaaaataatagttattattatttttttgagtatttatttgtagtttattttttaattggtattattcgagagagagagagttaggttcgagatagagtttttttttttaataattgtatgatttagggtatgtttgttagtttttttgaggttttaaaggttttttatttgtaaaatggtaataattatattattgttatagggttgttttgaagattaattaggattatgtaagtaaatatgatgatggttattattattgtttttcgttaggggttatgtaagggttgttgatttatatagattgttttataatttttttaataattttaagaggtagttagtattttagatatatataaaatgatttaagtttagagaggtgaagtaagttgtttatagttatataattagtaaatagtttaaataagttggatttttagttagatttcgttaatagtattgttttttattttaagttattataatgtttaatatgaaatagaatcgttttttttttagggtttaagtggttaattatttaatgtatttatttaataaattattatcgaggattttttataagttaagtattgtgttaagtgttagagttacggcggtgatttttgtttttaaaaagttttagtgggagaaataataggtaattaggttattgttaaaataataaaaataattataataaagtaggttaaagtatatttaattggtcggggttttgattattttagtaagtatgattagaacggttgaggagggaggttagtagtttggtcggtttaataaataagaaaaaattagtgagggtggagttaagatattagaggttgattacggttaagaatgtttttgaaggtaaggattagatttttattttttatattttggggtatcggttagtatggaatttggattttagtatatgtgaatttcggtttgaaatgatttaatgttttttttttagttttttcgtgtgttaaatacgtatggttatcgttattagagttgtagtggggttttaatgaggttatgagtatttttataaagatgaattatagtgtgtgtaaaattaaaggtaaaatttggtttttatacgtttttttaggtggtcgtttttcgtgtcgaggtttttttagaggtgtttcgagaattttattatcgtattttaaatttttagggaagggtttttttcgagaaagtttttacgtttttatttcgcgttattattttcgaatttgttttcggttttttttcgtagtacgttcgtaggcggtatatgttaattaaaacgttatttttattttttttttttatacgtagttttttttttttagggttttttcgaggagggatttattttaaatttcgttatttcgttttttttgtcgttttcgcgtgacgtaaagtcgaattcgggaaattggtcgttttcgtttgcggggttttttgggttcggtcgttcgagttcgtattgcggatttcgcgttttagggttcggtcgttatttgtcgcgtgggtttgaatcggttagggtcggtaggtcgagttgtttattacgacgttagggttgcgggtcgttataacggagtcggtcggcgcgcgggttgattgtttaggaggaggaagtcggtggcggagtagaggaggaggcggaggcgtagtaagaggcggcgtcgcgcgggaaagtcgagaggttcgtttgagggttcgtcgtagtcgtttgaagttgaggagaagtaggtttcgttttttgttcgtttcgttacgtttcgtaggtttcgttttcggtttcgttcgcgcgtttacgtcggcgtttattagtttgtaggtttattaggtagtcgtgggaatttttttttagaagaagtcgaggtttttttagcgaagttttttttttttttaatttagttttttatttagagggttttttgatttttaaatttatcggcgcgcgttgttttatggcggtcgtaaatcgggtttcggtttttcgggttttagttatcgcgtgaatttttggattagacgttttatttttaagattttgtattatttgtggtttttatttttttgatttttggtttagtgtttttttaaatttttaattggttgtaatagttgagatttagagttttagagttatttagattagggtatatatttgagaggatatttaattgttttgtagttttgtataaattagattttgagtttttatttttgttttattaaaatgagtatattagttcggcgcggtggtttatgtttgtaattttagtattttgggaggtcgaggtaggtggattatttaaggttaggagtacgagattagtttggttaatatggcgaaattttatttttattaaaaatataaaaattagttgggcgtggaggcgggcgtttgtaattttagttagttcggaggttgaggtaggagaattatttgaattcgggaggcggaggtcgtattgagttgagatcgtattattgtattttagttttcgcgatagaatgagatttcgttttaaaaataaataaaaataaaaataaataaaaatttaaaaataaaatgagtatattaataatatataaataggattattttgagtattagaggagtataggtatgcgtgtgtgtatgtatatatatatgtatttaggatagtatagttagtaaatgggaattattgttattattattgatttttatttttgtttatataagtttttatattgaatttgaaaataaaaatatgtttttttgttaattaatttttagataggttaggtaagtaagtaatagttgttttagtaatattattttttatatatttaattttatagttttagtatttattatagtgtttagtatatagttggtggttttttttttattaaggacgttgaggggtatgtgatggtaggagatttgtaaaattaggtaagttattgagtttttttggattttagtttttttatttaaaaaatgagaataataaatttgggtaatatggtgagatttagtttttataaaaatgaaaaattatttgggtttggtggttatgtgtttgtagttttagttatttgggaggttgaggtgggaggatggtttgagtttaggaggtttaggttgtagtgagttaagattgtgttattgtattttagtttgggtaatagagaaatattttgttttaagaaaaaagaaaaagagagagagagagaataataattattgttatgaagagttttacgagaattttaaaaattatttatgtaaagtattttatatagtatttgttatataataggtgtttaagaaatagtagttgttataattttagtatgtatgaatttgtgaagtttatatttttttattttttttgttttttttttttattttggagaggtagtaggttgtaatggaaaagggatgtatgggttttggattgagtttaaattttgggttttttattattatagtattttgattttgggtaagatttttggtttttgcgtgtttggttttttatacgttaaatgaggttaatatttttgttatagagtgtggtgaagattaaataaaataatatatgtaaaagtgtttagtatagagtttggtttaatatatgatgatattaatgttacgtgttttataataattttgttttaaatagtttatttttttttagtttttaagatttttttttttttttttgagatagagtttcgttttgttgttttgttggagtgtagttgaatgattttagtttattgtaatttttgtttttcgggtttaagtaatttttttgttttagtttttcgagtagttgggattataggcgtgtgatattagatttggttaatgtttgtatttttagtagaaaatggggttttattatgttggttaggttggttttgaatttttgattttaggtgattcgtttattttggttttttaaagtggtgagattatagatgtgagttattacgtttagtttgtttttaagattttttatttatttttttgttgatggatatttgggtagtttttaggtttgggttattagaaataatgttattatgaatattttgtatatattttttggtgaatatatgaatgtatttttatttggtatagaatttgaaatttatattagaatatttttattatttatttttttaataaatattgtgttttattaggaagttaatttagagaattttcggttatatattcgttttttgatatatgtggttttagttatttaaatttgtttttaaattaggtatttaataatttagaatttttttagtttgtttttggtttgtagtttttttttttaaattttgtagtattagatatttttgtattttaatagtggatttgaaataaataatgatagttagatgattgtaaaaataaagaaatagtattgtttttttaattttgttattttgtgtgataatttggattttttatttgtatttaaaatggaaaatagtaaatattgtaatttgtaagatgtaagatttttttttggtaagtgaaaatttggtttatatatgaaatggtttattgaatttttatattatatttaaagtggaaatgtatttttttaaaatattgtttttttattatagataaaagtaagaaaataattatttttaattattatatgattattattgaaaatgattttgttatagaggtgaaaaatgttaaaaaattatttattttggacgttttatatgttaggtatgttattgttttttattggaatatttgtatgtaggaagaaataaggaaagtatgagtgtaatttaagattttttttttcgatgtttttttagaaataatttttttttttttgagatggagttttgttttgttatttaggttggagtttagcggtgtgattttagtttattgtaatttttgttttttaggtttaagtaattttttttttttagtttttcgaatagttgggattatagttgtacgttattatattcggttaatttttgtatttttaatagagatagggttttattatattgattaggttggtttcgaatttttgattttaggtgattcgtttgtttcggttttttaaagtggtgggattataggtatgaattattgtatttagttagaaataattttgtaatcgatttgtttgaatataattatgaattatttgtgcgttataattaagtttaattgtattttttttttagaaatttttttattaagaagtttgtttttaattatggtgttgtgtttcgttaaaatttgtatttttatgaaaaataattattataaaaatatttatattaaatgtttatttttttaatgagttgataatggtttttttaataatgttagatgttttatttttattagaataattttttataagttttattttttttttttttttttttttgatacggagtttcgttttgttatttaggttggagtgtagtggcgcgatttcggtttattgtaagttttgtttttcgggtttacgttatttttttattttagtttttcgagtagttgggattataggtatttgttattacgtttggttaattttttttgtattttttagtagagacggggttttatcgtgttagttagaatggtttcgattttttgattttaggtgatttgttcgtttcggttttttaaaatgttgggattatagatatgagttatcgtgttcggtttttataaattttatttttattttataaatggggtgtaaaattgaattataattggaattaattaatatgatggttaatttttttttttttttttttttttgagataaagttttgttttgtgatttaggttggagtgtaatggcgcgatttgggtttattgtaatttttatttttcgggtttaagtaatttttttgttttagttttttgagtagttggaattataggtgtgtgttattacgtcgggttaatttttgtatttttagtagagatggggttttattatgttggttaggtcggtttgaaatttttgatttcgtgatttgtttgttttagttttttaaagcgttgggattataggcgtgagttatcgtgtttggttatgatggttagttttatgtgttaatttggtttatatatttggttaaatatttttttggatgtttttgtgaaggtgttttttgtatgagattaatatttaaatcggtgggttttgagaaagtatattattttttataatgtgagtgggttttattagttaaaggttttaatagaataaatattgattttttttgattaagaaggtattttttagtatattgtttttggattggaattgtaatttttttttgagtttttagatcgtaggtttatatttttagattttggatttaataagtttttataattgcgtgagttaattttttaaaataaatgaattttttttaatttcgtatatagatatatagatagatcgagatagatttaggtatattttgttgtttttgtttttgtggagaatttcgattaatataattgattttttattggaattatttaaagatattaatattaaattggtattatttaattgtgaagttttgttaatagagttacgtattataagtagtgttttattttttattatgtataag

SEQ ID NO: 915 - DNA, 6407 bp, Artificial Sequence
  chemically treated genomic DNA (Homo sapiens)
gttgggagatggacgtttagttattatgggagtgaagtttaatttatagggttattttgaatgggaaaattttgaaatttaggggtataattttaatttatattatcgtattttgtatttattatgtgtatggttatgtggtttttttttttgtattagttattgattgttgtgtgaaaaattagtataaatttggtggttttgaataatatatatttattattttatagtttttattgtttaggaatttaggtatagttggattttttgtttagggtgttataaggttatatttatagtgtcggttaggttgtgtttttatttggaagtttaattggggaagtatttatttttttgtttatatgtgttggtagtatttattttttgaggtagtaggtttgagagttttagttagttggaggttattgtagttatttgttatatggggtttttaatagggttatttgtttttttacggttagttaggaattgaaatttttgtacgattatgttgtgtgtgatataattatatatttttttttatttttgttatattttgttggttagaagtaatttatagattttatttatttttgaggggaggggagtatataaggttatgggtattagtaagtaggggttttgggtagggggtattttataggtttgtttattatatttttttttttttttttttttttttttttttttattttttttttttatttttttttttaagtttagttttagatatagggttttgttaataaatattagttttagagtaatgatgttaataagtgatattattatattttaggtattagtttttttaattttttattgaagtataatatatatatagaaaattgtaatattttaagtatagaaattaatgaattttttagaaattgaatatgtttatgtaattattatatagattaaataggaagatatattgttagtattttgaagttttttttaggtttttttttaggttttaatatttttaatggtgaatttttttttttaatatagcgttttattttgttgtttaggttggaatgtagtggtatgagtatagtttattgtagtttttaatttttgggtttaagtgattttttttttttagttttttaagtagttaggattatatgtatgtattattatgtttggttattttttttttttagaaatgaggttttgttatattgtttaagttggttttgaattttttgttttaagtaatttttttattttagttttttaaagtgttgggattataagtgtgagttattgtgtttaattaaaggtgaatttttaatagtataggaattattaatttagattgtttttgtataaattataagtagaattttataatatgtattattttatttttggtttttttgatttaaaatagttttgttgtatgtggttttagattgtttatttttattgttgaatagtagtttattatgcgaaggtgtcgtaatttatttattcgttttattttttaatgggtattggggtagttttttggttggaggtattataagtagtgttgttaggagtagtttagtatgtattttttggtgaatattagtaagtatttttgttgggtatatttgggagtgggtgtgttgagttatatagtgtgtatattttttgagttgtgtttatgtatatataatttttatatttttttatgggaggtaatattattttttttatatataataatttttttgggttagatttatattttttttatgggttttgaaagattagataggaaggaaggtcgataggtgtagtgtagaaagtgtaggttttatttatttttttattattgataattttttttttttttttttttaagagatatattgttttgaagatttttgtatattaattaaatgttttttggttagttttatttaatttttttagtgatttttttattatttaaagatatatatagttagttgtagagttgttggtttgataatttatataatagtattgtttagttttagataaaattagataaaatttaggtttaggtttattttggttatttttttataagaatataggatttttgttgggttgtgtaaatattagaagatgtcgttttttttttttgtgatgttgtagggattttagatgattaaagacgttacgtttttattgaggattttttagatcgagattaggtttgaagcgttttgatttatgttaatcgatatatattaatgtataagttatttatatattattttgattaggtataagttattatttttaaataaaaatttaaagttttatttatttattttgggttggtttttatgttatgataggttttatgaaggtagtgaggaatattttttaagttgttgttaagtggttagaaagattttaggttattgttagtagattgtattttggggtatattttgtttttttttatttggttttttgtttttatttttttatttttggttttttttttggttttggttttttttgggggggtaagaatttttttatagtaggatatgtaatgtatttatatatatatgagagatttgtttatttatttattaattattaataaaattagggttattatattttattttttattatatatttttttatgtgataaaagaagtatttttaaagagtattttagcgtttgttagatttttacggttcgttcgagtagtaataatatttttttgggatttagcgtgggaaattaatattattattgtattacgaattcggttcggtattttggttaagtaaaagtagtatatatagattatagagtattatttaggtttaaaaataaagaaaaaaggaaggaatttttatatatgttataatatgaatgtattttgagaatattatgttaagtgaaataagttagttataaaaagataaatattgtatgattttatttatatgaggtatttagagtagttaaatttatagagatagaaagtaatattgtggttgttatgaggaggaatgaagaattgttgttgttgttgtttttgttgttgtttttgagatgggagtttcgtttcgttgtttaggttggagtgtagtggtatgattttggtttattgtaatttttgtttttttggtattagtaatttttttgatttagttttttgagttattgggattatagttgtgtgttattatattttgttaattttgtatttttagtagagatagggttttattatgttggttagggtgattttaaatttttgattttgtgattcgttcgttttgattttttaaagtgttgggattataggtgtgagttattatattcggttagtattattgtttaatggatatagttttagttttaaaagatgaaaagagttgtggagatggatggtggtgatggttgtatagtattaggaatgtagttaatattattgaataatatatttaaaatgtttaatgattaattttatattatatgtattttattataaataaatttgaaaaaaagaaatatgttgatataaaaaattcgtatataattaaaaaatagattatattggattatataaaaatgtaaaattttggggttataaatgatattattaagaaagtgaaaagataagttatataatgggaaaaaaatttttgtaaattaagtatttgataaggggtttgtgattagagcgtataaagaatttttataatttaataataaagattatttaaaaatggataaaggatttgaatagatatttttttagagaaggtatataaataggtaaaaagtatatgaaaagatgtcgaacgttagggaagtgtaaataaaattataagatattattttacgttgggttattatatttaaaaaaaaaaaaattaataataataagtattggtgaggatgtggagaaattagaatttttatatattgtagttgggaaatggaaattattagtaggggaatgaataagtaaataatagtatatttatttgatggaatttattcgattattgaaagtatagtgagtgaacgattttaacggtgggttgagtaaagagatgcgtgtggtagggttatgtgttgtagatggggagttggaagaatttgttttaaggtgggttggaaggggtgggtagtgggttggggggagtgatgttttttttgatttgtaggtggtggaagtattgatttttagtttttgttttttttttaagagatgtttaatttattatatttttagttagtttttgtaatttatattttgttgggttgggtttaaagtttttaggtggtatttaggtattgaggggtggattgttcggggatttaggtttttttagagcgttttttttatttttaggtatttttaatatatatacgattttttaaaataaatattgtaaatataggtttaatataaaatttttaatgtgtattttatttttaaaatagattgagaatttttataaattttagcgttggtattttgggggtaattgagtttttttgtgcgttatgttatttttttaaaggttagggagagtagttataaaaggatagttttagttttagaattttagtttattaggtaaagtttgaggtttcggggtatggggaggagagaagggattagttgaggagttaggaaatttgggttttgagtttggttcggatttttagtaagttattttttttttttgcgttttcgtttttttttttgtaaaatggggtatgggtaaggtttggtaggggcggggttcgaattcgcggaaggcgacggcggtttcggtttttttcggggcgggcggttacgtgcgcgattacgcggttttattcggaagcgcgttcgggtttttgtaggcggggcgttgtgcgcgtcgcgattcggtacgtgggttttcgggttgttttttttgggggcggcgatttttttttcggagtttttttttaattttttcggaagtgaggtagggtttttaggggtttcggagcgggtttatttttagttttatttatttcgggcgtgtggtcgtgggtcggtcgttttttcgttcggggttaaagttttttagtcgtgaagaggggtggatgttataagttaagttttttttttagggtggtcgtgaggttcgggggtggggggaggtggggatttggggtgaaattggatagaaattggcgtgttaggtaaacgggagtttcgcggcggcgaattgttgattcgttttttttagagatttaggggtagggtcgggtttcgaaggtgtgggattttagaaggagttgttgaagacgggattaagggttatagggaggtttgttggggtttagatggtgaaagtgggcgttgggggtcgttttaggttggtttttcgttatttggagtttttttcgttagtgagtttttttcgagttttttttttagggtaagatagcgaggtgaagcggaagttttagtgtgatatcggcgaggttttttttttagtagtttttgggaagtatttttttgtttcgggaatatggtattcgggttaattatgtgggtgatggagttcgttttagggttcggttgttaaaggtcgaattcgtaatagtagtttttgtggcgggtagttatttgttttttattggtttatagtgtttgattttttaattaagttttttgttgtttttgttttttatttaaatatgaatgatttcggaattagattgattaattttgttatttgaagaagggaagttgggaaataggaataatgatttttatatttatgtaagaacgtagtttgttaaggttattttgtagtttgtttggttatttttatgatttaattttgtagggaggtagagtaggggatgttgttttgttttttcgtaggagtttgaggtttagagaggtttatgggatttggtaaagttaaaattagaatttggttttagatgttttttttgttagtttttttttatttatcgtattattttaggatttttattttttttatcgggattgtatttttattatttgggatgtgttatgttgtttttcgttagttatttttagtaagttttttggggttgtttggggagttttgagtgattcgtagaagtgagagtattttatgggaataaaggaggaaggaataaaagtgggtatttgttttgtgtaaagggttgtgttggtcgggtttttattttttattatgggaggtgaggggtaggattttagatatgtttttagtagattgttttagggtttggagagattagggattacgtagtttttttttagtttgtttttttttaacgggtagtagttaagattagggtatttgtttgtttttatattttttttgttttaagtatttgtagg

SEQ ID NO: 916 - DNA, 6407 bp, Artificial Sequence
  chemically treated genomic DNA (Homo sapiens)
tttgtaaatgtttaaaatagagagaatatgagggtaggtagatgttttggttttgattgttgttcgttgagaaaggataagttggagaagggttgcgtggtttttggtttttttaggttttgaggtagtttgttaagaatatatttgggattttgttttttattttttataatggagaataggaattcggttagtatagttttttgtatagagtaggtgtttatttttgttttttttttttttgtttttatgaagtgtttttatttttgcgggttatttagagttttttaagtagttttagggagtttgttaggagtgattgacgggagatagtatagtatattttaggtggtgaggatgtagtttcggtgaagggagtggggattttgggatgatacgatgaatggaaggaaattaataggaaaggtatttgggattaggttttagttttggttttgttaagttttataaatttttttgagttttaaatttttgcggagaaatagagtaatattttttattttatttttttatagggttagattatgggagtgattaggtaagttgtaaagtaattttagtaaattgcgtttttatataggtgtggggattattatttttattttttagttttttttttttaaataataggattaattaatttggtttcggaattatttatatttgaatagagggtaggaataatagaaaatttaattaggaagttaagtattgtgagttagtaagaggtaagtgattattcgttatagagattgttgttacgagttcggtttttagtagtcgaattttgagacgggttttattatttatatgattggttcgaatgttatattttcgaaatagggggatgttttttaaaggttgttgggaagagaatttcgtcggtgttatattgagattttcgttttatttcgttattttgttttagaaagggaattcggaggggatttattgacgaaaggagttttagatggcggggggttaatttggggcgatttttagcgtttatttttattatttggattttagtaaatttttttgtggtttttggtttcgtttttagtagttttttttggggttttatattttcggagttcggttttgtttttgagtttttggagagagcgagttagtagttcgtcgtcgcggggttttcgtttgtttagtacgttagtttttgtttagttttattttaaatttttatttttttttattttcgaattttacggttattttgggaaggaggtttgatttgtgatatttatttttttttacggttgaggaattttggtttcgagcgaggaagcgatcggtttacggttatacgttcggagtgggtgaggttaggagtgggttcgtttcgggatttttagggattttattttattttcgggagggttgaaggggggtttcggagggaggatcgtcgtttttagaggggatagttcggaggtttacgtatcggatcgcggcgcgtatagcgtttcgtttgtaggagttcgggcgcgttttcgggtaggatcgcgtgatcgcgtacgtgatcgttcgtttcgggaggggtcggagtcgtcgtcgtttttcgcgggttcgagtttcgtttttgttaggttttgtttatgttttattttatagaagaggaaacggaggcgtagagagaagaaataatttgttgagggttcgaattaggtttagaatttaggttttttggttttttagttgatttttttttttttttttatgtttcggaattttaggttttgtttaatgaattgaagttttggggttagagttgtttttttgtgattgttttttttgatttttggggaggtgatatagcgtatagaagggtttagttgtttttagagtgttaacgttggaatttataggagtttttaatttattttgggagtggagtgtatattaggagttttgtgttgaatttatgtttgtaatatttattttaaaaaatcgtatgtgtattgggggtgtttggaagtggagggggcgttttggaagggtttaaattttcgaatagtttattttttagtgtttgggtgttatttgggagttttgagtttagtttagtaaggtatgggttgtaagaattggttggggatatagtagattgagtattttttgggggaaaggtagaggttaagaattaatatttttattatttgtagattaaagagagtattattttttttaatttattatttattttttttagtttattttagggtaaatttttttaattttttatttatagtatatagttttgttatacgtatttttttgtttagtttatcgttgagatcgtttatttattatgtttttagtggtcgaatgaattttattaaatggatatgttgttatttatttatttatttttttattggtaatttttattttttaattgtaatgtatgaggattttgatttttttatatttttattaatgtttgttattgttgatttttttttttttaagtatagtaatttagcgtggagtggtgttttgtgattttatttgtatttttttgacgttcggtatttttttatgtgttttttgtttatttgtgtattttttttggagaaatgtttatttaaattttttatttatttttaaatggtttttattattgagttgtaagagttttttatacgttttggttataagttttttattagatatttgatttgtaaaagttttttttttattatgtggtttgtttttttatttttttagtggtattatttgtagttttaaagttttatatttttatgtaatttaatataatttattttttagttatgtacgggttttttgtgttaatatgttttttttttttaaatttgtttgtggtaaaatatatataatgtaaaattgattattaagtattttaagtgtattgtttagtggtattaattatatttttaatgttatgtagttattattattatttatttttatagttttttttattttttaaaattgaaattatatttattaagtaataatgttggtcgggtgtggtggtttatatttgtaattttaatattttgggaggttaaggcgggcggattataaagttaggagtttgaggttattttagttaatatggtgaaattttgtttttattaaaaatataaaattagtagggtgtggtggtatatagttgtagttttagtgatttaggaggttgagttaggagaattgttggtattaaggaggtagaggttgtagtgagttaagattatgttattgtattttagtttgggtaacggagcgagatttttattttaaaaataataataaaaataataataataataattttttatttttttttatagtaattataatgttattttttgtttttatgaatttgattattttaagtattttatataagtagaattatatagtatttgtttttttatgattggtttattttatttagtataatatttttaaggtgtatttatgttgtagtatatgtgagaattttttttttttttttttatttttaagtttaaataatattttatagtttgtatatattatttttgtttaattagggtatcgagtcgaattcgtaatatagtgatagtgttaattttttacgttaaattttaaaagaatattgttattattcgggcgggtcgtgaaaatttaataaacgttaaagtattttttggaagtgttttttttattatatgaaaaaatatgtaataaaaagtaaaatataatggttttaattttgttgatagttgatagatgggtagatagattttttatatatatgtaaatatattatatattttattataaaaaaatttttatttttttagagaaagttagagttagagagaaagttagagatggagagatagaaatagagagttaaatgggaaagaataaagtatattttaaagtatagtttgttagtagtagtttgaagtttttttgattatttggtagtagtttggaaaatgttttttattatttttatggaatttattatagtataagaattagtttaaagtaaatggatgggattttgaatttttgtttaaaaatgatggtttgtgtttggttaaaatggtgtgtgaatggtttatgtattgatatatatcgattggtataagttagagcgttttagatttggtttcggtttaagagatttttagtggagacgtggcgtttttggttatttaaggtttttgtagtattataaagggaaagggcggtattttttagtgtttatatagtttaatagaaattttgtgtttttgtaaggaggtgattaaggtggatttgaatttggattttgtttggttttatttgaaattaggtaatgttgttatgtaggttgttagattagtagttttgtagttggttatatgtgtttttgagtaataagagaattattagaggaattaaatgagattaattaaaggatatttgattggtatgtagaagtttttaaaataatgtgttttttaagaaaaaaaaaaaagaaggttgttaatagtgaaaagataggtgaaatttatattttttgtattgtatttgtcggtttttttttttgtttgattttttaggatttatggagaaagtgtaggtttgatttagaaaggttgttgtgtataaagaggatgatgttgttttttatagagggatgtgaggattgtatatatataaatatagtttaaaaaatatgtatattgtgtgatttagtatatttatttttagatatatttagtagaaatgtttattggtgtttattaaaagatatatattaggttgtttttagtagtattatttgtaatatttttaattagaaagttattttaatgtttattgaaaagtagaacggataagtaaattgcggtattttcgtatgatgggttattatttagtaatgagaatgaataatttagaattatatgtaataaaattattttgagttaaagaaattagaaatgaaataatatatgttgtaggattttgtttataatttatatagaaatagtttaaattaatagtttttatattgttaaaagtttatttttggttgggtataatggtttatatttgtaattttagtattttgggaggttgaggtgggaggattgtttaaggtaaggagtttaagattagtttgggtaatgtagtaagattttatttttaaaaaaaaaaaatagttaggtatggtagtgtatgtatgtagttttagttatttgggaggttgaggagggaggattatttgagtttaggggttggaggttatagtgagttatgtttatattattgtattttagtttgggtaatagaatgagacgttgtattgaaaaaaaaagtttattattgagggtgttaaggtttagaaggaagtttgagaagggttttagggtgttagtagtgtatttttttgtttgatttatgtgatggttatataggtatgtttagtttttgaagaatttattggtttttatatttagggtgttgtagttttttgtatgtatattatattttaatagaaagttaaaaaaattagtgtttggaatatagtgatgttatttattaatattattattttaaagttaatatttattggtaaagttttatgtttgaggttagatttgaaaggggaaatgaagaaagagggtaaggaaggagaagaggagaaagggaaagagggatgtggtggatagatttgtagggtgttttttatttaggatttttgtttattggtgtttatggttttgtgtgtttttttttttttaagggtgggtgaggtttatgaattgtttttaattaatagaatatgataaaggtgaaaggaggtatgtgattatattatatatagtataatcgtgtaggaattttagtttttggttggtcgtgaggaggtaggtagttttgttgaaaattttatgtggtaagtaattgtagtagtttttagttgattgaagtttttagatttattattttagagaatggatgttgttaatatatgtgagtaaggaaatggatgtttttttagttgagtttttagatgagaatatagtttggtcggtattgtgagtatagttttgtgatattttgaatagggagtttagttgtgtttagatttttgaatagtggaaattgtgagataataaatgtgtgttgtttaaagttattaagtttgtattaattttttatatagtaattaataattaatataagggagaaggttatatagttatgtatatgatgggtgtaaaatacgatgatatgaattgaaattatgtttttagattttaaagtttttttatttaaaatgattttatgagttggattttatttttatagtggttgggcgtttattttttagt

SEQ ID NO: 917 - DNA, 5234 bp, Artificial Sequence
  chemically treated genomic DNA (Homo sapiens)
agaattgagaaagaaaattagaaaataatttaatttttttaaattgttttttttgaagattgtgtatatattagaattataattgatttcggttaggtgtagtgggttttcgtttgtaattttagtatttgggaggttaaggtggatagattataaggttaggagattaagattattttggttaatacggtgaaattttgtttttattaaaaatataaaaaatgagttaggtgtggtggtaggcgtttgtagttttagttattcgagaggttgaggtaggagaattatttgaatttaggagacggaggttgtagtgagtcgagatcgcgttattgtattttagtttgggtgatagagtgagattttgttttaaaaaaaaaagaaaaaaaaaaaaattataattgattttaagaaaaaattttaagtaggagtataaggtgattttagatacgtttttaaagattattgtggttgttataaagaatgtgttgtagaggagttattttaatggttatataagaaaaggtggtgtttgtattattaaagaggtagagagaaatggatagattttatgtataattaggaagtaggaataataggatttaatatttattaaatatatatagtattttaggcgtgtttttagtgttgaagatatagtagtgattaaagtaggtaggatttttgttttgtatataaaggtagtatggtagattgtggggtgttggagttggtttatgagagttgattgttaaatttagaattttgagagttggttgttaaaatatagttattattaaaaattaaattatataaatttaaatatattttattaaaattaaagataattagtatttaaaagtaattattttttaattattttattatattttattattttttgtgtttttgtgattatttatatttattatatttgtatggtaggaatattgtatgtagtgtgttattgtatatttttttttaattttatatttggtgatgttttgtcggtagtttaaagttggttatggtaggagtatttatattataaaaatttgtaaatgttataaattagtgttttttttttttagagagtagttgttaaatatttgttagcgaattttttgataagaatatattatttttgtaggaatatatttttaggagttaggtatttagggtttaaattatggttttgttatttgttagtaatgtgatttggttaagatatttaatattggtttttttatttataaaacgggatttatagtgttatttttgtttgtttgtgttgttataataaaatgtttatgattgatgatttataatgaataaaaatgtattttttatagttttggaggttgggaagtttaagattaaggtgtttagtaggtttggtgtgtggtgaggttttggtttttgtttttatgatggtattttgaacgttgtattttttagaggagataaatgttgtttattacgtggtagaaaagtagaggagagagaatttatttttgaaagttttttttatagtagtattaatttatttatcgggtagagtttttatgatttaaatattttttatgaggtcgtatttttaaatattggtatattgggaattaagtttttaatatattaattcggaggggatagaaatatttaaattatagtaagtgttatatatatgttatatatatatatatatagtattaaggtttattatagattgagtaagaggaggggttagttgggattagtaagttttttggttgtttggagttttatttttaagttttttatttttgaggaaaggagatatttagtttttgttttttggagtatatagttatagattttaggtttagtatatttagtatttagtgggtttaggagaaatggttaaggttagagaatttatattaatagtagagtaggttggatatagatatagttattttaagggatagtgggttagtgtttagtttatatttggtttttggtaatgtaggaggaagttttgttatttgtagatatttgtaggttcgtgtttagattttttttgggagaagtaaaaaagttgttggttaggaggatagagaagattatttaggaaaagagatggttgaatttttttgggttcgagtttttagagaagtaagagattgaggtttttaaatttattttgggtagtaaggtttgtagaagaagggaaagaagtatagaagggtgtgtattattaaggatgtatagttagggttgagaggagtgtgggataaaggttgtggagagttagttttagagaggaaaaatttttgggttttggtttttagttgaagggcgggagtgtattgatttttgcggtttgtagggggtgtttaggtttaagtatcgataagtttttttttttagttttagtaggaagtttgggaaggatttaggatttatagaaggggttttttgtagtgaggggaagagaagtaaggttgttgagttttgattattttgagaagttttggtttgtattttgtgattaatattagggtggttaatatatttatagttttgggtttttaaatgtgtataatgttttatttttaatttttgtttaaaatttgaattttaatttggattgtttgtagtgtagatgattttgttggtttagtttttgggtggagtaggaggatttagtaatggtttttaagttattttcgggtatataggtgaattaggaagtaatagggaaaagggattataaagtagtattttgggatagatggattcggggtgttgtgagggggattatattaggtgtgtggggaaggggttaagttgaaaaatgattatttagtatatgtgttgtatgtttttagatagttttgttaggttagaaggagattgtatttttggattggtaagttagtgtaaggttttgttaataggattattgaagatttttattatgggttttttgtggggtgtttgttttttggggtgaaagtttttttttttttaggtaggtttagtaaaatttgtaggatttagatagggttttgatagttgaagataagttgttgaggaaatttttgatggaggattatggggtgtttaggagggagaatataaggttttagaggttgagagggaaagaaaaggtgagggggagttttagaatagtggtttttattgtttaatatttagaaagaagatatgttttgtaatggggagaaggtgagtatgagatattggttgtagtagcgatggtattgtttaggttgttaaggatttagagagtttagttttgtttattgatttatgaggagggaatgatgtttatagtatatttttattcgtaagttaggagaggatattgagtttgatggtagaggtttggtgatatgttgttttagaggtttcggaatgtgtgtttttttgttggaaggaaatttcgtagagtagaaaagggatttgagatttttggtaagattatatatgggattgttaggggtttggagttatttgtgagggattagggtttttttagttttggttagggagtaggggttttggaattttattttggtttatagttgagtttgtttataatttttttttgatttattaggtaaattttatatagaaatggggtagttttgggagtgggtttaggaagtattgaggatagtaggtgagattttaggaagagatggatgtggggtcgagatattggagagagaaataggattgttagataaagggcgtttgtgatttttagattttattatgtttattattataatttatttttaatttttaatatttttttattttagagggggggaaattgttagaaatttggttgtaatattagtaatattatttagtatttgaaatgtatttttgtattttttttatttaataaatatttttggaataatttttatatgttaggtattattttaggagttagggatatataatggtaaataagataggtaaaataaagtaaagtaataataattattattagataagtagatagatgaaagaattttaagttttagtaagtaaaataaaataagtaagggtttgaaatggttagataaggtggttaagaaaggttttattgagaaggtagtatttaagtaggagttagttagaaatattgtgaaattttagttatagttttatttgttttgggttggttaaataaagtttttttttttaaggtggaaattattaagaaagattaattattagtagtggtggtgttttttggaagagagatattttttgtttttgttttattattgttaattttttatttttaggtattttttgtaaagttttttgttagttagggaaggcgagaggttgggtatggggtttggatatttgataatagtgagatattattgtttttagatttattagtttaagggtaaagttgaagaggtttgggtatgttttagaaaggtttttgatgaagtttggaaaaagttgttttttgagtatttttaagtaagtttatttgtgtgtgtggttattaaaagtagtaagtattgttgtttttagttgttttagagtagggtttgatatagtatatagtaatattagtttttttttttttttattttttttattgtggagataaatttaattataaaaggtgatttttagtttatttatttttttgatttatggatgtttggatttattgttagtgtgagagttatagttggacgttagtagtgtagtttagttattgtttgaaaattgttgaagggggttggggggtagttgtcgggaaaaaggagttttggatttagatttttgtttagattttgattttatttgtagtgatgtaattagttaatattggtttagttttgggagatagtatatttttagtagagttggaggtgggggtggtgttgttgttaattttatatagggagtttaattggttatttagagttgttttgtggtttttgtagtttagtatggttagggtattgggagtattcgttgtattggggttgtggagtttatgttggtttttggttattgttattttttttttttcgtgagtaaagttgggattagaagcgaaggattgagttttgggttagggtaaggtagggttagtttttaggtttcggttaaatttggggttaggggttatgggaaagggatcggttttaatggattaagatatttattttgttttttttagg

SEQ ID NO: 918 - DNA, 5234 bp, Artificial Sequence
  chemically treated genomic DNA (Homo sapiens)
tttagggagaataaaatagatattttgatttattgggatcgattttttttttatagtttttgattttaaatttgatcgaggtttaaaaattggttttattttattttagtttagaatttaatttttcgtttttagttttagttttatttacggaggaagaggggtggtaatggttagagattagtataggttttataattttagtgtaacgggtgtttttagtattttagttatgttgagttgtagaggttataggatagttttgggtgattagttgaattttttatatagagttggtagtagtattatttttatttttaattttattgggaatgtgttgttttttaggattaagttaatattggttgattatattattgtaaataaggttagggtttggatagaaatttgaatttaagatttttttttttcggtagttgttttttaattttttttagtaatttttaagtagtaattgggttatattgttgacgtttagttgtgatttttatattggtaatgggtttaggtatttataagttagggaagtgagtagattgaggattattttttgtgattgagtttatttttataatgggggaggtgagaaaaggagggaattaatattgttgtgtattgtgttaagttttgttttaaggtagttagagatagtaatatttattatttttagtaattatatatatagataaatttatttagaaatatttagagaatagttttttttaagttttattaggggtttttttggggtatgtttaagtttttttagttttatttttgggttagtgagtttggggataataatgttttattgttgttaaatgtttaagttttatgtttagtttttcgttttttttgattggtaaagggttttgtaaaaagtgtttggaagtgaagggttgatagtaatgaggtagaaataggaggtgttttttttttagagagtattattattattagtaattagttttttttggtagtttttattttgggggaaaaagttttatttaattaatttagaataaatagaattgtaattggaattttataatatttttagttgatttttgtttaaatgttatttttttaatgaagttttttttgattattttatttagttattttagatttttgtttgttttattttatttattaaaatttgaaatttttttatttgtttatttatttggtgatggttgttgttgttttgttttgttttgtttgttttgtttattattatatatttttgatttttaaaatagtgtttggtatataagagttgttttagaaatatttgttgaatgaaaaaaatgtaaaaatgtattttaagtattgagtagtgttgttagtgttgtagttaaatttttgataatttttttttttttagggtaggagaatattaggaattgggggtaggttatggtagtaggtataatgagatttaggagttatagacgttttttatttgatagttttgtttttttttttagtgtttcggttttatatttatttttttttgggattttatttgttatttttagtattttttgggtttatttttaaagttgttttatttttgtgtgagatttgtttagtgagttagaaaagaattatgggtagatttagttatgggttaggatgaagttttaggatttttgttttttagttaaggttgaaagggttttgattttttatagatggttttagatttttgatagttttatatataattttattaaaagttttagattttttttttattttgcgaagtttttttttaataggaaaatatatatttcggaatttttggaataatatgttattaggtttttgttattaggtttaatgtttttttttgatttacgaatgaaaatgtgttgtgaatattattttttttttataggttagtgggtaaggttggattttttgagtttttggtagtttgggtaatgttatcgttgttatagttaatgttttatatttattttttttttattgtagggtatgttttttttttgggtgttgggtaatgggagttattattttaagatttttttttatttttttttttttttttagtttttgaaattttatatttttttttttgagtattttatgattttttattaggaatttttttaataatttgtttttagttgttagaattttgtttgaattttatagattttgttgggtttgtttggggagagggaagtttttattttaagaaataaatattttatagaaaatttatagtgagagtttttaatagttttattagtagggttttgtattgatttgttagtttaagggtgtagtttttttttggtttaatagggttgtttgagggtatatagtatatatattggatgattattttttagtttgattttttttttatatatttggtgtggttttttttatagtatttcggatttatttattttagaatattattttatggttttttttttttgttgttttttaatttatttgtgtattcgagaatggtttagaaattattattggatttttttgttttatttagggattaggttagtagagttatttgtattgtaggtagtttaggttgaagtttaagttttgggtaggagttgaaagtagaatattgtatatatttgggaatttagggttgtggatatgttggttattttggtgttggttatagggtataagttaagattttttagggtagttaagatttagtagttttgttttttttttttttattataggaggttttttttgtgggttttgggttttttttaggttttttattggggttgaggaaagaagtttgtcggtatttgggtttgagtattttttgtaggtcgtaggaattagtgtattttcgttttttaattagaggttagagtttaggagttttttttttttgaaattagttttttatagtttttgttttatattttttttagttttggttgtgtatttttagtggtatatatttttttatgtttttttttttttttttgtaaattttgttgtttagagtggatttggggattttaattttttgtttttttgggaattcgagtttagagaaatttaattatttttttttttgggtagttttttttatttttttaattagtagtttttttattttttttagaaggggtttgaatacgaatttgtaaatgtttgtaaatgatagagtttttttttgtattgttaagagttagatgtaagttggatattgatttattgttttttggaatggttatgtttatgtttagtttgttttgttgttgatatgagttttttgattttagttattttttttgggtttattgagtgttaggtgtgttgggtttgaagtttgtggttgtatattttagggagtaggaattgaatgttttttttttttaggggtaggaggtttagggataaagttttaggtagttaaagagtttgttgattttagttgatttttttttttgtttagtttataatgggttttagtgttatatatatatatatatagtatgtatatagtatttgttatggtttgaatgtttttgtttttttcgaattgatgtgttggaagtttaatttttaatgtgttagtgtttggaggtgcggttttatgagaggtgtttaggttatgagagttttgttcgatgaatggattaatgttgttataaaaagggtttttagaagtggatttttttttttttgtttttttgttacgtgatgaatagtatttgttttttttagaggatgtagcgtttaaaatgttattatagaagtagagattaggattttattatatattaaatttgttgggtattttaattttggattttttagtttttagaattgtgagaaatatatttttgtttattataaattattagttatgggtattttgttatagtagtataaatagataaaggtagtattatgagtttcgttttatgaatgaggaagttaatattaggtattttagttaaattatattgttagtaagtggtagagttatgatttaaattttgggtgtttgatttttaggggtgtgtttttataaggatagtgtgtttttattaaggggttcgttggtaaatatttaataattgttttttagggggaaaaagtattgatttgtaatatttgtagatttttgtgatataaatatttttattatggttaattttaagttatcgataagatattattaaatgtagagttgggaagggatgtatagtaatatattgtatataatatttttattatatagatatgatagatataaataattataagagtataggggatagtaaaatgtagtaaaataattaggaagtgattatttttaagtattgattatttttggttttaatagaatgtatttaagtttatatagtttgatttttaataatagttgtgttttaataattagtttttaaaattttaaatttgataattagtttttatgagttagttttagtattttatagtttattatgttgtttttgtgtataggataaggattttatttgttttagttattgttatatttttagtattgagaatacgtttgaaatattgtatgtatttaataaatattgaattttattatttttattttttaattatatataaaatttgtttatttttttttgtttttttagtaatgtaaatattatttttttttgtgtgattattgaaatagtttttttataatatattttttataataattatagtgatttttaaaaacgtatttgagattattttatgtttttgtttaaaatttttttttgaagttagttgtaattttttttttttttttttttttttgagatagagttttattttgttatttaggttggagtatagtggcgcgatttcggtttattgtaattttcgttttttgggtttaagtgatttttttgttttagtttttcgagtagttgggattataggcgtttgttattatatttggtttattttttgtatttttagtagaaatagggttttatcgtgttagttaggatggttttaattttttgattttgtgatttgtttattttggttttttaaatgttgggattataggcgggagtttattgtatttggtcgaagttagttgtaattttaatgtatatatagtttttaagaggaatagtttagagaagttgaattgttttttgatttttttttttaatttt

SEQ ID NO: 919 - DNA, 5278 bp, Artificial Sequence
  chemically treated genomic DNA (Homo sapiens)
taagaataataaagggaggaaggataggcgtgggggcggtattgtgtataggtttttttgcggcgagtttgtttaagttttttgttaatttttttaaaagattgttggatatttattagtaaatttttagaatttttttttataggtcgggagtaggggtttatatttgtaattttagtattttgggaggtcgaggtaggtagattatttgaggtcgggagttcgagattagtttgattgatatagagaaatttcgtttttattaaaaatataaaattagttaggtgtggtggcgtatatttgtaattttagttattcgggaggttgaggtaggagaatcgtttgaattcgagaggttgaggttgcggtgagtcgagatggcgttattgtattttagtttgggtgataagagttaaattttattttaaaaaaaaatttatttttatagtatggataatagttaggtatacgttgtaaatttatttttgtttttattaatagtgttttgatttatataagatttttatgttggttttattaaggtatattatatataagaaaatattgattttaattgaataatttaatcggttttgataaatatataatttgtggagtatttattttggttttcgggttttttttttttttatttgattgtttttttttgttgttttaggggtgtggttaggtacgttttttttggggttttttaggattggagtcgtagtatggattttgtttatggtattttgttttttttagtattgaagagatattgttatataaatggtttacgtgtttattttttcgtggtgaatatcgatggacgtgttttcgtgtgggcgtatttttgttttttttgggtaaatatttaggaatatatggtttttgaggttgtacgtgtgatatttttatttttggagtttggggtgtttttttatcgattagttttaggggtgtgcggtagtattttttatggtgggattggggtttttagaggagttttgttgttgaattttgtacgtttcgtgttcgtttgtatatatttttaggttgagtttcgtacgttttatgttcgtttgtagatatttttaggttgagtttcgtacgttttatgttcgtttatagatattttttgaggttgagttttatacgtttcgtgttcgtttgtagatttttaggttgagtttcgtacgtttcgtgttcgtttgtagatatttttttaggttgaattttgtacgttttatgttcgtttgtagatatttttaggttgagtttcgtacgtttcgtgttcgtttgtagatttttttttaggttgagtttcgtacgttttgtgttcgtttgtagatatttttttaggttgagtttgatatgtttcgtgttcgtttgtagatatttttttagattgtttaggaaatttttttttttttttattatagagttatttatgttttttttttaaaggtttagttttgttttttagttcgagattttgatttcgttcggtatcgtgtgtgtgttgtgagtagtttttagttgatttgttttataggcgttttttgttttttcgagtgtgtttaggttttttttaagtttttgtaaaatttttgggattggtttttatttttggatcggttttagtttaatttttgtagttttataaattataatatttagtaggtaattttttttttttttaaagttattttggtaatttttggtgtttttttgtttttttgtgttgattttataatatattaagtattttgaatttttgttgggaaggacggaattagtatttttaatttttttatggagtaagatgtttcgaaagggaaggggttttgttttagttacggttgtgttagaaaagttttttaaatgttttatacgtttttttatgatttatttttaaaaatattttaagtgtagtattagtgttttaaaacgttgtagtagttattacgtgtttggttcgtcgcgatgtacgtgtcgcgttttttcgcgattttggcgttttttacgcggggcgggtaaaggcggtttttgttggaggttcgcgtttattttttttaggtggaagggtcgtttttggggtcgaggtttgtcgttttgattttcggttggaagtgaggtcgacggtaaaaggaagtatcgggggaagcgttttcgaggattaggaaatatatatcggacgtcggagcgtattcgagtgttcggttcgcgggatacgttgtcgttcgtcgtttagtcgtcgttttttattcgcgtttatgcgtgttcgtttcgagtcgagttttgattgcgatcgcgcggtggacggacggtaggcgggattttcgggatcgtacgtgggtggagtttcgggttagtagcgatcggcgtaggagggcgaggcgggcgttggattgggtagaggtagggtttgtttgattgtaaaacgttttttttgttttgagacgaagtagcgttttgttgtttagtgtagtggcgcgatttcggtttatcgtaatattcgtttttcgggttttagcgatttttttgttttagtttttcgagtagttgggattataggcgcgcgttattgtagtcgattaattttttgtgtttttagtagagatagggttttattatgttggttaggttggttttgaatttttgattttaagtaatttattcgtttaggtttttcgaagtgttgggattataggcgtgagttatcgcgttcggttttttttgttttttaatgaggatgtatttttgatttttttgtaattttaaaaaatgttaaaaatatgtttttttgggtttgaaagagttaggatgtgcgtttatgtgtttggggtgagttttgggtatttcgtttttttgtggtaatttgtgggtacggtttaattggattacgttgagtttttgtagcgttggaattttaagtttggggggattgggcgggtagggtcgtttgttacgtaggttcgagaaagaggagagtggtggagggggcgtttttacgtttggttttagggtatacggttgcgttcgtcgttcggaattttatcggggttgtaagcgttttcggggtgggttgcggtgggagtaggggagttggggtgcgtggtggtaggtggggtgcgcggtcgttttatttgcgcggaagggtagtcgggtaatcggatttcgcggttattcgggggtttttagtttcgagtatttcgttttggtttcggcggattttagtttttttttagttcgtagtttcgggattttcgcggtgggcggcgtcgcgttgtcggcgtagggagggtttttggtgtatcggtatcgttgagtcgggttttttcgtcggtttgttttcgggagagttcggggttttgttcggagatgtcgtttcgggtttttagatatcggttttttggtttttttcgagtaatttcgagttcggtttcggtttttagttaagtttaatttcgagaggtcgcggttttattggtttcgtttttcgcgttgttttcggaagtttcgttcgatcgcggtttttgatagacgggtcgtttagttaatcggggtggggcggggttcgatggcgcgtagttaatggtaggtcgcgtttggtagacggacgggcgcggggcggggcgtgcgtaggttcgttcgagttttcgtcgttcgtgttttgcgttcgtaattcgagtcgtattcgtcgcggacggagtttatgcgcggggcgaatcgcgcgttttcgttttcgtttcgtttcggtttcggtttcggttttggtttcgggggtagtcgcgtttgtgaacggtgagtgcgggtagggatcggtcgggtcgcgcgtttttttcgtttttaggcggtagtaatacgcgcggcgcgggtcgggggcgcggggtcggcgggcgtaagcggcggcggcggcggcggcggcgggtgggtggggtcgggcggggttcgcgggtataggtgagcgggcgtcgggggttgcggcgggcgggggtttttttttttttggggtttgcgggaattcgggttttattcgtggtttcgcgttgggtacggtttttacgtcggcgtattcgggagtttcgggttcggcgtttttatattcgggggcgtttgggaggaggcggtcgcggttacggtacgttcgggtattttcgatttagtattataggtcgcggattaggtcgggggttttagttttagtgtttttttttttttcgggtttttcgcgtcgtttttcggtttttttttgtcgtttagtttttgttttttaggagtttttttgttttttttagttttttgtggttgaaagatgttttcggtttttcgtcgggggtgcggggcgttgttcgggtttgtttttttttcggcggcgtttagtacgtagtaggcgtttagtaaatatttgtcggaggtattagcgtcgcggggtttgtaggttggtattagtttgttcgggtacgtcgtggcgcgtttcgtcgtggttagatttgttttggaggacggtaattttagttttcgggcgtttttttttagtttttttgtcgatttagtagtttttaatttgggtgcgtggttgagagcgtttagttgttagttttgtttttgagggttgggtttttttttttattattgggttattaagagtaagtgggggcgaggcgatagttttttcgtacgttgggttgtagttgtataggtaggtacgttgtagtttttgttgtttggcgttggggtttagggatcgttgtgggtttgttttttagatggttttgttagtagttgttttgtggggtttggggttgggtttgggtttggttgagtagggttttttttggtaggtggggtaggagattttgtaggaggatttcgggtcgtaggtttttgaggagcgatgacggaatataagttggtggtggtgggcgtcggcggtgtgggtaagagtgcgttgattatttagttgatttagaattattttgtggacgaatacgattttattatagaggtgagtttggcgtcgtcgtttaggtgttagtagttgttgcgggcgagtttaggatatagttaggatagggttggttgtagtttttggttttttgtatggtgttgtggttttgttttttgttttttttagaggaggggagtttttcgttttagtattttaggagaggagggggtatgaggggtatgagaggattagggagaggttggttgtgtgaattttttttacggaaggttttgagggggtttttgagttttgtttttttgtagg

SEQ ID NO: 920 - DNA, 5278 bp, Artificial Sequence
  chemically treated genomic DNA (Homo sapiens)
tttgtaggaggatagggtttagggatttttttaggatttttcgtggggggagtttatatagttagtttttttttggtttttttatgttttttatgttttttttttttttggggtgttgagacgagggattttttttttttagaggaagtaggagatagggttatagtattatgtaggggattaggggttgtagttagttttattttggttgtgttttgggttcgttcgtagtagttgttggtatttggacggcggcgttaggtttatttttatagtggggtcgtattcgtttataaaatggttttggattagttggatggttagcgtatttttgtttatatcgtcggcgtttattattattagtttatatttcgttatcgttttttaggggtttgcggttcggggtttttttatagggttttttgttttatttgttaaggagggttttgtttagttaggtttaggtttagttttaggttttatagggtagttgttggtagggttatttgaagggtaaatttatagcggtttttgggttttaacgttaggtagtaaggattgtagcgtgtttatttgtgtagttgtaatttagcgtgcgggagggttgtcgtttcgtttttatttgtttttaatgatttagtgatgggaaaagggatttagtttttaaaggtagggttgatagttgagcgtttttaattacgtatttaaattagaagttgttgggtcggtagaaaggttaaagggaggcgttcgagggttgaggttatcgttttttagaataggtttggttacggcggagcgcgttacggcgtgttcgggtaggttagtgttagtttgtaggtttcgcggcgttggtgttttcgataagtatttgttgagcgtttattgcgtattaggcgtcgtcgaggggagggtagattcgggtagcgtttcgtattttcggcggggaatcgggggtattttttagttatagaaagttggagaagatagaggagtttttgggaagtagggattgagcgataggaaggggtcgagaagcggcgcgggagattcggagagggaaaaggtattggggttgaggttttcggtttggttcgcgatttgtgatgttgaatcgggggtgttcgggcgtgtcgtggtcgcggtcgtttttttttagacgttttcgggtgtgagggcgtcgggttcgaggttttcgggtacgtcggcgtggggatcgtgtttagcgcgaggttacgggtggggttcggattttcgtaggttttagggaggaaggggttttcgttcgtcgtagttttcgacgttcgtttatttgtgttcgcgggtttcgttcggttttatttattcgtcgtcgtcgtcgtcgtcgtcgtttacgttcgtcggtttcgcgttttcggttcgcgtcgcgcgtattgttgtcgtttgggggcgaggagggcgcgcggttcggtcgatttttgttcgtatttatcgtttataggcgcgattgttttcggggttagggtcggggtcgaggtcggggcggggcgggggcgggggcgcgcggttcgtttcgcgtatgggtttcgttcgcggcgggtgcggttcgggttgcgggcgtagggtacgggcggcggagattcgggcgggtttgcgtacgtttcgtttcgcgttcgttcgtttgttaggcgcggtttattattggttgcgcgttatcgggtttcgttttatttcggttggttgagcggttcgtttgttaggagtcgcggtcgggcggggttttcgggagtaacgcgggaggcggagttagtagggtcgcggtttttcggggttgggtttggttggagatcggagtcgagttcggggttgttcgaggaaggttagggagtcggtgtttgggggttcggggcggtattttcgagtagggtttcgggttttttcgggaataggtcggcgagagaattcgatttagcggtgtcggtgtattagaggttttttttgcgtcggtagcgcggcgtcgtttatcgcggaggtttcggggttacgggttggggaaaggttgggattcgtcgggattaaggcgggatgttcggagttgggggttttcgggtggtcgcggggttcggttgttcggttgttttttcgcgtaggtggagcggtcgcgtattttatttattattacgtattttagtttttttatttttatcgtaatttatttcgaggacgtttgtagtttcggtggggtttcgggcggcgggcgtagtcgtgtgttttggggttaggcgtgagaacgttttttttattatttttttttttttcgggtttgcgtggtaggcgattttgttcgtttagtttttttaaatttgaggttttaacgttgtagaagtttagcgtggtttagttaaatcgtatttataagttgttataggggagcgaagtgtttagggtttattttaagtatatagacgtatattttagtttttttaaatttaaaaagatatgtttttaatattttttaaaattgtaaaggaattagaaatatatttttattaaaaaataaaaagggtcgggcgcggtggtttacgtttataattttagtatttcgggaggtttaagcgggtggattatttgaggttaggagtttaagattagtttggttaatatgatgaaattttgtttttattaaaaatataaaaaattagtcggttgtagtggcgcgcgtttgtagttttagttattcgggaggttgaggtaggagaatcgttggaattcgggaggcggatgttgcggtgagtcgaaatcgcgttattgtattgggtaatagagcgttatttcgttttaaaataaaaaaggcgttttatagttaggtaaattttgtttttgtttagtttagcgttcgtttcgtttttttgcgtcggtcgttgttgattcggggttttatttacgtgcggtttcgggggtttcgtttgtcgttcgtttatcgcgcggtcgtagttagagttcggttcggggcggatacgtatgaacgcgagtgagaagcggcgattggacggcgggcggtagcgtgtttcgcgggtcgggtattcgggtgcgtttcggcgttcggtgtgtgttttttggttttcgggggcgtttttttcggtgtttttttttgtcgtcggttttatttttaatcgaaggttaggacggtaggtttcggttttaggggcgatttttttatttgggaaaggtgggcgcgagtttttagtagagatcgtttttattcgtttcgcgtgggaagcgttaggatcgcgaggaaacgcgatacgtgtatcgcgacggattaggtacgtgataattattatagcgttttaaagtattagtgttatatttaaaatgtttttagaaataagttataaggagacgtgtaagatatttaaagagtttttttaatatagtcgtgattgaagtaaggttttttttttttcgagatattttgttttatagagaggttgaggatgttgatttcgttttttttagtaggagtttagggtgtttgatgtgttgtgaagttaatataggaggataggaaggtattaagaattgttaagatagttttgaaaaggggagaaattgtttattggatattatgatttataaaattatagggattgaattggaatcggtttaggaatggaaattagttttaggggttttgtaggggtttagaagaggtttggatatattcgggggggtaggaggcgtttgtggggtaggttagttgggggttgtttatagtatatatacgatgtcggacggagttaagatttcggattagaaagtaaagttgaatttttgaaaagaaagtatgggtagttttgtgataagaaaagagaaggattttttaaatagtttgagagagtgtttgtaaacgggtacggagtatgttaggtttagtttgagagggtgtttgtaaacgggtatagagcgtgcggggtttagtttgagagagagtttgtaaacgggtacggagcgtgcggggtttagtttgagaatgtttgtaaacgggtatggagcgtgtagggtttagtttgagagggtgtttgtaaacgggtacggagcgtgcggggtttagtttgagagtttgtaaacgggtacggagcgtgtggggtttagttttagagagtgtttgtaaacgggtatggagcgtgcggggtttagtttgagaatgtttgtaaacgggtatggagcgtgcggggtttagtttgagaatgtgtgtaaacgggtacggagcgtgtagggtttagtagtagggtttttttgggaattttagttttattatggggggtgttgtcgtatatttttggagttggtcggtaggagggtattttagattttagaggtgggggtgttatacgtataattttaaaggttatgtatttttgggtgtttatttaagagaaataggagtgcgtttatacgaagatacgtttatcgatgtttattacgggggaatggatacgtggattatttgtgtggtagtgtttttttagtgttagggagggtagaatgttatgagtagagtttatgttgcggttttaattttgagaaattttagggaagacgtatttaattatatttttgagataataggaagaaatagttaggtgggagagggaagggttcgaagattagggtgggtattttataggttgtatatttgttagagtcgattgaattatttagttaaaattagtgtttttttgtgtatggtgtattttaataaagttaatataaagattttatgtgggttagaatattattaataaaggtaaaaataaatttgtaacgtatatttgattgttatttatattatgaaagtaaatttttttttgagatggagtttggtttttgttatttaagttggagtgtagtggcgttatttcggtttatcgtaattttagtttttcgggtttaaacgatttttttgttttagtttttcgagtagttggggttataggtatgcgttattatatttagttaattttgtatttttagtagaggcggggtttttttgtgttagttaggttggtttcgaattttcgattttaggtaatttgtttgtttcggttttttaaagtgttgggattataggtatgagtttttgttttcggtttatgaaaagaaattttaaaaatttattagtgaatgtttaataattttttggaaaagttagtagaagatttgaataggttcgtcgtagaggggtttgtgtataatgtcgtttttacgtttgttttttttttttttattgttttta

SEQ ID NO: 921 - DNA, 7589 bp, Artificial Sequence
  chemically treated genomic DNA (Homo sapiens)
gaatcggtttttttggtaggagttggttaagtgtgtttgaggagtagggaggaggaggttagtagggttatagtagggtgagcgggcgatagatgagaggaggagaggcgtcgggttagttaggattttgtggttacggtgagtgataattcggattttgattttgggtaagttaaggtttttgagtagcggagggataggcgttgatttaggcgttaatgggcgttttttggcggttgtttggggatagattgttgggggcgagggtagaagtaggggtatagggaggaggtgagtggattttatttaagtcgggggcggtggagaatgttggatttaatttagcggtgaagttgatagatttggttaatgggttagatgtggggatagattaaaggatgttggttcgagtagttgtagggcgatattttaagtttttcgagatggggaaggtgtggggatgggggcgatgggggtggggagtaggattggaggtggttcggtttatagtaagattagaatttatagtatatgttgaggggaatggatataagtgttgggtttagtaaagaagttcgtttattttattttattttaattttttagatggagttttattttattgtttagattggagtgtagtggtacgattttggtttattgtaatttttattttttgggtttaagcgattttttgttttagttttttgagtagttggggttataggcgtatattattatgttcggttaattttgtagttttagtagagacggggttttgttttgttggttaggttggtttcgaatttttggttttaagtgatttatttatttcggttttttaaagtgttggaattataggttgagttattacgtttggataattttttaaaaaatttttttaaagtaggattgatagtagatgagttttttcggtgggttaggttttttgttagggattttaatggaatgattttatttaaatttattataattttatggggtttttattgttttcgttttgtgggggtagagaggaaaagtttttagtatgtagagtgttggaatttggatttgtatataaagttacgattttgaattgtttaaattttaagatttttttttttatttttgattttgttttttaattttttattttttttggatttttgtttaattttattttagtgttttgatttttttcgagtttaattttttttttttttgttaggattttgtttttttatttttgtgtttttttgtttgggtttttgtttttttgtttgggtgtttgttatttttcgttttttggtttttcgttttttcgtttttaattttatagggttgatgtggacgttgttgtatggggggaatatttgttttgtttatagggttttgttattttttttttttaggagggtattttggttgttttattcgtggatttgaatttgttattggattgagtttttttttagaagttgttataagatgatattttatgtttttgtttttttcgtgtgtttttttaagtttttttattttatttagggttgtggggtggtggttgttttatttgtttttgttaaaaataaattgtttaaaattttttttattaaaaacgttataaagtatttaattgtttgtttttatatttgggaattaaagttttaaggagaggagatttggtttagagatttttgtggtttacgtaaattgaggaaagaattagtttatttattttagaaatatttatttgtagtatttataagagtttgttttttggatatgtaatatatttgagagaatatttgtaaatattttagtaatttgtattttttttttttattgtacgatttggttattttagttaatgttgtatgatggttatggagtttttttagtgaattttatagaaaggtatagtttaattttatttgtgtttaggatattattttttttttgtttttttttttttattgttttttttaagttttttttgttggttttttatttatttatagattagtggtttgttttatatatattttttattttttttttttttttggagatagggttttgttttgttgtttatatttgtattgttatatagatatagtggtattattatggtttattgtagttttaattttttgggtttaagtgatttttttattttagtttttttagtagttggaattaaaggtatgcgatacgacgtttagttaatttttaaaaaagaatttttatgggaggttaaggtaggtggattatttgaggttaggagtttaagattagttaggttaatatggtgaaattttatttttattaaaaatataaaaattagtcgggtatggtggtgggtgtttgtaattttagttatttgggtggttgaggtacgagattcgtttgaattcgggaggtaagaggttgtagtgagttgagattacgttattgtattttagtttgggtaatagagcgagatttcgttttaaaaaaaaaaaaattgtagaaatggggttttttttatgttgtttaggttggtttttattttttgggtttaagtgatttttttattttggtattttaaagttttgggattataggtatgagttattgtgtttgggcggtttgttttttttatagggttatatttttttttatagagtaatgtttgtaaattaataagtgaaatgtataggattataaatcgaattaattatagttgatttttagtatttgtagattatttgtaaatttgtatttttgttataatgtatttatattttaaaaattaaggtagtgtttttgtggtgttttggagggtaatgtttatgtatagagttgtaataagttaaagatttgatgtgtatatttgtagttgggttttttttgttttagtttaaatattggaaataaatgttttttttttggtttgtttagtgttatgttttttaatttttttttttttttttaaagttagagtttcggtttgtcgttcgagttggagtgtaatggttttattttggtttattgtaatttttattttttgagtttaagcgatttttttgttttagttttttaagtagttgggattataggcgtgtgttattagttttggttaatttttttatttttatttttatttattttattattttttgagatggagtttcgttgtgtcgtttaggttggagtgtagtggtattattttagtttattgtaatttttgtttttcgggtttacgtgatttttttgttttagtttttggagtagttgggattataggcgtttattattatattcggttaatttttgtttttttagtagagacgggggttttattatattggttaggttggtttcgaatttttgagtttgtgattcgtttattttagttttttaaaatgttgggattataggcgtgagttatcgcgttcggttaaattttttttttttttttttttgagataagagtttcgttttgttatttaggttggagtgtagtggcgcgattttagtttattgtaagtttcgtttttcgggtttacgttatttttttgtttaagtttttacgttcggttaattttttgtatttttagtagagacgggggttttattatgttagttaggatggtttcgattttttgattttgtgattcgttcgtttcggttttttaaaatgttgggattataggcgtgagttatcgcgttcggtcgtttggcgtaatttttgtatttttaatagaaatgggggttttattatgttgtttagattggtttcgaatttttgatgttaagtgattcgtttgttttcgttttttaaagtgttggaattatattcgtgagttatcgcgttcgaattttattgtaaattttaagttttaggcgtttgttagcggtacgttagagagtatagtttgcgcggaggtttagaaattaaagagcgagtttatttcgggattggagagaagtgtgagtagagggaagtagagggatcggggagaggaggggtaggatttacgtattcggttttttgtatttagttttatttaattaggaattttttttgtaaattaaggaaagtttttcggaggaagtggtgtttaagttgtgttttgatttacgtttagaagttgattagataaagagaggtgggcgtttttggtagggggagggatttggtaaaaattaagtggtttgagaggggttgatggttttaaaaaatttggaatgattatgttaagggttagggatttaatgtgttgacgacggatttttattttttatttgtttcgggattttagttatgttttttttttttttgggttttttatcgatttcgttttttttttaggtaatgagtataagtttttttttttttttagatttttttcgggttgggaggatttatcgagtggacgaggagtgataatttttttgagttaatcgttggtgtttgaagtttcgtttttttttttattcgtgggttaattgtcgtgttttttttgaggtcggtcgtttggcgagggtgggttaaaggttgcgtgacgtcgttttcggataaattaatggtagcgattaggaggcgggtcgttttggtgatggataggtgttttaagacgtttttttagcgcggggtttttcgggaagttttgaggcggtgttgggtgtaaaggggagggtatttttggtggattttgtttaattattagtcgcgttttttgtaatagacgggtagttttttttatttcgggtcgatttgagggggcgggattttggacgttagagttggtaaatttttgatttatgatggacgtattttttagttaattattagacggtatttttagacgggtcgtttttattgttaatgaaattttttagcggggtcgcggtaggcgggtcgtggattttttggtataaggcggtttcgggggagtgaggagaaagggggggttttggcggtcggaggaggagtaggtgcgggtgaagatggcggtagtcgaggtcgcgaattgtattatggaggtgagcgtttggagcgtcgtcgtgggcgggaggcggttttgggtcggtgttttacgtttttgtggtggggaaagggttttaagttggcgatatggggttggaggtttttcgtcgtatacgggggcgtcgtacgttttatattcggggatatcgtttgaggtgacggttttttagtttttaagggttttcggtattcggtttagcggagggttttatttttttttttacgtggaggagggttgggggcgttttcggttaggtttttacgtggtcgttgcgcggtgggtggggagggggtgtgtcgagtttagtggttcggcgggttttacgtgcgggataaaggtttcgtttcggtcggggaggggcgtttaggggggcggggagggggttcgatttttttgacgtttttagttttttttttcggggatttgggtatacgtcgtggggtgtgatcgatttggggttttttacgatgtggggagttttttgggaggagtagtgttttttagttttttattaattttttttcgagtttcgggggtatttgttgggatatcggattcggttttgtgcgttttgggttagggattggaggaaaattaagaatggggtttttcgtcgatttcgtttttttttttagaattttttttttcgtttagggttttaggagttgggggatggggtatgtttttgtgatttttttttgggtggtggtggggtatttagatagagatttttttattaataggcgtcgtgtatttttttgtggttatttttgggtgtgtgggagggatattttttttatggggcgtgttttgaagtttattttttttcggatttttttttggcgggcggagggaggagggtatgttcgttgggaaggagttgtgggaaatatgtaggttgagagttttattttattggagtcgtttatttttttcgggtttttgtgagggtgcgagatgatttttttttttttgaagttttgtgtagggttttgagttttggggttttgagagtgggtgtttgaaatggtttcgagtgaggtttggttttcgtgtagttatgtgggggaggttttagttttgcgttttaagttttttggggttggggttgtttggcggtagtttttagtggtattgagaaataggttcgagtgggaaatttttttagtatttttttttttataggtattttcgttagtttgggagagttggagggagggtgtttggagtttagtaggttatggtttgtgacgtggttttttttggagatttggatagtggttatatttggaagagatgtaatttgatggggtttttgtttttttattttttatttatggtattggttggaggggtaggttagtttttagttgttaggatgtagtttttaggggttattgtaatgattttttatttttttggttgttttttgtatttggggttttatggatggaggaaataatttttttagaggtggttttaggtttggtcgtatttggaagtttttagggtttgggatgggtgtttgaatgggggcgatggtttgattttttaagttattttttttttttttttttttgagacggagttttattttgttatttaggttggagtgtaatggtttgatttcggtttattgtaattttcgtttttcgggtttaagcgatttttttgttttagttttttgagtagttgggattataggtattcgttattaggtttagttaatttttgtatttttagtagagatagggttttattatgttggttaggttggttttaaatttttgattttaggtgatttatttgtttcggttttttaaagtgtcgggattgtaggtgtgagttatcgtgtttttaagttattttttggagtttttttatttttagagggtttaggagttgtttattttttttgggattttattttcgtgggtagagggttataagggagggggttggttttagttggttttgtttggggtttttgagtttaaggtaggagttggggtttggggtattagttttggggaagtattcgtgtgttatatttttattttggaatttttttagatatgagattggtttgtagaggtggtagatgttttgtgggtatattttgttagtttcgtttttttttgttatttatggtattttaggataggggtgtgtgtgttaggaagtgttatttaatttggaggagattaggtgatgagagggagcgatagttggcggtggtgggtgttaatttttttggtttggatgggggaggtgtgtggttagttgtttggttagagaggggtagcgtgggggtgggttattatttttttagttatagttgggataggagattttttttttttttttttttattttttttatttttttttaaatattttattttattatttgtttttttcgttattattttttattaagaaggagaattgttggaaatttatttttcggttagagtttaggtttcgttatttagtttttttatagttatttttagtagttaattttttttttttgttatttttttttaga

SEQ ID NO: 922 - DNA, 7589 bp, Artificial Sequence
  chemically treated genomic DNA (Homo sapiens)
tttaggagagagtaatagggaaaaaggattagttattgggagtggttgtgggagggttgggtggcggaatttgggttttggtcggggggtgggtttttagtaatttttttttttggtggggagtggtggcgaagggggtaagtaatgaggtggggtgtttaagaaagggtgggaaaagtgaggggagaagaaaggggggttttttattttagttgtggttggagagatggtggtttatttttacgttgtttttttttggttaggtagttgattatatattttttttatttaggttaggggaattggtatttattatcgttagttgtcgtttttttttattatttaattttttttagattaggtgatattttttgatatatatatttttattttagggtgttatgaatagtagaagggagcggggttggtaggatatgtttatagggtatttgttatttttgtaaattagttttatgtttgagaggattttagaatagaggtgtggtatacgggtatttttttagagttagtattttagattttagtttttgttttggatttaggagttttaaataaaattagttggaattaatttttttttttatgattttttgtttacgaaggtagggttttagggaagatgggtagtttttggattttttaagaatgagaggattttagaaagtggtttgggggtacggtggtttatatttgtaatttcggtattttgggaggtcgaggtaggtgggttatttgaggttaggagtttgagattagtttgattaatatggtgaaattttatttttattaaaaatataaaaattagttgggtttggtggcgggtgtttgtaattttagttatttaggaggttgaagtaggagaatcgtttgaattcgggaggcggaggttgtaatgagtcgagattaagttattgtattttagtttgggtgatagagtaagatttcgttttaaaaaaaaaaaaaaaaaaagtggtttggggagttaggttatcgtttttatttagatatttattttaggttttgaagatttttaggtgcggttaagtttgaggttatttttgggaaagttattttttttatttatagagttttaggtgtaggagatagttaagagggtgggaagttattatagtgatttttgggagttgtattttgatagttgagagttgatttgtttttttagttaatgttataggtaaggggtggaaggatagaggttttattagattatattttttttagatgtgattattatttaagtttttaagaagggttacgttataggttatgatttattaggttttaagtattttttttttagtttttttaagttagcggggatgtttataagaagaaaggtgttgagggggttttttattcgggtttattttttaatattattgaaaattatcgttagataattttagttttagagggtttgaaacgtaagattgaaattttttttatatggttgtacgagaattaaattttattcgaaattattttaggtatttatttttaggattttagggtttaggattttgtatagggttttaggaagaaggaggttatttcgtatttttataaagattcgggggagataaacggttttagtagggtaaagtttttagtttatatattttttataatttttttttagcggatatattttttttttttcgttcgttaggaagaaattcgaggggaggtgggttttaggatacgttttatgaaaaagatgttttttttatatatttagaaatggttataagggggtgtacggcgtttattaatgggaaaatttttatttagatgttttattattatttagagggaggttataggggtatgttttattttttaatttttaaagttttgggcgagggggagaattttgggaggggaaacggggtcggcgggggattttatttttggtttttttttagtttttaatttagaacgtataaaatcgggttcgatattttaatagatgttttcggagttcggaaggaggttggtaaagggttgagaagtattgttttttttaagagattttttatatcgtggagggttttaggtcgattatattttacggcgtgtgtttaggttttcggggaggagggttgggggcgttaggagggtcggatttttttttcgtttttttgggcgttttttttcggtcggggcggggtttttgtttcgtacgtggagttcgtcgggttattggattcggtatattttttttttatttatcgcgtagcggttacgtgggggtttggtcggaagcgtttttagtttttttttacgtgggaggggggataagatttttcgttaggtcggatgtcgaaggtttttggaagttagggagtcgttattttaaacgatattttcggatgtggaacgtgcggcgttttcgtgtgcggcgggggatttttaattttatatcgttaatttagagttttttttttattatagaggcgtgaaatatcgatttaaagtcgtttttcgtttacggcggcgttttaagcgtttatttttatgatgtagttcgcggtttcggttgtcgttatttttattcgtatttatttttttttcggtcgttaagattttttttttttttttattttttcgggatcgttttatattagagggtttacggttcgtttatcgcgatttcgttggaagattttattggtaatggaggcggttcgtttgagaatatcgtttagtaattggttagagaatacgtttattataggttaggggtttgttaattttggcgtttagaatttcgtttttttaagtcgattcgggatggggaaaattgttcgtttattgtaagaagcgcgattggtgattgggtaaaatttattaggaatgtttttttttttatatttagtatcgttttaaagtttttcggggagtttcgcgttaaaggggcgttttgaaatatttgtttattattaaaacgattcgttttttaatcgttgttattggtttattcggaagcgacgttacgtagtttttggtttattttcgttaagcggtcggttttaaggagaatacggtaattggtttacgggtagggaagaaggcggggttttaggtattaacgattggtttaaaggaattattatttttcgtttattcggtggatttttttaattcggggggagtttggaggaaaaagggagtttgtgtttattatttgggggaaaaacggaatcggtgagaggtttagagagaggaagggtatagttggggtttcgaagtaagtgaggaataggagttcgtcgttaatatattaaatttttagtttttgatataattattttaagttttttaaaattattaattttttttaagttatttggtttttgttaagtttttttttttgttaggaacgtttatttttttttgtttggttagtttttaaacgtgaattagagtatagtttaggtattatttttttcgggaagttttttttgatttgtagaaaaagtttttagttgaatgaagttgaatgtaaagggtcgaatgcgtgggttttgtttttttttttttcgatttttttatttttttttgtttatatttttttttaatttcggaatgagttcgttttttggtttttgggttttcgcgtaggttatattttttggcgtgtcgttggtaaacgtttgagatttaaaatttataatagggttcgggcgcgatggtttacgggtgtaattttagtattttaggaggcggaggtaggcggattatttgatattaggagttcgagattagtttgggtaatatggtgaaatttttatttttattaaaaatataaaaattacgttaggcggtcgggcgcggtggtttacgtttgtaattttagtattttgggagatcgaggcgggcggattataaggttaggaggtcgagattattttggttaatatggtgaaattttcgtttttattaaaaatataaaaaattagtcgggcgtggaggtttaggtaggaggatggcgtgaattcgggaggcggagtttgtagtgagttgagatcgcgttattgtattttagtttgggtgatagagcgagatttttgttttaaaaaaaaaaaaaaaaaaaatttggtcgggcgcggtgatttacgtttgtaattttagtattttggaaggttgaggtgggcggattataagtttaggagttcgagattagtttagttaatatggtgaaattttcgtttttattaaaaaaataaaaattagtcgggtgtggtggtgggcgtttgtagttttagttgttttagaggttgaggtaggagaattacgtgaattcgggaggtagaggttgtagtgagttgagatggtgttattgtattttagtttaggcgatatagcgagattttattttaaaaaataataaaataaataaaaataaaaataaaaaaattagttaggattggtggtatacgtttgtaattttagttatttgggaggttgaggtaggagaatcgtttgagtttaggaggtggaggttgtagtgagttaggatgaagttattgtattttagttcgagcgatagatcgagattttaattttaaaaaaaaaaaaaaaaattgaaaagtatggtattaaataaattaagaaaaggatatttgtttttagtgtttgagttgaagtaagaggagtttagttgtaaatatgtatattaggtttttagtttgttgtagttttgtgtataagtattgttttttaaaatattataaaagtattgttttaatttttggggtatgaatatattgtagtaaggatgtaaatttgtaaataatttataaatattgaggattaattgtaattggttcggtttgtaattttgtatattttatttattaatttataaatattattttgtgaagggggatatggttttataaaggagataaatcgtttaggtatagtgatttatgtttgtgattttaggattttgggatgttaaggtaggaggattatttgagtttaggaggtggagattagtttgggtaatataagggagattttatttttataatttttttttttttgagacggagtttcgttttgttgtttaggttggagtgtagtggcgtgattttaatttattgtaattttttgtttttcgggtttaagcgagtttcgtgttttagttatttaagtagttgggattataggtatttattattatgttcggttaatttttgtatttttagtagagatggggttttattatgttggtttggttggttttgaatttttgattttaagtgatttatttgttttggttttttataaaaatttttttttaaaaattagttaggcgtcgtgtcgtatgtttttagttttagttattagagaggttgaagtgggaggattatttgagtttaggaggttgaggttgtagtgagttatgatagtgttattgtatttatataatagtgtaagtataggtaatagagtaagattttatttttaaaaaaaaagggagagtggggggtgtgtgtgagataaattattggtttgtaggtagatgagaaattagtaagagagatttgaaaggagtaatgggaggagaaaaataagaagagggtggtgttttagatataggtgaagttagattgtatttttttgtggaatttattggaaagattttatgattattatatagtattagttagaataattagatcgtgtaataggaaaaaaaaatgtaagttgttggaatatttataggtatttttttaaatatgttatatgtttaggagataggtttttgtaggtgttgtaaataaatatttttagaatgaatgaattggttttttttttaatttgcgtaagttatagaaatttttgaattaaattttttttttttaaaattttagtttttaagtgtaagaatagataattgaatattttgtaacgtttttaataagaaaagttttaaataatttatttttggtaaaaataggtagggtaattattattttatagttttgagtggaataggaagatttggaaaagtatacgaagagggtagggatatgaggtgttattttgtagtagtttttgagaaagagtttagtttaatggtaagtttaagtttacgggtgaaatagttaggatgtttttttggaagggaaaagtggtagagttttgtgagtagggtaggtgttttttttatatagtagcgtttatattagttttgtgagattagagacgggaaggcgaggaattagagagcggagggtgatagatatttagataaggggatagagatttagatagaagggtatagggatgagggggtagggttttagtaggaggaggaaaggttgagttcgaggagggttaggatattggagtgggattagatagagatttagagagagtgaagagttgggggatagagttagagatggggaagagagttttgggatttgaataatttagagtcgtggttttgtgtataaatttagattttaatattttgtatgttggggattttttttttttgtttttataagacgaggataataagagttttatgaggttgtagtgggtttaaatgggattattttattgaaatttttagtagaggatttggtttatcgagaaaatttatttgttattaattttattttaaaaaaattttttaagaaattgtttaggcgtggtagtttagtttgtaattttagtattttgggaggtcgaggtgggtggattatttgaggttaagagttcgagattagtttggttaatagggtaaaatttcgtttttgttaaaattataaaattagtcggatatggtggtgtgcgtttgtaattttagttatttaggaggttgaggtagggaatcgtttgaatttaggaggtggaggttgtagtgagttaaggtcgtgttattgtattttagtttgggtaatagagtgagattttatttgaaaaattaaaataaaataaaataaacgagtttttttgttgagtttaatatttatatttattttttttaatatgtgttatgagttttgattttattgtagatcggattatttttagttttgttttttatttttatcgtttttatttttatattttttttatttcggggaatttaagatgtcgttttgtagttgttcgggttagtattttttagtttgtttttatatttggtttattagttaaatttgttagttttatcgttaagttaaatttagtattttttatcgttttcgatttgggtgagatttatttattttttttttgtgtttttatttttgttttcgtttttagtagtttgtttttaggtagtcgttagagggcgtttattagcgtttaaattagcgtttgttttttcgttgtttagagattttggtttatttagagttaaagttcgagttgttatttatcgtgattatagggttttggttggttcggcgttttttttttttttatttgtcgttcgtttattttattgtagttttattggtttttttttttttgttttttaaatatatttgattagtttttgttagggaaatcggttt

SEQ ID NO: 923 - DNA, 5173 bp, Artificial Sequence
  chemically treated genomic DNA (Homo sapiens)
  unsure 594, 670, 2170, 2438, 2620, 2738: n is a or g or c or t
gcggtttattatagaagttaagagaggttggaaagtaggtgtttgttttgttttgaggagtttaaaggagtaaaaggtagtgattgttttttggtgttttttatttcgtgaatatttacgggttatttattagttattttttttttttaaagggagagagaggggaaaggtttattttaatttttttattttatattttggggagagtaagttttttttgtatagaaatgtgaagaagaggaaatgaagattattttttaaggatatttagttgtagtagttatttaattagttttttaaaaggggatataattgttttttttttttttgtaatagattgaattgtgtttttttttaaatttatatgttgaaattcgaattttgaatgtgatagtatttagagatgaggtttttgtgatgtaattaggtttagatgaatttttaagagagagtaagtttgtttttatgaagatattaattttattagattagggttttatttttatgattttagttaattttaattatttttataaaggttaggtttttaaatatagttatacggggagttagggttttaatttatggtttttnggggatatagtttagtttatagtagtggggaaaggatgtgatttagtttagagagatttaaggagggaatgtttanataggagtatggaggtcgtgtttggtgaagggattagatggtataagtttaaaagttaaggtgagttaatagtaaggggttggttttggtcggataaaaagttgtgtttcgggtaaaaaggaaaaaaaattttgggggttggttaaaatatggaggattttgaaggttgggtggtgtttaaagggtttgaaaggttgagtttttttttgaaggtttcggaaaaatttttttaaagggcgttttggagggggaggaaatattttttaaaaaaaaatttaaattttttttaatttttattttgtgggggggtttaaaggggggggataatttttgggggtttataggtttttttaaatcgttcggcggttatatattttttgggaggggggggggtttttaaaaaaattttattttttgtgaaaaaaatatagagttttttatggaggattttttttttttaaggcgtttttttttttaaaataaaaattttaagaagtatgtattgttattaagattaaaattttaatagagattacgagtgtatgaataagtgttgttttagtaggtgataattatagtgttatatttattcgagttgttttttgtagttgtagaaattttgttttattaaaaatttattgtttttgaggtggaaattaatatgattggaacggcgtttaaaattatatttttggttgagaatatggttttataattattttttgttttttaaatttattttaaatgtgtagtaatatgaattaggaatttagtttagtatatttttatacgattaataaataaatggaaggtatagatggaggaagggatttatttaaggttatagagagtttgttagtgttagagataaaaataggatagcgattttttggtttttattagtttttttaggatatgttttttttaggaattgttattgatatttttgtttaagggcgtttattaaatagtgtgttttgtgtggagtaggtatgggttttattttataaatttggtatgaaagaaatgttatatgatttttttttaaaaaaattaattttgttgaggagtttttagtttattgggtgtgtgaagaaattgattaattcggttattagtgattagggtttattttggaagtagtattatttatattgcgtaggtggaagggattaaggtgtggaagtgtagtatttttaagagaggttttggattttagtttttattagtataatgatttttttattatattttagggtttttgtcggttagtattttttttgtttttgggttgtggtttttgtaaggatagggttagtattttttttttttttagattttgcgtttatttttgtaattttggtagggaagagagtaaggtttgggattttcgtattgtttttttttgaaatttgaaaggacgtttgtaatttatttttatttttttgtatttaaatttatttttgtgtgttagtttttattattgttttttttgttgantagtataattttttttaaagtatggttatattgtatgagagaagggttttgaggaatttttgttttgcgttttattaaggaattttgagatatgggaatttaaatattaataatagaatgtttaattaatatttaaattaatattttgttatttaaattgttattttgattagtagaatttaaatttaattttttatatgaaaatataatgtattgtatttttataatttagattatggtggtttttagggatttaaaaaggtttttnttttgatgagggggttttatttttttttgtttgggagcgggggaaaaggatgtttgaaaaaaaaaggttgttttttttatttagagttattttttagatgtagatgtttttttttgagtttaggagttttttgttttttttaagaagggggggggagagattaaacgttggttttatttttnttgtttagtataggaaattgaaaagttatttgtgagtttatttgtaagaaattttttttgaatggttagagtggaaagttagagagtttttggaatttatttttatttattatttatntattgtggtttagatataaatttataattttttttgttatttgagtttttgtttttttatttaaaaacgtgtgtgtgaaagttatttgtttattttattagtttaagtatttttaaagtggtaataaacgagttgttgattaattatttgatttacgaggttgttttagtttttttagtgagattttaatttgattatattttattttttatgtatttttagggtattaaataagagtggggaatagaattagatgaaaaagttttttagaatgggtagggagtggtataatttagtagttaatgagggtcgattagtagatagtagttaatgttatggtagagtttggtagagtttagtagagtaggtattggttttgaaagatttggggggaatttggaaagggttaatatgttttttcgggaagggtttagttttttagaagaatttgggttagtgtatttgggaagtttttaaaaagttagacgtttagtagaagtattttaagaagtttgtaaagtttattggggttatggtagaaaggagggtaattttataggtttattattttttattaagaggatttttattatataggaaaattttacgttttttaaaagtaatagatattttgtgttattattattttgaaagtgggttgtaatatatatatatatattttttatacgtagcgcgcgttaatgagttcgggttaggcgtagggaaaggggtttttttaggttcgagtatagtagttgttatttatttttttggtttttttcggggattaggaatcggttttcgtttttcgtcgttcgtcgtcgtttttcgtttttttgttttcggggcgcgcgtatatatatttatttatatacgtacgtatatatatattttttcggttcggtcgtagtcgcggcggtaataaaatattttggtacgtgtttcggttttaggcgcgtttacgtcggtcggttgatgttaaattgtagttcggttggtgtagtttttaaagggttcgcgggcgtcgggggtcgaggtcgttcgcggggcgaggagggagaggttgtttttttgttcgttattttaacgcgtcgtagaatttaaagtttacggatgaaaagggaaagggtggtgaaggagggcgcgagtttttgagttattgttttcggagttttttttgtttatttttttatttgaaatatcgtttttttttatttagttggaaattattttgattgttttttggggaagttcggggtttaaggttttaaatttaaacgaggaatttttgaaagacggggtgggggtgggatttaagaattattttgtttcgaaaaatttgtatttgtgaggtagaaggtaattttttttttttttgtatggaaataggaaaatttttttggttttttttttttattatttatttttatttttttgaatgtaaagtttgagcgggaattttagatgtgtcggtaatttatatttttatattcgttttttttttttttcgtttttttttaattattgttgtttttttttttattgtttatatttttaaaaaaaatatgttttaaatgaatttattatagttaaagtagttttgttatatatgagagagggtataaagagtaaagattttggttttaaaagaaatagataagattaagattaaagcggaaagaaaaaaaaaatttttaaattaaagtttagagggagagtagtaaagggttaaaatttttttgattgacgttgtagttttcggtgttttgggtttaggcgcgcgttattggtcgttagattttgtgtttggcggttaatgggggggcgcggtttacgagcggtttcgcgtgttttttttttttattggttgaaagttattgtgggaaagaaagtttgggaagtttttatacgagtcgttcgcgtgtagttttagatatatatagaggtcgttagggtttagggattatataggattcggagttggtgttgataatagcggaatttttcgtttatttttttttttggttttggaatagcgttattgatttttaagtagttataaaatataataaatttttagtatttgtttagtagttttgtgaaagttttaagtaaaagagttttaattaaaaaattttttttcgtgaagaattttaaaaataaaattttttagagataaaaaaaaaaaaaaaaggaaaatgttagttgatataatggagaaaaatttttcgttttcggtggttgttattttagttagtgttaatacgatatcggataaattaaagatagtatttgagtatagaaaggtaagggcggtatttgtatttttttgtagttttttaaaattaagtaggggttggggggtttttttttgttttgaaatttcgggatggtagattttatgggaatatagaatttttttttttatttgtagt

SEQ ID NO: 924 - DNA, 5173 bp, Artificial Sequence
  chemically treated genomic DNA (Homo sapiens)
  unsure 2436, 2554, 2736, 3004, 4504, 4580: n is a or g or c or t
attgtaaataaaaaaaagagttttgtgtttttatggaatttgttatttcggggttttaagatagaaagaagttttttaatttttatttaattttgaggggttgtaaagagatataggtatcgtttttatttttttgtgtttagatgttgtttttggtttattcggtgtcgtgttgatattggttggggtagtagttatcggggacgaggaatttttttttattatattagttggtattttttttttttttttttttttatttttaaagaattttatttttggagttttttacgaaaaagaattttttggttggggtttttttatttgagatttttataaaattattgagtaagtgttgagggtttattatattttgtggttatttggggattagtagcgttgttttaggattaaggagagaggtagacgggggatttcgttgttattagtattagtttcggattttgtgtgatttttaggttttggcggtttttatatatatttgggattgtacgcgaacggttcgtgtgaaaattttttaaatttttttttttatagtaatttttagttaatgggaggaggagatacgcgggatcgttcgtggatcgcgtttttttattggtcgttaggtataaggtttggcggttaatggcgcgcgtttgagtttagggtatcggaggttataacgttaattaaaaggattttaattttttgttattttttttttgggttttggtttagagatttttttttttttttcgttttggttttgattttgtttattttttttggagttagggtttttgttttttatgtttttttttatatgtaatagagttgttttgattgtagtaagtttatttgaaatatattttttttaaaggtataaataataaagaaaaaaatagtagtggttaaaagggggcggggggagggggggacgggtgtaagaatgtgagttatcgatatatttaaagttttcgtttagattttatatttaggagggtgaaagtagatggtaaaggaaaagggttaaaaaaatttttttgtttttatgtagaaaaaggaaaaattgttttttattttataaatgtaggtttttcggagtaaggtagtttttgaattttatttttatttcgttttttagaaatttttcgtttggatttggggttttagatttcgggtttttttaggaaataattagaataatttttaattgggtggaaggaaacggtattttaaatgaaaaaatgaataaggggggtttcgagggtaatgatttagggattcgcgtttttttttattattttttttttttttattcgtaggttttaggttttgcggcgcgttgaggtggcgggtaaggaagtagttttttttttttcgtttcgcgggcggtttcggttttcggcgttcgcgggttttttaagagttatattagtcgagttgtagtttgatattagtcggtcggcgtgggcgcgtttggagtcggagtacgtgttaggatgttttattgtcgtcgcggttgcggtcgggtcgggaggatgtgtgtgtgcgtgcgtgtgtgagtgagtgtgtgtgcgcgcgtttcgggggtagggaggcggggggcggcgacgggcggcggagagcgggggtcggtttttggttttcgggagaagttaagaaggtaaatagtagttgttgtgttcgagtttgggaaaatttttttttttgcgtttggttcgggtttattggcgcgcgttgcgtgtggggggtgtgtgtgtgtgtgttataatttatttttaaagtggtgatgatataaaatgtttgttgtttttggaaaacgtagggtttttttgtgtggtgaaaatttttttggtgaaaggtgatgagtttatgaagttatttttttttttgttatggttttaataagttttgtaagttttttaaaatgtttttattgagcgtttgattttttaaaaattttttaaatatattgatttagatttttttgaggaattaaatttttttcggggaagtatgttaattttttttaggttttttttaaattttttagaattagtgtttgttttgttaggttttgttaggttttgttatgatattgattgttgtttgttggtcggtttttattaattattgggttatgttattttttgtttattttaagagatttttttatttgattttgttttttatttttatttggtgttttgaaggtgtatggggaatggaatatggttaagttagggttttattgaaggggttaaagtagtttcgtgggttaaatagttaattagtaattcgtttattgttattttgggagtgtttggattggtggaatgggtaagtaatttttatatatacgtttttagatagggggatagaggtttaagtaataaaaaaaattatgaatttgtgtttgggttataatanataaataataaataaaaataaattttaggaattttttggttttttattttaattatttaagaagagttttttgtagatgggtttatagatgattttttagttttttatgttaggtagnggaaataagattaacgtttggtttttttttttttttttttaaaggggataggaagtttttaaatttaggaggaagtatttgtatttgaaagatggttttagataaaagaaatagttttttttttttagatatttttttttttcgtttttaagtaaaaagaaatggggtttttttattagggnagggatttttttggatttttgggaattattatggtttgaattgtaaaagtgtaatgtattatgtttttatgtaaaagattgaatttgaattttgttggttaaggtggtaatttaagtggtagagtattgatttagatattaattaagtattttattgttagtatttgggtttttatgttttaggattttttgataggacgtagagtaggagttttttagaattttttttttatatagtgtggttatgttttagagaagattatgttanttagtaaaggaggtagtgatagaggttggtatatagaagtagatttgggtgtagggaggtaaaagtgggttgtagacgtttttttagattttagagaggaatagtgcggggattttaggttttatttttttttttgttagggttgtaggggtggacgtagaatttggggagggagagggtgttgattttatttttgtagaggttatagtttaggagtagaggaggtgttggtcggtagaggttttggggtatggtgaggaggttattgtgttggtggggattgaaatttagagttttttttaagggtgttgtatttttatattttggttttttttatttgcgtaatgtaggtgatgttgtttttaggatgggttttagttattaatgatcgaattagttaatttttttatatatttagtgagttggaggttttttagtagaattaatttttttaaagaaaaattatgtggtattttttttatgttaagtttgtgaaataaagtttatatttgttttatatagaatatattatttaataaacgtttttgggtaaaagtgttagtagtaatttttggaagagatatgttttgaaagaattagtagaaattaggaaatcgttgttttatttttgtttttgatattaataagttttttgtgattttaagtaagtttttttttttatttgtgttttttatttatttattggtcgtatgaagatatattggattaaatttttggtttatgttattatatatttagaatggatttgggaaataggaaatagttatgaaattatatttttaattaaggatatggttttagacgtcgttttagttatgttaatttttattttaaaaataatggatttttgataaagtagagtttttgtaattgtagaagataattcgaataaatgtgatattatgattgttatttgttgaagtaatatttgtttatgtattcgtggtttttgttgggattttggttttggtggtaatatatattttttgggatttttattttaaaaagaaaagcgttttggaaaaaaaaaattttttataaggagttttatgttttttttataaaaaataaaatttttttgggggttttttttttttttaaggggtgtataatcgtcgggcggtttaaaaaaatttatgggtttttaaaaattgttttttttttttgagtttttttataaaataaaaattaaaaagaatttaagtttttttttaaagggtgttttttttttttttaaaacgttttttaagaaagttttttcggggtttttaagaaaaaatttagttttttaaattttttggatattatttagtttttaaagttttttatattttggttaatttttaaggtttttttttttttttattcgaagtatagttttttgttcggttaaaattagttttttgttgttggtttattttggtttttgaatttgtgttatttggtttttttattaggtacggtttttatgtttttatntaagtattttttttttgagtttttttagattgagttatattttttttttattgttatggattgaattgtatttttnaaaagttataggttgaagttttagtttttcgtgtgattgtatttggagatttggtttttatagaagtaattaaggttaattgagattataagggtggggttttaatttgataggattggtgtttttataagaatagatttgtttttttttaggaatttatttaaatttaattatattataaaggttttatttttaaatattgttatatttagggttcgggttttaatatatgaatttagggaggggtataatttagtttgttgtagggaaaaaaaggataattatgtttttttttaagggattggttaagtggttattgtagttaagtatttttggaggataatttttatttttttttttttatatttttatataggggagatttgttttttttagaatatgaagtaggagggttggagtgagttttttttttttttttttttttggggagaaggaataattaatgggtgattcgtaggtgtttacggagtaaggggtattaggagatagttattgttttttgtttttttgggttttttagagtagagtagatatttgttttttagttttttttgatttttgtgataagtcgt

SEQ ID NO: 925 - DNA, 6002 bp, Artificial Sequence
  chemically treated genomic DNA (Homo sapiens)
tttttatttaagttttttaagaagttgggattataggtatatattattaaatttggttaatttttaaattttttttagatatagagttttgttattttgtttaggttgatttggaattttggggtttaagtaattttttttttttggttttttaaagtgttgggattataggaattagttattatttttagtttgtattttttaatatatttattagatgtttttagagagggtaaatatagaattattaggtttaaagtagtagtatattatattttttaaaagaatttatttttatatgtaaaaaaaatttgtatagttttttggttaaaattaagattttgaattaaaagaattttcgttaatttagtatttagtgtaagggaaattttattatttttattattgaaaatattaatttttatatgattagttttgattttattatttgtagattaataaaatataaagatcgttaaaaagttttgttgaatttttagtaatttttttaattattttatattttttagatggggttttattttgttgtttaggttggagtatagtggtataattataatttattgggtttatatgagtttagtttttattttttgggtttaggtggttttcgtattttaggttattaaagtgttgagatataggtgtgagttattacgtttagcgtgttttgtatttcgagttatgatattatttgtgatatttgaatataatagtatatatatttgatgtatattaatttagatattagaatatgtgtatggaatttttttatcgatttataggggggtgaataaagtttatgaattttgtaagttaaagtgggagattttttgttttgtgtttaagttcgtaaatgtatgacggtttttagttttggtataggagttttaaattaatttttatttaaagtatatttgtaggatatattttgtttggagtttttaaattaatttatatgttataaatggtatagcgtttaatagtgtatagtttagtgagttttgattaaggtatgttttttcgaatatattgtttattaaaatatagaatattttatttaattagaaaagttttttatgatttttttagttaatttttttatttttattaggtaataagtgttttgattttattttattgaagattatgtttgtttgttttttaattttttataaataatattttatggtatgtatatgtagaaggtagtttttataatggattttaatgatttttattcgttatgtttatttttttgtgtgattttttttttttgaatatggagtggatttaggaatttgtttttaatgtatagaatgtagttaaagtgatggaatggttttttcgagattagattataagagtgtggtttttgttttttttttttgtttgattttttttattggttagatttgatgaagtaagttgtttttgggagttgttttgtgaggaggtttatatagtaaggaataaaggaggagtaatcggattttgtaataaataagtgattgggttgttgtttttttaggtgagtttggagatgacggttatttggttggattttattgttatttgtgaaagattttgagttagaggatttagttgatttatgtttggatttttgatttatagaaattatgagataatatatggtattgtttaggtaattaagttttgggttaatttgttatatagaatagataattaatgtagtatttttttgtgattttttttgtttgataaaatatgatttatttatgtttttgtgggtagaagagatatttttaaagagtttattaaaagtattaaatttattaagatagttaaaaattttagtataagagaaagtagtaatatagagaggtaaattgagtattgaagttatataagttttgtatttgttggacggggtgatggggagttttagtggtgatggtatgggatagaaatgaaggttaggaagagtttaatagatgaatattttataaggtcggggttttaaaaggtttttatatttttagggtaatcgtggtttagaagaaatatgttttcggattataaggaaatgtattttggtattgagtagaggaggtggtggtgggtggagatggttagagaatcgttttatgggtttattaatataggttagggtggggtgttatggtagattaaatttattttatttgtatggtttagaaaattatgaatttagttatgaatttaattttttaaattggaagtttttttaggtatttggtagaagtaaaattattttttttatggaggaatatagttttattagaaaattttatagagaaatttttaagtaaaatgggatgtgtataggtgaaaattattaagtatataaggaaatagggtattatgagtgagatttattagagagaggagatagtatagaaaggttgatgtaggtattggaattgttaaagttagattataagataattatgttgaggtaaagaagttaaaattaaaaatatttgtatggattagagaatttataagaagaaaagttttagttttgtaaaaaagaaaaggaatttttagaaatgaagttaaggttattaaaataaaaattataatgggttgatttaataatgattagatatatttgaagagataattaatgattatgaaggatagagtgagtaggtcgaatttttgattaattagagttttgaaattatttttaaatatagagaagggaaagattaaaaattatatagaaaaacgggtaggagagagaaaatttataaagaaaatagtgaaaatagtttttaggtttaagaaaatttttttaatttggttgataagataatttaaatttaaaataatattggatgttattttttatttattgggtggtaaaagttttaaagtttgataatatgttttattgttaaggtagtgggaaaacgaatatgtttacgtgttgttggcgtgaatgtaaaatgaaggtaaatttgataatatttagtataaagacgtatgaatttatgttttggttagtaattttgtttttagggtgagcgtaaggttgttgattgtagtatagagtgagttgagagtgagtataggtagatatgagagaaggttaaggattgattttgtggtttttgtagggatgattttagtattttggttgtttttgttttatgttgttatatttattttttattttatttttagaaggatatttttttttagtatttagtggttttttaaaagtataatttagagtatagaattttgttttttaaatttgtgtaatggtttttggttgttttgaaagtttatatttattcgtagggtatggttttttttttttgttttggttttttttttttttattttttgtggttagtttttgtgttgtgttgttttagtgttttttttttttttgagatggagttttgttttgtcgtttagattggagtgtagcggtataattttagtttattgtaatttttattttttaggtttaagcgatttttttgttttagttttcgaagtagttaagatttttgtgatggagttttgttttgtcgtttagattgtatggtagtgttataattttagttttattgtaatttatatttgttagtgtttaagcgattttattgttttagtttgttaagtagtgtaagattataggtatgttttattatatttagataattatagtatttttagtaagttttaattttttgattttgtgattcgtttgttttggattattaaagcgttgggattataggcgttagttaatatgtttgttttgttttattttttattttttaaatacgtggatattttttattttaggtattgtattagtcgatttattagtttggagggggaaatttatttttgttgagttggtttttttttatttaaattttaattaaaaatgttatttttttatggaatttttttttgaatattttttttgaagtattttttgagtagttatttaaatatattatttaatagtgtttttttatagtattgatgttattttttttttttttttgagatagaattttattttgttatttaggttggagtgtaatggcgtgattttggtttattgtaattttcgttttttaagtttaagtgatttttttgttttagttttttaagtagttgggattataggtgtttattattaggtttggttaatttttgtattttaagtagagatgaggttttattatgttggttaggttggttttgaatttttgattttatgtgattcgtttgttttggttttttaaaatgttgggattatgggcgtgagttattgttttatttgatgttattttatttatttgtttattatttgtttttgttattagaatttaagttttaaattagagagattttttgtggttattattaattttttaatgtttttaagaggggattttatttggtaggtagttaatatatagtgttaaatgtatgaataattgttttggattttgtattttttttaatttttttaaatttagggagagaattgtgggttgttattttatatttgtttaggttttgtttttttttttttatgtttattttttatttttttattagtttttttatagtaataaaagttttatttaaaggtttgtgagttagaggattatgtaaagaagttattttaatttagatgtttttgatttgatggaatacgtttagtgatttttggaagaagatttggaggtttttagagtagcgtggttttaggaggtatatatagagagttacggttagggttgaaatagtttgttgagtgtagttatgggggacgttttggaatagttttttatttttatagggttgttggtgtgtttggtttgtttggcgaagtgcgtgagattttttagatgtgttttattgaattattggaaagttttgttaaagttttttttgcggttaatgggatagtgggtaggtaagggagtgttttattttatgtttttttgttgttgttgtttttgtttgttattattattattatttttgagatagatatttgttttgttatttaggttggagtgtaatggcgcgattttggtttattgtaattttcgtttttcgggtttaagtaatttttttgttttagttttttaagtagttgggattataggcgtttgttattatatttggttaatggtgttttttttttttttttgagatagagttttattttgttgttcgggttggagtgtagtagtgcgatttttgtttattgtaatttttgttttttgggtttaagtaatttttttgtttcggttttttaagtagttgggattataggtatatattattacggttggttaattttttgtattttagtagagatagggtttttttatgttggttaggttggtttcgaatttttgattttatgatttgtttattttagttttttaaagtgttgagattataggcgtgagttatcgtatttagttaacgttttgtatttttagtagagatagggttttattttgttggttaggttggttttaaatttttgattttgtgatttattcgattcggtttttttaacggttgggatgataggcgtgagttatcgtatttagtttttgtttattattatttatgttttaaaagggatattgtatttttttttttttgagagtaaagaagtaatttttttgggtaattttaattggggggattagaaaagtgtgagtgaaattagaatggtttgtaatataagttgtagggtattaggggaatattagggtagaaggttatttagtttttgttaagtatttatttttttaattttattagatgagttttttttttttgggagttttttgttaatataaataataaataatgtagaaatttttgtatttttatttttaaatttataaaaagtttagggtgtttttattttattaaaaggtgtttttaaattt

SEQ ID NO: 926 - DNA, 6002 bp, Artificial Sequence
  chemically treated genomic DNA (Homo sapiens)
aaatttggaaatattttttagtaaagtgaaagtattttgggttttttgtaaatttagagatgaggatgtagaaatttttgtattatttattatttgtattagtaggaaatttttaaaagaagaaaatttatttaatggggttgagaggataagtgtttagtaagggttgggtagttttttgttttagtgtttttttaatgttttatagtttgtgttgtagattattttaattttatttatatttttttaatttttttaattaaaattatttaaaggaattatttttttgtttttaaagagaaaaaaatgtaatattttttttgagatataaataataataagtaggggttgggtgcggtggtttacgtttgttattttagtcgttggggaggtcgagtcgggtgaattataaggttaagagtttgagattagtttagttaatagggtgaaattttgtttttattaaaaatataaaacgttggttgggtgcggtggtttacgtttgtaattttagtattttgagaggttaaagtgggtaaattatgaggttaggagttcgagattagtttggttaatatgggggaattttgtttttattaaaatataaaaaattagttagtcgtagtagtgtgtgtttgtaattttagttatttgggaggtcgaggtaggagaattgtttgaatttaggaggtagaggttgtagtgagtagagatcgtattattgtattttagttcgggtaatagagtgagattttgttttaaaaaaaaaaaaaaaatattattagttaggtgtggtgataggcgtttataattttagttatttgggaggttgaggtaggagaattgtttaaattcgggaagcggaggttgtagtgagttaagatcgcgttattgtattttagtttgggtgatagagtaagtgtttgttttaaaaataataataatagtaataagtaggaataatagtagtaaaaaaatatgagatggaatatttttttatttgtttattgttttattgatcgtaagaaagattttggtaaaattttttagtagtttagtaaaatatatttggagaattttacgtatttcgttaggtaggttaggtatattagtagttttgtgaggatgaagaattgttttaggacgttttttatggttgtatttaatagattgttttagttttggtcgtggttttttgtgtatgttttttgggattacgttgttttggagatttttagatttttttttaggagttattggacgtgttttattaagttaggggtatttagattaaagtaatttttttatataattttttgatttataggtttttgaataaggtttttgttattgtggaggagttggtgaaaaagtaaaaggtggatatgaagggaaaaaaataaagtttggataaatataaaatggtagtttatagttttttttttgaatttgggaaagttaaaaaggatgtagaatttaaggtaattatttatatatttagtattatgtattgattgtttattaggtggagtttttttttgaaggtattaggaagttaatagtgattatagagggtttttttggtttggagtttagattttggtagtagggatagatgatgagtagataaataagataatattagatggggtagtggtttacgtttataattttaatattttgggaagttaaggtaggcgggttatatgaagttaagagtttaagattagtttggttaatatggtgaaattttatttttatttaaaatataaaaattagttaggtttggtggtgggtatttgtaattttagttatttgggaggttgaggtaggagaattatttgaatttgggaggcggaggttgtagtgagttaagattacgttattgtattttagtttgggtgatagagtgagattttgttttaaaaaaaaaaaaaagataatattagtgttatgaaaaagtattattgaatgatgtgtttgagtagttatttagggaatgttttagagagggtgtttaggaaggaattttatgaagaggtggtatttttagttgaaatttgaatgaaaaggagttagtttagtaaagatgagtttttttttttaggttaatggatcggttagtataatgtttgaagtgagaaatatttacgtatttgagaaataagaaataggataggataggtatgttggttaacgtttgtaattttagcgttttggtagtttaaggtaggcggattataaggttaggagattgagatttattaaaaatgttataattatttgggtgtggtggagtatgtttgtaattttatattatttagtaggttgaggtagtagaatcgtttgaatattggtaggtgtaagttgtagtgaggttgagattgtaatattgttatgtagtttgggcggtagagtaagattttattatagaaattttaattatttcggaggttgaggtaggagaatcgtttgaatttgggaggtggaagttgtagtgagttgagattgtgtcgttgtattttagtttgggcgatagagtaagattttattttaaaaaaaaaaaaaatattaggataatatagtatagggattggttatagagagtaagggaggaaaaggttagagtaggagggaggagttatgttttacgggtgagtgtggatttttagagtaattagaagttattgtatagatttaggaaatagagttttatattttgaattatgtttttaaaaggttattggatgttgagggaagatgtttttttgggggtgggatggagggtgggtgtgataatatgaagtaagggtagttaggatattgaagttatttttgtagaggttataggattagtttttggtttttttttatatttgtttgtgtttatttttagtttattttgtgttgtaattaatagttttgcgtttattttagaagtagaattgttggttagaatatagatttatacgtttttatgttagatattgttagatttgtttttattttgtatttacgttaataatacgtgagtatgttcgtttttttattgttttagtagtaaagtatgttgttaagttttgggatttttgttatttagtaggtaagaagtagtatttaatgttgttttaagtttaaattattttattagttaggttggagagatttttttaagtttaagagttatttttattgttttttttgtgaatttttttttttttgttcgtttttttatgtggtttttggttttttttttttttgtatttagagatggttttaggattttgattagttagaaattcgatttgtttattttgttttttatggttattgattatttttttaggtgtgtttgattattgttaagttagtttattgtggtttttattttaatgattttaattttatttttaaaagtttttttttttttttgtaaaattgaggtttttttttttatgggttttttgatttatgtagatatttttaattttgatttttttattttagtataattgttttatgatttggttttaataattttagtatttatattagtttttttgtgttgttttttttttttggtaggttttatttatggtgttttgtttttttgtgtgtttgataatttttatttgtgtatattttattttgtttggaaatttttttgtgaggttttttgatgaagttgtatttttttatagaggaggtggttttgtttttattagatatttagaggaatttttaatttggaaaattaaatttatggttaaatttatagttttttaaattatgtaggtgaagtgaatttggtttgttatgatattttattttggtttgtgttgataaatttataggacggttttttggttatttttatttattattattttttttgtttagtgttaaggtgtatttttttgtagttcgggagtatgttttttttggattacggttattttgaggatgtagaaattttttgggatttcggttttatggaatgtttatttattagattttttttgatttttatttttgttttatattattattattgaagttttttattatttcgtttagtaaatgtagggtttatgtggttttagtgtttaatttatttttttgtattgttgtttttttttatattgaaatttttgattattttaataggtttaatgtttttaataagttttttgagaatattttttttgtttataaaaatatggataaattatattttgttaagtaaaagaagttatagaaaagtattgtattagttatttattttgtataataaattaatttaaaatttagttgtttaaataatgttatgtattattttatgatttttgtgggttaggaatttaggtatggattaattggattttttagtttaaggttttttataggtggtaataaagtttagttaggtggtcgttatttttaggtttatttggggaaatagtagtttagttatttgtttgttgtaggattcggttgttttttttttgttttttgttgtgtgggtttttttatagggtagtttttaagagtagtttgttttattagatttagttagtgagaagaattagatagagagagaaggtagaagttatatttttgtaatttgatttcggaagggttattttattattttagttgtattttgtgtattagaagtaagtttttagatttattttatatttaaagggaaaagattatataagggagtgaatatagcgggtggggattattgagatttattatagaaattgttttttatatgtatatattataggatgttatttataggaagttaaagaataggtaaatataatttttagtaaaataaaattagaatatttgttgtttggtagaggtgaagggattggttagaagggttatagggaatttttttggttgagtaagatgttttatattttgataagtaatgtgttcggaagggtatgttttaattaaaatttattgaattgtatattgttaagcgttgtgttatttatggtatgtaaattaatttggaaattttaaataaagtatattttgtagatatattttggatgggggttaatttagaatttttgtattagaattgaaagtcgttatatatttgcgggtttaggtatagaataaagagttttttattttaatttataagatttataaattttatttatttttttgtgaatcgatggaggaattttatatatatattttgatgtttgaattaatgtgtattagatgtatgtgttgttatatttaaatgttatagataatattatgattcgaaatatagagtacgttgggcgtggtggtttatatttgtattttagtattttggtagtttgaggtgcgaagattatttgagtttagaagatggaggttgggtttatgtgagtttagtgagttgtgattgtgttattgtattttagtttgagtaatagagtgagattttatttaaaaaatatagaatggttaaaaaggttattaagaatttagtaaaattttttaacgatttttgtattttattaatttatagatagtaaaattaaagttagttatgtggaggttgatatttttagtaataaaagtggtgaggttttttttgtattgagtattgagttaacgaaggtttttttagtttaaagttttggttttggttaaagaattatgtaagttttttttgtatatagaaatagatttttttaaaaaatgtaatatattgttattttgagtttggtggttttatatttgttttttttggggatatttagtgggtatattaagaagtgtaagttgggagtggtgattaatttttatagttttagtattttgggaggttagagagggaggattgtttgagttttagagttttagattagtttgggtaagatagtaagattttgtatttagaaaaaatttaaaaattagttaagtttagtgatgtgtatttgtagttttagttttttgagaggtttaggtgggag

SEQ ID NO: 927 - DNA, 5153 bp, Artificial Sequence
  chemically treated genomic DNA (Homo sapiens)
ttaaggtaatttatagatttaatgttatttttattaagttattaatgattttttttatagaattggaaaaaattattttaaagtttatatggaaataaaaaagagtttgtatcgttaagttaattttaagttaaaagaatatagttagaggtaatacgttatttgattttaaattatattaaaaggttatagtaattaaaatagtatggtattggtattaaaatagagatatagattaatggaatagaatagagattttagaaataatgttatatatttataattatttgatttttgataaatttgataaaaataagaaatggggaaaggattttttatttaataaatggtgttgggaaaattggttagttatgtgtagaaagttgaaattggattttttttttatattttatatgaaaattaatttaagatgggttaaagatttatatgttagatttaaaattataaaaattttagaagaaaatttaggtaatattatttaggatataggtatgggtaaggattttatgtttaaaatattaaaagtaatggtaataaaagttagaattgataaatgggatttattgaaattaaagagtttttgtatagtaggagaaattattattagagtgaataggtaatttataaaatgggagaaaatttttataatttttttatttgataaagggttaatatttagaatttataatgaatttagataaatttataagaaaaaaataaataattttataaaaaagtgggtaaaggatatgaatagatattttttaaaagaagatatttatgtagttaaaaaatatatgaaaaaatgtttattattattggttattagagaaatgtaaattaaaagtataatgagatattattttatattagttagaatggtaattattaaaaagttaggaaataataagtgttggagaggatgtggagaaataggaatatttttataatgttggtgggattgtaaattagtttaattattgtggaagttagtgtggtgattttttagggatttagaattggaaatattatttgatttagttattttattattgggtatatatttaaaggattataaattatgttgttataaagatatatgtatacgtatgtttattgtggtattatttataatagtaaagatttggaattaatttaaatgtttaataatgatagattggattaagaaaatgtggtatatatacgttatggaatattatgtagttataaaaaatgatgagtttatgttttttgtagggacgtggatgaagttggaaattattatttttagtaaattattgtaaggataaaaaattaaatatcgtatgtttttatttataggtgggaattgaataatgagaatatatggatataggaaggggaatattatatttcggggatagttgtggggtggggggaggggggagggatagtatttggagatatatttaatgttaaatgtcgaattaatgggtgtagtatattaatatgttatatgtatttgtatattgtgtatatgtattttaaaatttaaagtataataataataaaataaataaataaataaataattgaaagaagtgaaaaataatgatgtgaaaaattgaattatttttgtagtgttgatgggatatgtagttatattggaaaatagattgttagttttttaaaatgttaaatatatatttattttatgatttagtatttttatttttagttgtttattttaaagaaatagaaatttatgtttatataatatatgaatgtgaatatttatagtagttttatttataatagtttataaagtggaaatatattaaatatcgattaattgatgaatgaataaataaatgggagttatttatataatttaatagggtttggtatttaaaaggagtaaaatattgatacgtgttataatatagatgaattataaaagaatattaagttggttaggtgtggtgatttatatttgtaattttagtattttgggaggttaaggtgggtggattatttggggttaaaagtttagattagtttggttaatatgatgaaatttcgtttttattaaaaatataaaaattatttaggtatggtggtaggtgtttggaggttgaggtaggagaattatttgaattcggaagtggaggttgaagtgagttaatatcgtattattgtattttagtttgggtaatagagtaagattttgttttaaaaaaaaaaaaaagtatattaagttaagtgaaagaatagaaatataaagattaaatattttatgattttatttatataatgtttagaaaaggtaaatttgtaaagttagtgagttaattaaaggttgttttgagttgtgagtaagagtaaggaatggtgattgatgagtacgagggattttttaggaatgatagaaatgttggaaaataggattatagtgatggtttatataagtataaaattttattaaaaataattgaattgtatatttaaaataagtaaatgtgatgttaattatattttagtaaatttatttaaaaataaaagaaagttggtagtatggtttttaattattttggatttttgttttatttttttttttttttagggtttatatttattgtttttatttagagattttaagatatatgagttgaaatttacgagtttttagaacgtttaatagttgaaagaaagtttagttttatattgaaggcgatgggggatttttaaggtgttttttagtattgttatagtaggtaaaggtatgcgatgtatttgggtagttttagatagtattttataagttttagtaagatttagggtttgtaaatagttttgatagttttagagaataagttgttatattttgtagtataaggttaattttttttaggtaagtggttttgaagtattggtagtgaggtttaaagtagaagatgaatgtttataatatggaggagggtaagatttagagtggggtgttaaattaaattatttgtagagtattatttttaataattgtagaaagtattttttttaagtgtttatggtatgtttattaatgtagattatatgttggattataaaataaattttattaaatatttaagaattaaaattatatagtgtatatgttttggttatagtagtatttaattagaaatttataataatgagatatttagaaaatttttatttttagaaaataagtaatatatttttgaataatatttgggttagagaagaaattataagataaaattttaaatattattaattgaatgatgataatttaatatattaaaatgttgggtatagtttatatagtgtttaaagagaaatttataatttttaatgtttatagtggaaataggaaaggagtaaagaaaaataattttttatgtttttattattaggattttgaaaaacggggttgggtgtagtggtttacgtttgtaattttagtattttgggaggttgaggcgtgtagattataaagttaggagtttgatattagttggttaatatgatgaaattttatttttattgaaaatataaaaattagttcggtgtagtggcgggtatttgtaattttagttatttcggaggttgaggtgggagaattgtttgaattcgggaggtagaggttgtagtgagttgagatggtgtttttgtattttagtttgggtgatagagtaagattttattttaaaaaaaaaaaaaaaaaatgtgaaaaacgagtgaaaaaaaaaaataaaattaataaatgtaagttaataataaaaataatgaaaattatgaaatagaaaaataaataatagagataattaacggttaatttttttgtattttttgtataaaattttattttaaaataattttatatttaaatatatatttagaattatagagattttagaagaaaaaattagagaaatatagaaataaaatgagaattgtgggaataaaaattaggaagtagttgtttatgaggtagattgggggaaggttagggaattaatagggaataggtagaaaataattttttggagtgacggaaatggtttatattttttttggggtgttatttatatgggtatatataattgttaagttttattgaattgaatattgaagatttgggtattttaatgtatgtaaattatattttaatttttttgagtaaagtgttttgggaagtttatggcggtgatatttgggtagttttggggtataggttttagaagtatttatagtatgtttagtttaagaatttgttgagaatcgttttgtagttaaaaatatggataagttcgaatatttatgataagagttattggggtatataattataaatttttatttttgtgatataggttatattattaagtggttattattagatagtttttttttaatgatgttgtttatttaggaatttagggttttttaggggtaaatgattattgaggttttagatatattgggtaggaaagaaagttattttatataaaattaagtgattggagttgttattattgtaaatttttaaattttgtaagatagtagtaatattttaaatgatagtttgagagaggagataatgggtttatatggatttttttttagatggatttattgaataagggtataatttaaattgtatttgtagattttttttggtttagtttaagtttatagattgtggattttagatagttggtattaattgattagtgttttgttaaggttaaatttaagattttttgttatattgtagtattaggatgggatttttttttttgtttttgggaagaattagagatgtaatttaaaggttattatttttttgagataaggattttataggaggagagagtaatgagtatatggttagagattaaagtgataagggttgggttagaagttatagtgtataaagttttagatttgttataggaaatgaggtgagaagtacgtttatttttttgtttagtttttaataatttaattaatggttagagattttttatttttttttagttatttttgtagtggtggggatatagaatgtttgtaaaaaaaatggggtggaggaaaatgaggtatttgtgtgagtatataattatttgata

SEQ ID NO: 928 - DNA, 5153 bp, Artificial Sequence
  chemically treated genomic DNA (Homo sapiens)
tgttaaatggttatatatttatatagatgttttatttttttttattttattttttttgtaaatattttgtgtttttattattgtaggagtagttgaaagaaaatgaaaaatttttaattattagttagattgttaaaagttggatagaagagtggacgtattttttattttattttttgtggtaagtttgaagttttatgtattgtggtttttggtttaatttttattattttgatttttggttatgtatttattgttttttttttttatgggatttttattttagaaaaatagtgatttttgggttatatttttaattttttttaggaataggaagagaagttttattttaatgttgtagtgtggtaaagagttttgggtttagttttaataggatattagttagttgatattagttgtttgggatttataatttgtgaatttaaattagattaggagaaatttgtaagtgtaatttgaattgtgtttttgtttagtaaatttatttggagggaaatttatgtaagtttattatttttttttttagattattatttgaaatgttgttgttgttttataaaatttagaaatttgtaatggtgatagttttaattatttagttttatgtgaggtgatttttttttttatttaatatatttgaaattttaatggttatttgtttttggagagttttgggtttttagatgaataatattattgaaggaaagttatttggtgataattatttaatgatatggtttgtattataagagtggggatttgtggttgtatgttttaatgatttttattataggtgttcgaatttatttatatttttggttgtaaaacgatttttagtaaatttttgaattggatatattgtgaatgtttttgaagtttatgttttagaattgtttaaatattatcgttataagttttttaagatattttatttaaaaaaattgaaatataatttatatgtattaaaatgtttaggtttttagtgtttagtttagtggaatttgatagttatatatgtttatgtaagtagtattttaaaaaagatatagattattttcgttattttagaaagttgttttttgtttgttttttgttaattttttgatttttttttaatttattttataggtaattattttttgatttttatttttatagtttttattttatttttatatttttttaatttttttttttaagatttttgtggttttggatatatatttaaatataaaattattttgaaatgaagttttgtgtagggagtatagaaaaattgatcgttgattgtttttgttgtttatttttttattttatgatttttattatttttattattggtttatatttattaattttgttttttttttttattcgttttttatattttttttttttttttttgagatggagttttgttttgttatttaggttgaagtgtaggggtattattttagtttattgtaatttttgtttttcgggtttaagtaatttttttattttagttttcgaagtagttgggattataggtgttcgttattgtatcgggttaatttttgtatttttagtagaggtggggttttattatgttgattagttggtattaaatttttgattttgtgatttgtacgttttagttttttaaagtgttgggattataggcgtgagttattgtatttagtttcgttttttaggattttgataataaaagtatagaaaattgtttttttttattttttttttatttttattataggtattaaaagttgtaaatttttttttaagtattgtgtgagttgtatttaatattttgatgtattgggttattattatttagttaataatatttaaagttttgttttgtggttttttttttgatttaagtgttatttagaagtgtgttgtttgttttttaaaagtgaggattttttagatattttattgttatggatttttaattaaatattattgtggttagagtatatgtattgtatgattttgatttttgaatatttagtgagatttgttttatggtttagtatatggtttatattggtgaatatgttataagtatttgaaaagaatgttttttgtagttgttgaaagtaatattttataaatgatttagtttgatattttattttgggttttgtttttttttatgttgtagatatttattttttattttggattttattattaatgttttaaaattatttgtttaggaaaggttggttttgtgttataagatgtagtagtttgttttttgaaattattagaattatttataggttttgggttttgttgagatttgtggagtattatttgaaattatttaggtgtatcgtatgtttttgtttgttgtagtagtgttggagagtattttaaagattttttatcgtttttagtgtggggttggatttttttttagttgttgaacgttttggaggttcgtagattttagtttatgtgttttggagtttttgagtggaagtaataaatataagttttaaagaaagggagaaataaaataaaggtttagagtgattgggaattatattattaatttttttttatttttaaataggtttattgaggtataattgatattatatttgtttgttttaagtgtatagtttaattatttttagtaaaattttatatttgtgtggattattattgtaattttgttttttaatatttttattatttttaagaaatttttcgtgtttattagttattattttttatttttatttatagtttaaggtaatttttaattgatttattgattttatagatttgttttttttagatattatataaatggaattatagaatatttggtttttgtatttttatttttttatttagtttaatatatttttttttttttttgagatagagttttgttttgttgtttaggttggagtgtagtggtgcgatgttggtttattttaatttttattttcgggtttaagtgatttttttgttttagtttttaggtatttgttattatgtttgggtaatttttgtatttttagtagaggcgggattttattatgttggttaggttgatttaaatttttgattttaaatgatttatttattttggttttttaaagtgttgggattataggtgtgagttattatatttggttagtttaatgtttttttgtggtttatttatgttgtagtacgtattaatattttattttttttaggtgttaaattttattaaattgtatggatggtttttatttgtttatttatttattaattgatcgatatttgatgtgtttttattttatggattattatggataaagttgttatgaatatttatatttatgtgttgtgtggatataggtttttgtttttttggggtagatagttaggagtgaaagtgttagattataaggtaaatgtatatttaatattttaaggaattggtaatttgttttttaatgtggttgtatgttttattaatattgtaagagtagtttaattttttatattattgttttttattttttttaattgtttatttatttatttattttattattattatattttaagttttagggtatatgtatataatgtgtaggtatatgtgatatgttgatgtgttatatttattaattcggtatttagtattaggtatatttttaaatgttattttttttttttttttttattttataattgttttcggagtgtgatgtttttttttttgtgtttatgtgtttttattgtttaatttttatttatgagtgagaatatgcggtgtttggttttttgtttttgtaatagtttgttgagaatgatggtttttagttttatttacgtttttataaaggatatgaatttattattttttatggttgtatagtattttatggcgtatatgtgttatatttttttaatttagtttattattgttggatatttgggttggttttaagtttttgttattgtgaatagtgttataataaatatacgtgtgtatgtgtttttatagtagtatgatttataattttttgggtatatatttagtaatgggatggttgggttaaatggtatttttagttttagatttttgagaaattattatattgatttttataatggttgaattagtttatagttttattaatattgtaaaagtgtttttatttttttatattttttttagtatttgttgttttttgattttttaatgattgttattttaattggtgtgagatggtgttttattgtgtttttgatttgtatttttttgatggttagtgatgatgagtatttttttatgtgttttttggttgtataaatgtttttttttgagaagtgtttgtttatattttttgtttatttttttatggggttgtttgttttttttttgtaaatttgtttgggtttattgtagattttggatattagttttttgttagatgaggaggttgtgaaaatttttttttattttgtaggttgtttgtttattttgatggtagttttttttgttgtgtagaagttttttagttttagtagattttatttgttaattttggtttttgttgttattgtttttggtgttttagatatgaagtttttgtttatgtttatgttttgaatggtattgtttaagtttttttttagggtttttatggttttaggtttaatatgtaagtttttaatttattttgaattaatttttatataaggtgtaaggaaggaatttagttttagttttttatatatggttagttagtttttttagtattatttattaaatagggaattttttttttattttttgtttttgttaggtttgttaaagattagatagttgtagatatgtggtattatttttgaggtttttgttttgttttattgatttatatttttgttttggtattagtattatgttgttttggttattgtagttttttagtatagtttgaagttaggtagcgtgttgtttttggttgtgtttttttggtttaggattgatttggcgatgtaggtttttttttgtttttatatgaattttaaagtagttttttttaattttgtgaaaaaagttattggtagtttgatggggatggtattgaatttataaattattttgg

SEQ ID NO: 929 - DNA, 5182 bp, Artificial Sequence
  chemically treated genomic DNA (Homo sapiens)
gtatgagatatagatattttatttagttaaatatttaataatgttttaatatttattttgtatacggtgttaaggattaataaaggagtagtttagttttaagataatataataaaaataaatttttaattttattggttgtaatatttttttattgagatttttatggtataaattattgatgaataggtatttttttttagtggttattttttttattttttttttttattttttaacgtatagatgaattgtgggttgtattttttagttgaatttttaatttaaatattcgaggaaattgtttttattaaattatttaggatgttgttaaaattaatggttaattttttttttattgtatttgatgtattagtagtatttattatagtggattacgttttttttgaaatattttttttagttgatttttataatgttatttttttttaattttttttttgttattaatttttatttagtatttttagttggtttttttttttttttttaatttttaaatgttgatatatttattttaggatttagtttggaaatttttttttttatttatgaatattattattttagtttattttatttagttttgtgtttttaaaaattattatatgttttttatatataaattgatttttttaggattagtatagggggtgtaattattttaaagtaatttagaattttaataagttggttaagaagagggatttttttttttttagtatgagggattgtgtttaatatagttttttgtagaatgggtgtttttttttttaagaaaagggaaattttttgtatgagttttaaggattttaggtgttgggtagttgattttcgtagataattttgtgaatagttggtatttaaatttagattgttttacgttaatagtttgtattttttttttgaggattttgtgtttttgtgtttatattataaaaagttataataagggatgtaagtttgtgtttttgtgtttatattataaaaagttataataagggagattagtgtttttatattggaatgaatatttatattgttagtttagtaattttttaataatttatgtattagtataagataggaggatggggaaattatgttgtttatttttttgttgattagtaatttttgtgagtttttttaatatagtatattatttaattcgtgattattatattgagaaattttttataaattttgatgttaataggtggtaatttagatgagtattattttatatagtatgttgattttttttgagtatgtggaggataattttattgttttaggattgtatgtatgaaagattattattttttttattgaatttgtttttgttaaaattaattggtcgtacgaatttaggttattaatttatatataagtaaaaatttttttaatatggattataggtttaaatgtaagggttaaattatatattttttgaagaaattagagattaatatatatatgatattggattaggtaaaagtttaaatttttttggtagaaggaaaaaagtcgaaaaatgagatatgattaaaattaaaaatgtttatatgttaaaagatattaataagaaaatgaaaagataagttatagattggaggaaaaaaatttaaattatatatttgataaaggatttatatttagaatgtaaaatgtatttataattaaataataaaaagaaaaataatttaattttaaaatgagtaagatatttgaataattattttattaaaaaggtgtaggaatggttaataaagtatagaaaagatggtgagtattattagttagtagggaaatataaattaaaattataatgtgatattattttttatttattagaatgttatattaaaaataaaataataataattggaggaagtgaaagtataatgatgtgggaaaattgaaatatttatgtattgttgatgggataggtagttatgtttaaaaatattttggttgttttttaaaatattaaagatgtatttattatatgatttagtagttttatttttgttaattttaaagaaataaaaatgtatgtttatataatatatgaatgtgaatatttatagtagttttatttataatgtattttgggaggttaaggtgggtagattatgaggttaagagatcgagattattttggttaatatggtgagattttgttttttttaaaaatataaaaattagttgggtatggtggcgtgtatttgtagttttagttattcgggaggttgaggtaggagaatcgtttgaatttaggaggcggaggttgtagtgagtcgggattatgttattgtattttagtttggtgatagagtgatattttattttaaaaaaaaaaaaaaaaaagggggggaaatatataaatatttattaattgataaatgaataaattaatggtagttatttatataatttaatagaatttgttatttaaaaggaatgaaatattgatatatgttataatatagatgaaatatataagtatattaagttatgtgaaagaaggtagatgtaaaagattatatattatatgattttagttatatggtgtttagaaaattaaatttgtggagttaggaagttatgagggttgtttagagttgggggttgggaataagaggtggtaaatgataagtatgagggattttttaggaaagatagaaatgttttaaaataggattgtgatgatggttatataagtttaaaattttattaaaaataattgaattgtatatttaaaatgggaatgttataatatgttaattatattttagtaaagttgtttaaaaatagaaagttggtagtgtggtttttagtagttttgttttttgttttattgtttatttttttaaagaaagtaaaatatttattggtttaaagaaagtttatagttattgtttttatttagattttaagagatattgtttgaattttaagagtttttagaatttttaatagttgaaggaatatttggttttattttgaaggttatgggggtttgtaaggtgtattttagtatttgatatggtaggtaaaggtgtgtgatgtatttgggtggttttagatagtgttttataagttttagggttcgtgtttagttttgagagttttagaagataagttgttatattttgtattataggattaattttttttaggtaagtgggtttgaagtattggtagttaggttttaagtagaaggtgaatgtttatatataggagaaaggtaagatttagaatggggagttaagttaaattatttgtagagtatgatttttaataattttagaaagtatttttttgaagtgtttatggtatttttattaatatagattataggttggattataaaataaattttaatatatattaaagaattaaaattatatagagtatatgttttggttataataatatttaattagaaatatataataataagaaaatttttagttttagaaaatatgtaatatgttttttaataatatttgggttaaagaagatattataagaaaaaatttaaaacgttagtaattgaataatgataatttaatgtattaaaatgttggatatagttaatatagtgtttagagagaaatttataattttaaatgtttatggtggaaatgagtaaagaagtaaagttaattatttatgtttttattataagaattttgaaaaagaagagtaaaataaatttaaagttaataaatatttaagttaataataaaaataatgaaaattatgaaatagaaaaatgaataaataatagagataattagtggttaatttttttgtattttatgaataaaattttagtttagaatgattttatatttaaatatatatttagaattataaagattttagaagaaaaaattaggaaaatataggaataaagtgggaattttgtgggaataaaaattagaaagtaattgtttattaggtaaattcgggggagggtaggtaattgattaagaataggtagataaaattttttggagtgaaggaaatggtggtttttttttcgttggtatttatatggatatatataattgttaaggtttattgataatgaatatttaagtgtatattgaacgtttaagatttgggttttgtaatgtttagattatatttatttaaaaaaattatatttttatttttttaagtagagaaaagtgttttggggagtttatggtagtgatgtttgggtagattggggtataggttttagaagtatttatagtatttttagtttaataatttgttaagaatggttttgtagttaaaaatgtaagatgagtgtaaatatttatgattagagttattgggtatataattataaatttttatatttgtattataggttatatgattaattcgttattattagatattttttttttaatgaggtttttttattaggaatttagagttttttagggaaaaattgtaattgaggttttggatatattgggtggaaaagaaagttattttatataaaatttagtgattggagttgttattattgaaaatttttaaattttgtaagatagtagtgacgttttaaatgatatttttagagagttgataatgggttaaaatagatttttttttaggtggatttattgtataaggataatatttatattgtatttggagattttttttagtttggtttaagtttatagattgtagattttagatagttggtattaattgattagtgttttgttaaggttaaagttaagattttttattatattgtggttttaagattggatttttttttttgtttttgggaagaattagagatataatttaaaggttattattattttgagaaaagggattttggaggaggagggagtaatgagtatgtggtaggagtttaaggtaataagggttgagatataagttatagagtataaagttttagttttttttttagggatgaggtagtaaggatttggatttttttgtttagtttttaataatttaagttacggttagagtttttttttttttttttaattatttttggtagttgtggggttatggaatttttgtaaaaaatggggtggaggaaaataaggtatttgttgagtgtataattattttattttttgtttttagt

SEQ ID NO: 930 - DNA, 5182 bp, Artificial Sequence
  chemically treated genomic DNA (Homo sapiens)
gttaaaaataagaggtaaaatggttatatatttagtagatgttttatttttttttattttattttttataaaaattttatgattttataattgttaggagtagttgaaagaaaaggagaaagttttaatcgtaatttagattgttaaaagttggatagaggagtttaagtttttattgttttatttttggaggaaggattggagttttatgttttgtggtttgtgttttagtttttattattttgaatttttgttatatatttattgttttttttttttttagaatttttttttttagaataatagtgatttttaggttatatttttaattttttttaggaataggaagagaaatttaattttaaggttatagtgtgataaagagttttggttttagttttaatagaatattggttagttgatattagttgtttgggatttgtaatttgtgaatttaaattaaattgggagaagtttttaagtgtaatgtaaatgttgtttttgtatagtaaatttatttggagggagatttattttagtttattattaattttttgagagtgttatttgaaacgttattgttgttttgtaaagtttagaaatttttaatggtgatagttttaattattaagttttatgtgaggtgatttttttttttatttaatatatttaaaattttaattgtaatttttttttggagagttttgggtttttaatggaagaattttattgaaggaaaggtatttagtgataacgaattaattatatggtttgtaatataagtgtggggatttgtagttgtatgtttaatgattttaattatagatatttgtatttattttatatttttggttgtaaaattatttttagtaaattgttgaattgaagatgttatgaatgtttttgaaatttatgttttagtttgtttaaatattattgttataaattttttaagatatttttttttatttaaaaaaatagagatgtagtttttttaagtagatgtaatttgggtattataaggtttagattttaagcgtttagtgtatatttaagtgtttattgttaatgaattttgatagttatatatgtttatgtaagtattaacgaaaagaagattattattttttttattttagaaagttttatttgtttgtttttagttaattgtttgttttttttcgagtttatttggtaggtaattattttttgatttttatttttatagagtttttattttatttttatatttttttaatttttttttttaagatttttgtgattttggatatatatttaaatataaaattattttgaattgaagttttgtttatggagtatagaaaaattgattattgattgtttttattgtttgtttatttttttattttatgatttttattatttttattattggtttaaatgtttattaattttgggtttattttattttttttttttagggtttttatgataaaagtatagataattgattttatttttttgtttatttttattataggtatttaaagttgtaaatttttttttaaatattatgttagttgtatttaatattttgatgtattgggttattattatttagttattgacgttttgaatttttttttgtgatgttttttttgatttaagtgttattgagaagtatgttgtatgttttttaaaattggggatttttttattgttatgtatttttaattaaatattattgtggttagagtatatattttgtatgattttgattttttgatatatattgagatttgttttatggtttagtttatggtttatgttggtggaaatgttataagtattttaaaagaatgttttttgaagttgttggaagttatattttataaatgatttagtttgattttttattttgggttttgttttttttttgtgtgtagatatttattttttatttggaatttggttgttaatgttttaaatttatttgtttaggaaaggttggttttgtgatgtaaggtgtagtagtttgttttttgaagtttttagaattagatacgggttttgggatttgtggagtattatttgaaattatttaggtgtattatatatttttgtttgttatattagatgttggagtgtattttatagatttttatgatttttagggtgggattaaatgtttttttagttgttgagagttttggaggtttttagagtttaggtagtgttttttggagtttgagtggaagtaataattgtaagttttttttaaattaataaatattttgttttttttaggaaagtgagtagtaggataaagagtaaggttgttgggggttatattattaattttttgtttttaaatagttttattgaagtataattgatatattataatatttttattttaagtgtatagtttaattatttttagtaaaattttagatttgtgtaattattattataattttgttttggaatatttttattttttttaagaaattttttatgtttattatttgttattttttatttttagtttttagttttaggtagtttttatgattttttgattttatagatttgattttttggatattatataattagaattatgtaatatgtggttttttgtatttgtttttttttatatagtttaatatatttatgtgttttatttatgttgtagtatgtattaatattttattttttttaggtggtaaattttattaaattgtatggatggttgttattagtttatttatttattagttgatagatatttatgtgttttttttttttttttttttttttttttgagatggagtgttattttgttattaggttggagtgtagtagtataatttcggtttattgtaattttcgttttttgggtttaagcgatttttttgttttagtttttcgagtagttgggattataggtgtacgttattatgtttagttaatttttgtatttttaggagagataaggttttattatgttggttaggatggtttcgattttttgattttatgatttgtttattttggttttttaaagtgtattatggataaagttgttatgaatatttatatttatgtattgtgtagatatatatttttatttttttagggttgataggagtaaaattgttaggttatatggtaagtgtatttttaatgttttaaggaatagttaaaatgtttttgaatatggttgtttgttttattaataatgtatgagtattttaatttttttatattattgtgtttttattttttttaattgttattgttttatttttagtatagtattttagtgggtaagaagtggtgttatattgtagttttgatttgtatttttttgttgattgatgatgtttattattttttttgtattttattggttatttttatatttttttggtgaaatgattatttaaatattttgtttattttaaaattgggttatttttttttttgttgtttagttgtgagtgtattttatattttggatatgagttttttattaaatatatgatttaaattttttttttttagtttgtggtttatttttttatttttttattgatgttttttaatatgtaaatatttttagttttgattatgttttatttttcgatttttttttttttattaggaaaatttgggtttttgtttaatttagtgttatgtatgtattaatttttgatttttttaagaagtgtatagtttagtttttatatttaggtttataatttatgttgagagaatttttgtttatgtgtgagttaatggtttaaattcgtacgattaattgattttgataaaagtaaatttaatggaaaaaatgatagttttttatatatgtaattttgagataatgaaattgttttttatatgtttagagaaggttagtatgttgtgtaaagtgatatttatttgagttattatttattggtattagagtttgtaaagaattttttaatatgatgattacgggttaaataatatgttgtattaggaaaatttataaagattattgattagtaaaagaataggtagtatgatttttttatttttttattttatgttgatgtataaattgttaggaaattgttgggttaataatgtgagtatttattttagtgtaggaatattaattttttttattataattttttatgatgtaagtataaggatataggtttatattttttattataattttttatgatgtaagtataaggatataggatttttaagggaggaatataggttgttggcgtgaaatagtttggatttaggtgttagttatttataagattgtttgcgaaaattaattatttagtatttagagtttttgggatttatgtaaagagtttttttttttttaggggagaagatatttattttatagggagttatattaggtatagttttttatgttggaaaaaggaaaatttttttttttggttagtttattaaaattttgggttattttaggataattatattttttgtgttagttttagagaggttaatttgtatgtgagaagtatataataatttttaaaggtataggattagatgaaataagttagggtaataatatttatggataaaaggaaaagtttttagattgaattttggaatagatatattaatatttagaggttgaaaagaggaggaggggttagttaaagatattgagtagaagttggtggtaggaggaaaattaggaggggatggtattgtaaaagttaattggagaaagtgttttaagaggagcgtggtttattatgatggatgttgttggtgtattaaatataataggaagagaattgattattggttttggtaatattttaagtaatttggtaagagtaattttttcgaatatttgggttgaaagtttaattggaaagtataatttataatttatttgtgcgttgaggagtagaaggaaaaagtgaagagagtgattattaaaaaaaaatatttgtttattaataatttgtgttatgaagattttagtagaaaggtgttatagttagtggagttgagagtttgtttttgttgtgttgttttaaaattggattatttttttattgatttttagtatcgtgtatagagtagatgttgaaatattgttgagtgtttgattaaataaaatgtttatgttttatat

SEQ ID NO: 931 - DNA, 7932 bp, Artificial Sequence
  chemically treated genomic DNA (Homo sapiens)
aggtagtaatggataagatgtgagggagaggagagagggagatttggagtgtagggtgagtgtttttttttttagaattgaatattttttttttaatgaatttgtatttttgtttttatgtttttttttttttttttttatagtaaataaagtatttattttgttttggaatataagttgttagaaaggtaaattttaggtgaattgttagtggagattgttgattttttgtattgttatttttttagtgtagttattagaaggatgtgatttttttagagaagttattttaggtagattagaaatatgatttatagtttttttgatggtttggtgagtgtttttaaagagttttttatttttttgggatatagtattattgtgtataatttttgtatttgaaaagtagtagttttttttgttggatagtttatatcgatttttaaggaggttatggagtttttatttatttttttaaattttatgtattagtttgtttttatgtattagtttgtttttacgttgttatgaagaaatatttgagattgggttatttatgaagaaaagagggttaattggtttatagttttttatcgttggggaggttttaggaaatttataattatagtagaaggtaaaggagaagtaggtattttttgtatatgatggtaggatagagtgagtgtaagtagggaaggtgttagatatttataaaattttaagttttcgtgagatttatttattattatgagaatagtatggggaaatcgtcgttatgatttagttatttttatttggttttatttttgatagatggggattatgaggatgataatttaagacgagattttgggtggagatagagttaaattatattattttagatagaggttttttaaatatgtaaagttttgttaaattttgtttttatattaaaatgtatttaataatttgattgttttttagtattttatttttattattttggtttaagttattattattttttatttggattattttaatagttttttgattggtttttttgtatttatttttgttattttatagtttatttttattataatagttattgtgattttttaaaaatgtgtgttatatttgttattttttttttttaaattatatattattttttttttgtggttggagtaaaggttagagtttttttaatattttataggatgttataggattttgttttttattttttttgattttattttttattgtttttttttgtttgttgttggttatttttgtttttttttgaacgtgttaattatatttttgtttagagtttatgttattttttgtttttggaatgtttttttttatagatttatattatgttttattatgttttttaggtttttatttatatgttattttattagtgaggtttttttgattattcggtataatttgtcgtttttttatatttttaatgtttttttttttttttatttttttttattgtgtttattattattgatgtattattaatatatgtttattgtttgttttgtgtttgatttttttattttttttattagaatgtgagttttaggagaggtttttgtttgttttgtttattattatatatttagagtttaggttagtgtttagtgtatagtaaagcgtttaataaatatgtgcggaatgagtaaattttttgacgtttgaaattagagattttaaattggaaagtttttagaaataatgtagtttaatttttttattttaaaacggaggaagttgtggtttagataggtgaaatgatttgtttaaggataaataggtagtggatgttattgatttttatatatatatagtttggattatattataaattttgttttatagtgaaatggtttggttgtgtttttattcgaatattattttgaatttttataatatatgggagggatttagtggaaggtaattgaattatggggtaggttttttttatgttgtttttgtgatagtgaataagttttatgagatttgatggttttaaaaaggggagtttttttgtataagttttttttttttttgtttgttattatgtgagatatgatttttattttttgttatgattgtgaggttttttagttacgtggaattgtaagtttattaaattttttttttttgtaaattgtttcgttttaggtatgtttttattagtagtgtgagaatgggttaatatatataatttgttttttttttgtatttaatattgagtcgtgagttttgtattatattagaatgtttatttaagttattattttaaggtcggttttatttttaaagttatttaaattaagttattaaatataagtggatatatttaagtgtatgtataaaatttatattaggttagttgtagtggtttatgtttgtaattttaaagttgtggaaggtagaggtgggattgattgaggttacgagtttaaggttgtagtgagttgtgattgtattattgtattttagtttgagggatagagtaggaattagaaaaaaataaaataaaaagaaataaataaaaaaatttttaataattttatagtggtttttttagaaaaaataaataaataaaattaaaattgtattgtatgtataagtttttttatgttatgtttgattttttttgaagagattaattaaaaaaaagtgagtgatattggaagtatgtttttgtgatgttgtggtaatatttataggttgcgttagggttatgtttgtaatttttggagatgagtgggtaagtggggttttgaggtggttgggggttggaagagaaggttggaggagtttatataagatagttttttaatacgtcggggtatagaattttaggttgggttaatttttttttgttgaggtgaagattcgttttttgtaggtcgttggtaaatgttttgattttggtatttaggtgtgattagtttagattttgagagtgagtgaatttaaagttgatagttttttttttttttggaattatgaaataggttatttttttttaaggatagtttgattttttattgtgtaagttatatattgtatatttttttaaatattttttttttttttgaattgattattttattagtacggttgatttttttaagtagtaaattttattagttgttattggtgttttcggagagacgattaattaaggaatttagttcgggaatagtattgatttttatttttggatttttgttttttttttaaaaagttttttgaattttttagtgggttttaatttgttaaaggagaaaatagttatttatggagtaagggtttttagtttttttttttataaatggaagttttttttgaattaggtaagtaacgttaaatagaagttaatttttaagtttttttaatatattgttaaattgtaatattagattgtattatatattttttagttgttagttattgtagttgttatttttgttattatagtggtgagtatttttgtttgttatgcgtgagagagggggtcgatttttcgacggggaggttacgggaaattgtgtgaggattttgttaatttttagaagttttagaaatgtttttttgttttggtttttagcggaaattcgaacgttagtagatttgaatggaatgttttggattgaagaaagtgggaaatggttttaatttataaagttataatttgataaaaattagtgtgattttattgtttagtgaatttatttcgttttttagtttttaggaggtaggttggattggagtttgtagtagtttattttttatttgagttttggtttttagttgggaatttatttaggttataaagaaaaacgtatattgtgtttttttatcgggtttttggagacgaggtttttcggggatataaatagtggggagaatatgagggatatttcgatcgtattttgcgttttttttttttaggtgttgcgtttttttttgggttgagtggcgaggtttttttcgagttttagggttatagtgtaatgttatattttttttgtggaaagtgattggtaaaggagagagaataaaattggaggaatgtaaagtttttagttatttggtttaatttatttaagagtgattaattttagatgagaaaaagaattgaaatggatcggaaaaaaatgaaagtgtattggtcgggaatcgaattcgggtttttcgcgtggtaggcgagaattttattattgaattattaatgttattgttagttaaagatttgtagtattgttttttaaagtttattatttttggttatttattaaggaattaggtatcgttttaaatcgcggtttggaaaatattttgtttaagataaaattgttttaagatatacgtgtatatattttatatatttgtattcgtatggtaatatattttcggtttttttgagtcgttgggtttttagcggttttttaaggtagttcgtaggtttttgtgtgttttagggattcgattttttatagtttcggggagattttgtttttaaagttgttgtttttgtagtttttgttataatcgcgcgtttttagagttagttcggaggagttagaatttttttcgtattttttttagtagtttgagttagaggcgggttggtttggcgtagtcgtttagtttcgcggtttatgtttcgatttgttcgaattttttttcggggttagcgtcgcgtcgcgttattcggttgagttagttcgggcgggcgagaggtttttaattgggcgggaaggtgcgggaaggtgcggaaaggttcgcgaaagttcgcggcggcgggggtcgggtgaggcgtaaaaggataaaaagtcggtggaagcggagttgagtagattcgagtcgggttggttgtagagaaatcgtagggagagttttattgttgagcgtttttcgacggcggagcggtagtagttttcgtggtttttagtattcgataagaagttttagttatgtaggttttacgggagttcgcggtgggtatcgatttgggtattatttattcgtgcgtgggcgtgttttagtagggtcgcgtggagattttggttaacgattagggtaatcgtattacgtttagttacgtggtttttatcgatatcgagcggttggtcggggacgcggttaagagttaggcggttttgaatttttataatatcgtgttcgatgttaagcggttgatcgggcgtaagttcgcggatattacggtgtagtcggatatgaagtattggttttttcgggtggtgagcgagggcggtaagtttaaggtgcgcgtatgttatcgcggggaggataagacgttttatttcgaggagatttcgtttatggtgttgagtaagatgaaggagacggtcgaggcgtatttgggttagttcgtgaagtacgtagtgattatcgtgttcgtttattttaatgattcgtagcgttaggttattaaggacgcgggggttatcgcggggtttaacgtgttgcggattattaatgagtttacggtagttgttatcgtttatgggttggatcggcggggcgcgggagagcgtaacgtgtttatttttgatttgggtgggggtattttcgatgtgtcggttttttttattgacgttggtgtttttgaggtgaaagttattgttggagatatttatttgggaggagaggatttcgataatcggttcgtgaattattttatggaagaatttcggcggaagtatgggaaggatttgagcgggaataagcgtgttttgcgtaggttgcgtatagtttgtgagcgcgttaagcgtattttgttttttagtatttaggttattttggagatagattttttgttcgagggcgtggatttttatacgtttattattcgtgttcgttttgaggaattgtgtttagatttttttcgtagtattttggagtcggtggagaaggttttgcgggatgttaagttggataaggtttagatttatgacgtcgttttggtggggggttttatacgtatttttaaggtgtagaagttgttgtaggatttttttaacggtaaggagttgaataagagtattaattttgatgaggttgtggtttatggggttgttgtgtaggcggtcgtgttgatgggggataaatgtgagaaagtgtaggattttttgttgttggatgtggtttttttgtttttggggttggagatagtaggtggggtgatgattacgttgatttagaggaacgttattatttttattaagtagatttagatttttattatttattcggataattagtttggggtttttatttaggtgtatgagggtgagagggttatgattaaggataataatttgttggggcgttttgaatttagtggtattttttttgttttacgtggagttttttagatagaggtgatttttgatattgatgttaatggtattttgagcgtgatagttattgataggagtataggtaaggttaataagattattattattaatgataagggtcggttgagtaaggaggaggtggagaggatggtttatgaagtcgagtagtataaggttgaggatgaggtttagagggatagagtggttgttaaaaattcgttggaggtttatgttttttatgtgaaaggttttttgtaagaggaaagttttagggataagattttcgaagaggataggcgtaaaatgtaagataagtgtcgggaagtttttgtttggttggagtataattagttggtagagaaggaggagtatgagtattagaagagggagttggagtaaatttgtcgttttattttttttaggttttatggggggtttggtgtttttgggggtagtagttgtggtatttaagttcgttagggggattttagtatcggttttattattgaggaggttgattgaatggtttttcgtgataagttagttgtgattgttagggttatgttatgggttttttagattgttttttatgattttgttttttagagatgaattttttttttaaagttagaattttttttttaggataattgaagttttttgattttttgcggggagggcggtttatttttttttgttttaaataaaaagttattaatttattaaaatttgtgtggtattttaatattgtttttatttatattttgtgtattttgttatttgtatgtatgaattttgttatgtaaaatatagttatagatttaaataagtttttaaaatttttttttgttttttattttaattaatcgaagtataaaagtatttaaaggtttttagaagtagaaaatgttggggtgggtgttgaaggaggaatgtgaagaatatttttgagatcgtgtatatgatttttataggggaaggtaggatttggaaaagaatttgaggttaatatattggaatagtattgaagagttagggttggtaaagaggagaggattgagatttataatgtaggaagagagagggagagatgtggaattggaaaagtagagaatgaagagaaatttaagtattggtagtgtttttatgtgtgattttatgatttaaattttgtatttttgttataggaatttggttgagtttgttagtttagttgttttaataatattaataaatagtttatatgtttattagttgtttgtaattatgttattttatttattgtttttttagagaaaagattttgagttttggattttggaggatggtatatgttagaggaagtagatttggtggtacgattaaagttattattgattttatttatgttagagaaatagtatgattttatgtggtttttgtttatggtataatgaggatgttggaataagattttatagatttttagttttgttattttatatattgtgtaaattaaattttttaagttttagtttttttt

SEQ ID NO: 932 - DNA, 7932 bp, Artificial Sequence
  chemically treated genomic DNA (Homo sapiens)
aggagaaattgaagtttggagagtttaatttgtatagtatataaagtggtagggttgaaaatttatagagttttgttttaatatttttattatgttatgggtagaaattatatgggattatattatttttttgatatagataaagttaatagtaattttaatcgtattattagatttattttttttgatatatattattttttagagtttaggatttagagttttttttttaaaagaataatggataaagtgatatgattataaatagttaataagtatgtaaattatttgttagtgttattaaaatagttagattgataaatttaattaggtttttatgataaaaatatagaatttgaattataggattatatatggaaatattgttagtatttaagtttttttttattttttgtttttttaattttatatttttttttttttttttttgtattgtaagttttaatttttttttttttattagttttaattttttagtattgttttaatgtattggttttaaatttttttttaaattttgtttttttttataggaattatgtatacggttttaggaatattttttatattttttttttagtatttattttaatattttttgtttttgaaagtttttgggtatttttgtatttcgattggttggaatgaaaaataagaaggagttttaaaagtttatttaggtttataattatattttatataataaaatttatatatgtaagtaataaagtatataaaatataggtgaaagtaatgttaaagtgttatataagttttaataaattaatgattttttatttgaagtagaagaggatgaatcgtttttttcgtaaaaagttaaaagattttagttattttgggaagaaagttttagttttggagggaaagtttatttttgaagggtaggattatagaagatagtttagaaggtttatagtatagttttgatagttatagttgatttattacgaagggttatttaattaatttttttaatgatggggtcggtgttggggtttttttggcgggtttgagtgttataattgttgtttttagggatattaggttttttatagagtttggagaagatggggcgatagatttgttttagtttttttttttgatgtttatatttttttttttttgttagttggttgtgttttagttaggtaaggatttttcgatatttgttttgtattttgcgtttgtttttttcgggaattttgtttttaaagttttttttttgtaaagaattttttatatggaagatatgggtttttagcgagtttttggtagttattttgtttttttgggttttatttttagttttgtattgttcggttttatgaattattttttttattttttttttgtttagtcggtttttgttattggtgatggtgattttgttagttttatttgtgtttttgttagtggttgttacgtttaggatgttattagtattaatgttaaaagttatttttatttgggggattttacgtggggtaggagggatgttattgagtttaaaacgttttagtaggttgttgtttttggttatggtttttttatttttatatatttggatgaagattttaggttggttgttcgagtaggtggtgaaagtttgggtttgtttggtggggatagtggcgtttttttggattagcgtggttattattttatttgttgtttttagttttagagataggggagttatatttagtagtaggagattttgtatttttttatatttgttttttattaatacggtcgtttgtatagtagttttataggttatagttttattagggttgatgtttttgtttagttttttgtcgttgaagaagttttgtagtaatttttgtattttggggatgcgtgtggagttttttattaggacgacgttatgaatttgggttttgtttagtttggtatttcgtagggttttttttatcggttttagggtgttgcggaagaggtttgagtatagttttttaaagcgggtacgagtgatggacgtgtagaagtttacgttttcgaatagggagtttatttttagggtggtttgggtgttggaggatagggtgcgtttggcgcgtttataggttgtgcgtagtttgcgtagggtacgtttgttttcgtttaggttttttttatgttttcgtcggaatttttttatgaagtggtttacgagtcggttgtcgaagttttttttttttaggtgggtatttttagtagtggtttttattttaaagatattagcgttaatggagagaatcgatatatcgaaggtgtttttatttaggttaaaaatgagtacgttgcgttttttcgcgtttcgtcggtttagtttataggcgatggtagttgtcgtgggtttattgatgattcgtaatacgttgagtttcgcgatggttttcgcgtttttggtggtttggcgttgcgagttattgaaataggcgggtacggtgattattgcgtgttttacgggttggtttaggtacgtttcggtcgttttttttattttgtttagtattatggacgagattttttcggggtagaacgttttgtttttttcgcggtagtatacgcgtattttgggtttgtcgttttcgtttattattcggaagggttagtgttttatgttcgattgtatcgtggtgttcgcgaatttgcgttcgattagtcgtttggtatcgaatacggtgttgtgggggtttagggtcgtttggtttttggtcgcgttttcgattagtcgttcggtgtcggtgaaggttacgtagttgggcgtggtgcggttgttttggtcgttggttaggatttttacgcggttttgttgaaatacgtttacgtacgagtaggtggtgtttaggtcgatgtttatcgcgagttttcgtggggtttgtatggttgaagttttttgtcggatgttggaggttacggaggttgttgtcgtttcgtcgtcgaggggcgtttagtagtgaggttttttttgcggtttttttgtagttagttcggttcggatttgtttagtttcgtttttatcggttttttatttttttgcgttttattcgattttcgtcgtcgcgaattttcgcgaattttttcgtattttttcgtattttttcgtttagttgagagtttttcgttcgttcgggttgatttagtcgggtggcgcggcgcggcgttgatttcgggagaaggttcgggtagatcggggtatgagtcgcgaggttgggcggttacgttaggttagttcgtttttgatttaggttgttgaaagaaatgcggggaaggttttagttttttcgggttggttttgaggacgcgcggttgtggtagaggttgtaaaagtagtaattttagaggtaaggttttttcggggttgtgggaggtcggatttttgaggtatataggggtttgcgggttgttttggagggtcgttgagagtttagcggtttaggaaggtcgaagatatgttattatgcgaatatagatatataagatatatatacgtatattttaaaatagttttattttgaataaaatattttttaaatcgcgatttaagacggtgtttggttttttagtgaatggttagagatagtgagttttaagagataatattgtaggtttttagttgatagtagtattggtggtttagtggtagaattttcgtttgttacgcgggaggttcgggttcgattttcggttaatgtatttttattttttttcgatttattttaatttttttttttatttaggattaattatttttgaataaattaaattaggtggttgaagattttatatttttttagttttgtttttttttttttattagttattttttataaaggagatgtgatattgtattgtggttttgggattcgggagagatttcgttatttagtttaagagagaacgtaatatttgggaaaggaggacgtagagtacggtcgggatgttttttatgttttttttattgtttgtattttcgaggagtttcgtttttagaggttcggtggagaggtatagtgtgcgtttttttttatggtttaagtgggtttttagttggagattaggatttaggtggagagtaaattattgtaggttttagtttaatttattttttaaaggttggaggacgagatgggtttattgggtagtaaagttatattggtttttattaggttgtgattttgtgaattgaggttattttttattttttttaatttagaatattttatttagatttgttggcgttcggattttcgttgaaagttaaaataaggagatatttttgagatttttgaaggttgataaaatttttatataatttttcgtgattttttcgtcggggaatcgatttttttttttacgtatgataggtagagatatttattattatagtaataaggatggtaattgtaatagttggtagttggagagtatgtggtatagtttggtgttataatttagtagtgtgttagagaaatttaaaagttggtttttatttaacgttatttgtttgatttagaggaaatttttatttgtaaaaagagaaattaaaaatttttattttatagatggttatttttttttttgataggttagaatttattaggaagtttaagggattttttaagagggaggtaggagtttagaagtagaggttagtattgttttcgggttgggttttttggttaatcgttttttcgagagtattagtgatagttggtagagtttgttgtttgagaggattagtcgtattggtaaggtgattagtttaggaaaaaagggaatgtttaaagaaatgtgtaatatatgatttatatagtggaaaattaaattgtttttgaaaagaagtaatttattttataattttaaaagggaaagaagttgttaattttaaatttatttatttttagggtttaagttggttatatttggatgttagagttaagatatttgttaacggtttgtaagagacgggtttttattttagtagggaaaagttggtttagtttggggttttgtgtttcggcgtgttaaggggttgttttgtgtgggtttttttaatttttttttttagtttttagttattttaaaattttatttatttatttatttttaagagttataggtatagttttaacgtagtttatgaatgttattatagtattatagaggtatgtttttaatattatttatttttttttaattgatttttttagagagggttaaatatagtataggggagtttatgtatgtagtatagttttggttttgtttgtttgttttttttaaaagagttattgtagggttgttgggggtttttttgtttgtttttttttattttatttttttttggtttttgttttgttttttaggttggagtatagtgatgtaattatagtttattgtagttttgaattcgtggttttaattagttttatttttattttttatagttttgggattataggtatgagttattgtagttggtttagtataaattttatatatatatttaaatatatttatttatgtttagtagtttagtttgagtagttttaaaaatagaatcgattttaaagtaatgatttaaatagatattttaatgtggtgtaaagtttacgatttaatattgagtataaaaaaaaagtaagttgtatgtgttagtttatttttatattgttaataaagatatatttgagacggggtaatttataaaagaaagaggtttaatggatttatagttttacgtggttgggaggttttataattatggtaaaaggtgaaagttatgttttatatggtggtaaataagagaagagagagtttgtgtagggaaatttttttttttaaaattattagattttatgagatttatttattattataagaatagtatgggaaagatttgttttatgatttagttattttttattgggttttttttatgtgttgtgggaatttaagatgatattcgggtggggatatagttaaattattttattatagaataaaatttgtagtataatttaaattatatatatataaaagttagtgatatttattatttgtttgtttttgaataagttattttatttgtttgggttatagtttttttcgttttaaaatgaagagattggattatattgtttttaaggattttttagtttaaagtttttgattttaaacgttaaagaatttatttatttcgtatatatttattaagcgttttattatgtattagatattgatttgggttttgagtatgtggtagtgaataaaatagataaagattttttttggagtttatattttaatgagaggagtggggaagttagatataaaataaatagtaaatatatattaatagtatattagtagtaataagtataatggagaaaaatgaagaaggaaagggatattaagagtatgggagggcgataggttatatcgaatgattaaggagattttattgataaggtgatatgtgagtaaagatttaaaggatataatgaggtataatgtgggtttatgagaaagaatattttagaaataggaaataatataggttttgggtagaagtataattggtacgtttaaggaagagtaagagtgattaatagtaagtaaggaaaagtagtaggagatgaggttagagagagtgaagagtaagattttgtagtattttgtagaatattggaaaagttttagtttttattttaattataaggggaagatagtatatgatttggggaaaagaagtgataaatatgatatatatttttaaaagattataatagttgttatggtgagaatagattataggatggtaagggtgagtgtagggaggttagttaggaggttattggagtaatttaagtgagaaatgatggtggtttggattagggtggtaggagtagaatattgagaagtagttagattgttgggtgtattttaatgtaaaagtaggatttaataaggttttatatatttgaggagtttttgtttagggtgatatggtttggttttgtttttatttaaagtttcgttttgagttgttatttttataatttttatttgttaaaagtgggattaggtggaggtaattgggttatggcgacggtttttttatgttgtttttataatagtgagtgagttttacgagagtttagggttttataagtgtttggtattttttttgtttgtatttattttgttttgttattatgtgtagaaggtgtttgttttttttttgttttttgttgtgattgtaagttttttgaggtttttttagcgataaggaattgtgagttaattaatttttttttttttataaataatttagttttaggtatttttttatagtagcgtgagaatagattaatatatagagatagattaatatatagagtttggaagggtgggtggaagttttatagtttttttaaaaatcgatgtaaattatttaatagagaaagttgttattttttaaatgtaagaattgtgtatagtgatgttgtgttttaggaaaatggaaggttttttaagggtatttattaaattattaaggagattgtgggttatgtttttaatttgtttggaatgatttttttgagaaggttatatttttttggtaattgtattgggaaaatagtagtgtaggaagttagtagtttttattgataatttatttgaagtttgtttttttgataatttgtgttttaaaataaagtgaatgttttatttgttatagaaggaaagggaagaagatatggaaataagaatataagtttattagaagaagagtatttagttttaagaagaggggtatttattttatattttaaatttttttttttttttttttttatattttatttattattattt

SEQ ID NO: 933 - DNA, 6255 bp, Artificial Sequence
  chemically treated genomic DNA (Homo sapiens)
tattatgtttgttttatttgttatatataattattatattttttaatttggagaagtagaaaattatgggtgaaataatgtttatattttggtgttttaatataaagtgtatatgttttaggtttaattgtagtttttaaatgagtatattgatatttgttatattttatttgttagtttgttgtttggtagtgtgtttttggattattagtttgttttttgtgtattagaatatgaatattttagatttattggaattgtatttaatattgttagaaaaacgaattagggaagaaatgagaggaggtagagaagaaaagaagaaaggaaggaaatcgtttgatattttgtaattaattaaagtagggtatattttttaaattagatatagtttagtagttattgaattatgagatggtgtagtggtttatgattgtaattttagtattttggaaggtttaggtacgaggattatttgaaattaaaagtttaagaataatgttgataaaattgtgaaatttatttttataaaaaataaaattaaaaatttaggttggtgtagtcgtgcgtatttgtgtttttagttatttaggagtatgaggggaggtttgtttgagttttgtagttttagattgtagttagttatgattgtattattgtattttagtttgggtgatgaatgtagtttatgtatttattaaaaaaaaatagttattgaattttatgtaattttgttttattgagaatgtaaagagaatgggtttgttttgtgttagagaagagattttatatttttgatgtttagaaattttatgttaaaagaataatttaaatttaatatatttgaattatatatttgtttaaataaataatttatatttttgtatattatttatagaatattataatttttaataggattgtttaaattagtatagatgatttatttaagaaatattttttttaaaaatttatatataaatttattttattttattttattttatttttttattttattttaagttttgggatacgtgtgtagaatatgtagatttgttgtattggtaaacgtgtgttatggtggtttgttgtatttattaatttattatttaggttttaagttttatatgtattagttatttgttttgatgtttttttttttttttttattattaggttttggtgggcgttgtttttttttttgaattagatataaatttaaaatataatttttaattagtgggattaagttaaagattatgcgtttataaattttttaagtagtttttttatttttaaagtatataaagagttttttggatatgtttttaaaatttcggttttaggtgtatattataagattttgatttagtaagtttggaaaagtagaataagaatttgtattttaatagttattagttgatgttgattatgatggtcgtatgtggtattttttgaggaataatggattgggttgtataatttatttgaattttagaaaagagtttttaatatttagtttttagtatattaaattttttaatcggtagagagtaggtgaatgtttatatatgtttgtttatgaattaaattaaaattttgtttttttttttttgtttaatatagttattttaataaatggtttttataaatatatatgaattttagaaaattttagggaagtaaatttaaatttttaaatataagaaattagttttatgtgagagatatgtgattaagtatttagaattttttgatattaaatatgagaatgtttttattatatgatatttaaaagatgattgaattttggtaaatgtttatatttattttattatttaaaatatttaaagttaatgtaaaggtaaaaatataagataaataatgatttgtaggaaaatttttgaagtatagaatgattttaattttattatgttaattattattatttattagagaatgtgtaaaattttgataatatggtaagtattatttttgatatagcgttgttttattttggatatatatttgttgaaaagtagtagatggtattttatagaaatatttttattattgtaattatttttatgtttggttttttttagcgtgttttttcgttgtttgatttatttagggttagattaatattgggattagtatgtgatgggtttattcgtttttcggttgttttgtttttataatgatttattgtaaaattatttggttaagtttatttttagaatttgtagagatagattttgggtattatttttcgttttaattatatgattttttaattgatgttatttagaaaaataaaagggagattttaacgtgtttaaatatattagttatatagaaaaggatattttttgagattttattttagttttattgattttttgattttttttttgagtaaaaggtaatatgtttaagtataatttaatattatatattagtataagtttttgtttgttaaaattaatagtaatttatttatgaaaatgtatattatttatttaaatttagtttatttgaattgcgtatttgtttaaataaataatttatatttttgtatattatttatagaatattataatttttaataggattgtttaaattagtatagatgatttatttaataaatattttttttaaaaatttatatataaatttattttattttattttattttatttttttattttattttaagttttgggatacgtgtgtaggatatgtagatttgttgtattggtaaacgtgtgttatggtggtttgttgtatttattaatttattatttaggttttaagtttcgtatgtattagttatttgttttgatgttgtaatgtgtataattttgtattcgggatttgaagatgatttttagattttaatttttatgaattaatattagtaattattacgtaaagtaaattatgtggaatatggtaatgtattatattttttttgatggtgggattttaattaattttttttatttttttgtttagatatttaatatttatttttttaattattaattttatatttaatttaaattaggagtttaaattttataagaagatattgataaatttttttttggtaaatatattattataaaggtttatttttaaaaatttattttttttttaataggaaattattttattatttttttattgatttttttattatttaaaatagtgttgttataatgtaaagtatatattgtataagagttagttattttaattttattaatttgtttaatttatttttatttatttgtgttatggtagaaaagaaagagtttattgttttaaatttttattgatgtgttatttgggaaatatgttttttataattattaattgtatattgattatttatgttcgtttatttattagtttatgtgttagtaaaagaagattaattttttagaatttttttttattttgtatttgtaatagaattgataattattaataatagtaaaatttttatgttttttgtattataaaaagagttgtagtaggatttatatattaggtaatagaaaaattttaaaatatataatttttatagttagttttatagtagaagtttttatttaattgagtgaagtaaaataaacgaataaataatatggtaaatgttataaattttgggttttgttttttatgatagagatgtagggttgtttaagagtaggatattttattataattagatgaaaaatgttattgtaatgttatattataaatgataggaaagagagattagaaaaaaatttttaaattatttattaatgaattattttataattgtaattaatagttaaaaatgttatgtaattgtaagttttgtggtaattgtattttttaatggaaatgtttttatttacgtttgtaatttagaaataagtaatttgttatatttttttatatttgtaaaggaattggatatatttgtatatatataattataaaagtatattagagttttagatgaggttaattttgttgaataatattatttgaaatattgaataatttttattagtttaattttttaaagtagatataattattttttttgtgaattttttttattttatttttcgttatttaatattattaatgttttaattttagggttatattatttgtggattttgtaatagaattttggtttatagttattgattttattataaagttagtttttattgttttttattttatttttttaatatttttttatattgtattttaattagtatttttaatgttattatataagttttttgtagtgttataataatttaagtggttattttttttttagttttgttttttttatgtgttgaattgtttgtatttttaatatgtttttttttttgttttatttttttataggtttttaatattattttttatttattttatataatttaatttaagtttgtttttttttattatttttttatttttatttttttggtttgtttaagatgtttatttgtgtgttttattagtatattaatatttttaaattagagtatttatttttatttattaatttatgaggttatgtttggggtttatatttgtaatttaagtattttgagaagataaggtaggaagatttttagagtttaggagttttagaattgtttgggaaatatagtgagattaaaaatattttttattaaaaaaaaaaaaaagaaagaaaaaattcgttgggtatggtggtatatatttgtagttttagttataagtgggattagggaggttaaggtgggaggatggtttgagattagatggtttaggttgtagtgatttgtgtttatgtttttgtattttagtttggaaaatagagtatgttttttaatgttttgaagtatagtgttattaatagaagtttgatgaatgaatgtatgaaagaatgtgattattgattttttatgtttgattttataggatttagttaattatgaagttttttgtttttgttttagttttggtttttatgatttttatgattgtaagtatatttggaaattttaaatattatatttttagtatttattttaagtgttttttttattttttgtgttttggtatatatttatgttgattttaatatagttttataagttttaatatttttttataaggagtttttttgaattaatttatgtaagttttttaaggatttggaatagatatttattatatatttataaatatttaagtataattatttgaatgtaaaagtaaaagaaaatttagcgagttttttaaatatgtgggattaagatttgtgaaagtatttttaaatgtgaaaagttttagattatttgaagttagaaatttgaggaaagaaaaaggtgtattttaatggaatttaagtattagagggtgttaaaataggaatttttaagttattttttgtataatttatttttaaagttagtatataattatttaattttttttaaaataaagttgtttattttaaattataaaataaatttttatatttattaagtgttatgagtttttagttttattgttatttattattgtgtattagtaggaaaagtatttgatttttttggagttttttttttttttttatttttatcgtttttttttttttttttttttttttttttttttatgaatttaatagaaaattggttataaaagaataataatattttaaattatttattaaattttaatgaatgtttcgaaattgaattggttatgatattatagtttattacgtgattttattataaaaggatagaagtagaaaaataaataaataagaatagagtaaagtataatgtttgtttttattagtaaataaaatatttgtatgttggtagtttttgagttatatggaatatatttatataaaaaataatttagagttttattttttagtttttatttttttatttattagtgatagattttttttgttttatataaaaaagatatataaattaaaatgagttgatatttgaatatagtatattaattatagtatttattttttatttattttgaagatgttataaagttaaaataattaatttagtttgttattaattaaagaatgtttttattttgtttaattatatatgtggttaagttaatatttatatttatttttgaattataaaattaaaatattaattatttttttattttttttttttttaaga

SEQ ID NO: 934 - DNA, 6255 bp, Artificial Sequence
  chemically treated genomic DNA (Homo sapiens)
ttttggaaaaaaagaaaatgagaaaataattaatattttaattttataatttaagagtaagtataaatattgatttagttatatatatgattaaatagaatggaggtattttttggttgatgatagattaaattagttattttagttttatgatatttttaaaatgagtgaggggtaaatgttataattaatgtgttatatttaaatattaatttattttggtttatatattttttttatgtaaggtaggaaaagtttgttattggtgaataagagagtggaaattgaaaaatgaaattttggattgttttttatatgaatatgttttatgtagtttaaaagttattaatatataaatattttatttgttgatagagataggtattatgttttattttgtttttatttgtttatttttttatttttatttttttataataaaattacgtgataaattgtgatattataattaatttagtttcgaaatatttattagaatttagtggatagtttggagtattattatttttttgtgattaattttttattaagtttatagaaagaggaggaggaggaggaggaggaagaggcggtggaagtagagaaggagaaagagttttaaagaggttaagtgttttttttattaatatatagtagtaaatgataatagagttgggaatttatgatatttaataaatatggagatttgttttatggtttaaaataagtagttttattttaggaagaattaaataattgtatgttgattttaagagtaggttgtgtaagaaatgatttgaaaatttttattttgatattttttaatatttgggttttattgaagtgtatttttttttttttttagatttttaattttagatggtttagagttttttatatttaaagatatttttatagattttagttttatatatttaaaaagttcgttaaatttttttttatttttatatttaagtaattgtatttgagtgtttgtaggtatgtgatgaatatttattttaagtttttaaagaatttatataagttaatttaaagaaattttttgtagggaaatattaaagtttataaagttgtattgaggttaatatgagtatatattagaatataaggaataagagagatatttgggataagtattgagaatgtagtatttaaaatttttagatatatttataattatggaaattatgagagttaagattaaagtaaagataaaaaattttatagttggttgagttttataaaattaaatatgaaaaattagtaattatatttttttatgtatttatttattaaatttttattgatgatattatgttttaaagtattgggagatatgttttgttttttaggttggagtgtaggggtatgagtatagattattgtagtttggattatttggttttaagttatttttttattttagtttttttagttttatttgtagttggaattataagtgtgtgttattatgtttagcgaatttttttttttttttttttttttttagtagagaatgtttttagttttattatattttttaggtagttttgaaatttttgggttttaggaatttttttgttttgtttttttaaaatgtttggattataggtgtgagttttaggtatggttttatgaattgataagtaaaggtgagtgttttgatttggaaatattaatatgttaatgaaatatataaatggatattttaaatagattaagaggatgggagtaagaaggtaatgaagaaaggtaagtttgagttggattatatggaatgagtaaagggtggtgttgggagtttataaagaaataaaatagagaggaaagtatgttaaaaatgtaaatagtttaatatatagggaggataaaattggagaaaagatgattatttaggttgttgtgatattataggggatttatataatgatattaagaatgttaattaaggtatagtgtaaagagatattaggaaagtagaatgaaaagtaatggagattggttttataataaagttagtgattatgagttagagttttattatagaatttatagatggtgtaattttgagattagaatattagtgatattgggtagcgaaaaataaaatgaagagaatttatagggaaaatgattgtatttattttgagaagttgaattggtgaagattatttaatattttaaataatattatttaataaagttagttttatttgggattttgatatgtttttataattatgtatatgtaagtgtatttagtttttttgtagatataaaaaagtatagtaggttatttatttttaaattataaacgtaaataaaagtatttttattggaaaatataattattataagatttatagttatatggtatttttggttgttaattgtagttataaagtaatttattaataggtaatttaaaaatttttttttaattttttttttttgttatttgtgatataatattatagtaatattttttatttaattataataaaatgttttgtttttaaatagttttatatttttattatgaaaagtagaatttaagatttatggtatttattatattatttattcgtttattttgttttatttaattaaatggaaatttttattataggattaattataaaaattatgtattttgaagtttttttattatttaatatataaattttattataattttttttatgatataaaaggtatgagaattttattgttgttaatgattgttaattttgttgtaagtataaaataaaaaagggttttaagaaattggtttttttttattaatatataaattgatagataaacgaatatagataattaatatataattaatggttatgaaaaatatattttttaagtaatatattaataaaaatttggaatagtaaatttttttttttttgttataatataaatgaatgaaaatgagttaaataaattagtaagattgagatgattaatttttatatagtatatgttttgtattataatagtattgttttaaatgatggaaaggttaataaaaaagtaataaaatagttttttattaagaagaaagtaaatttttaaaaataaatttttataataatatatttattaagagagaatttattagtatttttttgtaaaatttgaatttttggtttaagttaaatgtagaattaataattaagaaagtagatattaggtatttagataaggaaataaaaagagttaattgaggttttattattagagaggatgtaatatattgttatattttatataatttattttgcgtgatgattgttggtgttaatttataggaattgagatttggaagttatttttagatttcgagtataaaattgtatatattatagtattagggtaaataattaatgtatgcggggtttaaaatttagatgatgggttgataggtgtagtaaattattatggtatacgtttattaatgtaataaatttgtatgttttgtatacgtattttagaatttaaagtaaaataagaaagtaaaataaaataaaataaaatgaatttgtgtgtgagtttttaaaggaaatatttattagataaattatttatgttaatttgaatagttttattagaaattatggtattttataggtaatatataaaaatgtaaattatttatttaggtaaatacgtaatttaagtaaattagatttaaatagataatatatatttttataagtgggttattattgattttagtaaataaaagtttatgttaatatataatattagattgtatttgaatatattattttttatttaagaggagagttaagaagttagtgaagttgaagtgaagttttaagagatgtttttttttatatggttgatgtatttaaatacgttgaaattttttttttgtttttttaaatagtattaattaggagattatatgattgagacggaaagtaatgtttaaaatttgtttttataaattttaaaaataaatttaattaggtgattttataatagattattgtgaagataaagtaatcggaaagcgaatggatttattatatgttaattttagtgttagtttagttttgagtgagttagataacggaaaagtacgttggaggaaattaggtatagaaatgattgtagtgataaagatgtttttgtagaatattatttattattttttaataaatatatgtttaagatggaataacgttatgttaaaaataatatttattatgttattaaaattttatatattttttagtaaatagtgataattggtataataaaattggagttattttatattttaaaagtttttttataaattattatttattttgtatttttatttttatattgattttgagtgttttaagtaataaagtgaatgtaaatatttgttaaaatttaattattttttggatattatatgataaaaatatttttatatttaatgttaaaagattttaggtgtttggttatatattttttatataaaattgattttttatgtttagaaatttgaatttatttttttggagttttttgaggtttatatatatttatagaggttatttgttgaaataattatattagatagaaagagaaaaatagaattttaatttaatttataggtaaatatgtataagtatttatttattttttatcggttggagaatttgatgtgttaagaattgagtattaaaaatttttttttaaagtttagataagttatatagtttagtttattgttttttagagggtgttatatgcgattattatgattagtattagttagtagttgttgaaatgtagatttttattttatttttttaaatttattgagttagaattttgtggtgtatatttggaatcggaattttaagaatatgtttaggaaattttttgtgtattttaaagatagaaaaattatttaagagatttataaacgtatggtttttagtttgattttattaattagaaattgtgttttaaatttgtgtttgatttagggaaggaaataacgtttattagggtttggtggtggggaagggagggagagtattagggtaaatagttaatgtatgtggggtttaaaatttagatgatgggttgataggtgtagtaaattattatggtatacgtttattaatgtaataaatttgtatgttttgtatacgtattttagaatttaaagtaaaataggaaagtaaaataaaataaaataaaatgaatttgtgtgtgagtttttaaaggaaatattttttagataaattatttatgttaatttgaatagttttattagaaattatggtattttataggtaatatataaaaatgtaaattatttatttaggtaaatatgtaatttaagtatattagatttaaattgtttttttggtatgaaatttttaagtattagagatataaggttttttttttggtataaaataaatttattttttttatatttttaatgaaataaagttatataggatttagtgattatttttttttaataggtatataggttgtatttattatttaggttggagtgtagtggtgtaattatagttaattgtagtttggaattatagggtttaagtaaatttttttttatatttttaagtagttagagatataggtacgtacgattgtattagtttaaatttttaattttattttttatagagatgggttttataattttgttaatattgtttttgaatttttgattttaggtggttttcgtgtttaagttttttagagtgttgggattatagttatgagttattgtattattttatggtttagtaattattgaattatgtttgatttaaaaaatatattttgttttaattaattataaaatgttaagcggtttttttttttttttttttttttttttgtttttttttattttttttttagttcgtttttttaataatattaggtatagttttagtggatttaagatatttatgttttagtgtataaaaagtaaattaatagtttaaaagtatattattaaatagtaaattaataggtaagatatggtagatgttaatatatttatttaaaaattataattaaatttaaagtatatatattttatgttggaatattaaaatgtaggtattattttatttatgattttttgtttttttaagttaggaagtgtggtgattatgtatgataggtggaataagtatggtg

SEQ ID NO: 935 - DNA, 18281 bp, Artificial Sequence
  chemically treated genomic DNA (Homo sapiens)
tattatgttggttaggatggtttttattttttgatttcgtgatttgtttgtttcggttttttaaaatgttggggttataggagtgagttatcgcgtttggtttgggatttaaagtttttataagggattaatattgatagtagcgtagatagtaatataggtttttttttttttattttgtttgtttgtatggagttagtttttaattggttttttttttttgttttaagtttttgaggagattgagtttgtttgggtttaaattttagttggattattgtttaattatagttttgagtaagttatataagatttttaagatttattttttttatgtgtaaaatggggaataatggttatatttattttatttttagagtggtagtgagcgttatgtgagttagcgcgtgtgtagagttcgggatatgtttggttttagtaagattttagtggatgttagttgttattatgattgagaatgaatgattggtttacgttgtagggtgttgtattgatagttttgtttatttatttatttattgaatagatatttattgagagtttaatatgtgttagagatttagcgtgaattagatagataaatttttgtttgtttttagggagtttgtttagttgtttagttgttttttggtatagagtagttttgggtaggttggtaatttttttggggttttgatttttttatttttgttatgaggagtttgtttcggttttttgtgaattgacgggtatggaggtttggggtagatgattttttaaaatttagttgttttatagtggtatttgttattttttttggggaggaagtttttatagttagaagtaaataagtaaaagtcgagtatttttgaaagtttttttttattttgaaatttttttttgtttgttttttgttttgttttgtttttgagacggagttttgcgttgtcggttaggttggagtgtagtggtgtaatttcggtttattgtaagtttcgtttttcgggtttacgttatttttttgttttagttttttgagtagttgggattataggcgttcgttattatattcggttaatttttttgtatttttagtagagatggggttttattgtgttagttaggatggttttgattttttgattttatgattcgtttattttagttttttaaagttttgggattataggcgtgagttatcgcgtttggttaattttgaaatgttaagaggtttaggatttcgttattttatgatttaaatgatagttataggagagtatatatgaagcgtttataaaggttttagttaggtgcgggttttatgtttgtaattttagtgttttgagaggttgaggtaggaggattatttgaggttaggagtttgagattagtttgggtaatatagtaagattttgtttttataaaaaatttaaaaaatttagttgggtgtggtagcgtatatttttagttttatttatttgggaggttgaggtgggaaggtagtttgaatataggagtgcgaggttatattgagttatgatagtattattgtttttagtttgggttatagaacgagatttttgtttttaaaaaagaaaaaaaaagttttaagtttaagataataatagtatggttataaggtggtattataattttggtttaattttaaaataaaattttaaattttagtatagagcgtattataataaatattagcggatttattatttagaatgaataaatgttaaagttattgttaggttttttttagttagtttgtttgtttgagatattgttatcgaggttgaagtttagtggttatttatacgtgtgattatagtttattgtagttttgaatatttggttttaagtaatttttttattttagttttataagtagttgaaattagagtcgtgtattattacgtttagttaatttttaggttttttttttaaaataaaagatattaagtattgtgggaaaagtgaaagtagaaagattaatattttatgtattatttatagatttttataaagtaatatttattaggtaaaattttttatttattttatttatagttttattgttttggttttatagtagtagagaatttaagaggttttgtataattttatagagtaagtggtagattttggatgatgaatttaggatgttgggttttaaaatttttttatatagtattttttagggttgtagttgtttacgttagaaatttttgggtttaaggagttagtatagagttgaatgtattacgattgtgttgatgggaatattaaagttaagagttaggttttttttttgtttttttgtttttttgttttttttttttttagatggagtttcgttgtttttgtttaggttagagtgtagtggtgtgattttagtttattgtaatttttgttttgtgggtttaagtgatttttttgttttagttttttgagtagttgggattatgggcgtgtattattatatttggttaattttgtatttttagtagagacggggttttattatattgattaggttggtttcgaatttttgattttaggtgatttgttcgttttggttttttaaagtgttgggattataggcgtgagttattgtgttcggttagttagtgttaatatagtattaaagatatagattatattagtgttatttaatttttttagttattttgtgaggtgggtgttatattgttttgttaattattatagaagagaaagttgtgatttaaggagatggagttattggttttgtaattttagagttgggatggagcggggattttaagttatgtgtttttgattttttgtttaggtttgttgtattacgttttgttttttgggggtatggtagaaatcgttatagtggtgtagtgtggtggtaaggaggaaggataggttttttttatttgtttaaaagatgtttttgtgggtaaggttggggttttgagtattaaatagtagtttagagttggcgggtgggtgttgtaggttttgaggtgtttgaggggaggtttttgattatttgtaatgggttttttttgttatgggtatcgagtagatttgggttttaggtttattttattatttgttgttggtgatttggggtaaggtttttggtttttttgaattttagtttaacgtttattttttagtattattgtaggggtcggaataaataattggaggagtaggaatcgtataataaagtttttggggatagcgtaggagttttcgatttggaaagtattatttttttgtttttgtggagaaaaaatgattttatttcgttttttttatattatatttttttttttttttttttttttttttttttttttttttttttttttttttttttttttttttttttttttttttttttttttttttttttgatagagttttgttttgttatttaggttggagtgtgtagtggtataattttggtttattggaatttttgttttttaggtttaagtaatttttttgttttagtttttcgaatagttgggattataggttttcgttattacgtttagttaatttttgtatttttgatagagacggggttttattatgttggttaggttggtttcgaatttttgattttaggtgatttgtttattttcgttttttaaagtgttgggattataggcgtgagttatttcgttgggtttattttttttgttgattatgtttattgtttattgtttgttttttttattagaatgtaagttttatggaggtgcggatttttgttttggttattgtagtgttttgatgggttagaatagtgtttgatatttagtggatgcgttttaaaagatgtattgaagtatttgtttaatgaatgaatgaataatagtattaatttgtatagtagtgttaggtagagattttttttagttagaggggagacgtatagagggaggttatatttaggggaaattatattttacgtttttgtttgtagcgatttttaatatatttggtttggggatttttaaatttgtttacgttttgttagattaggagcgttaatagtttagggattttatttttagtatttggtttttttggggatcgggatggtttttgcgggaaaggttttggggaaggttagttttttgtttaaattaacggtgaagaatgtttagaattattaatttattttatagatatggtaattgaggtttagaggggtgttaggcgatttgtttaatattttttaatttttggtttttttgaaagttcggtgatttcgttgtgagtgggtaggtatttattagagagtagtttttggataagggtaggttatagttttttgtttttagtttcgtttgcgtcgtcgttacgtgtgggttgggaggggtatttgagggtgtgggggttgttatagttcgggaggtgatttttcgtagttggggcgttttgattttcggtttataggttcggggtgtcgggatttcgtttttttgtagggttagggttcggtttttttcgtttatcgcgaggcggggcgtacgtttcgcggcgcggggatcgcgcgttttaggttgtattcggtttttttttcgcgcgtgcgggtttttcgcggcgtttttcgggttcgggagattcggtttcgtcgttcgttcggttcgcggtcgtttttttttttcgtagtttcgcggcgtttgtcgtagtcgtaggcggcggagtagttagagcgttttaggtattagtgcgggcgggagacggaggcgattttgttgtcgggtggggagggggcgtcgcgcggtcgttgttttttttttttcgcggggtttggcggtttcggcgaattttcgcgtcgtataggtcgtgtgcgtcggatttcggtgttttcgcgttagttgagatttgttttttttaggggcggttttgtttcggtttttaggttttcgttttggtattttatacgtttatcggtcgcggggagtttgtttcggttcgagagcgtttatttattttttttatttattttttcgcgtttttattttttcgtattttgattcggtcggacgttttttttttattttgtcgttcgttttttttagggggttttgtttttattttagggagtttattcgatttttgtttgatttttcgtcgttttttttaggggtttcggtttatcgggtgtttttttttaaatttttaattcgtttgttttaggagtttttgttttattttcgagggcgtttaaatagttatattgtgtttttttgtagtcgttgttttttgatttagcgcgatttagcgttttcgtttatgtttttttatttatttttttcggggggcgtggtgagtcgcggtttgtttttacggacggttttcgtttagtttgcgtttcgtcggggtttttatttgttttttcgttattttattatttttttgtcgtttattttcggtttttatggttttagagtcgggtttaatcgttaatagtatttcggtttggggggtagggtcgtcgtcggtttcggggggtagcggttgggtggcggtcgcgttgtgcgtggttatcgcgttgacggcggcggttaattcgttgttgatcgcgtttatttgtatttagttcgcgttgcgtaatacgtttaatttttttttggtgtcgttttttacgtttgatttgatggtggggttggtggtgatgtcgtcggttatgttgaacgcgttgtacgggcgttgggtgttggcgcgcggtttttgtttgttttggatcgttttcgacgtgatgtgttgtagcgtttttatttttaatttttgttttattagtttggatcgttatttgtttattttttcgtcgttgcgttataagttgcgtatgacgtttttgcgtgttttggttttagttttgggcgtttggagtttcgtcgttttcgttttttttttgtttttgttgttgggttggtacgagttgggttacgtacggttattcgtttttggttagtgtcgtttgttggttagtttgttttttgtttttgtggcgtcgggttttattttttttttgttttcgggtgttatatgttttatttattgtaggattttgttagttgttcgtaagtaggtcgtgtaggtggttttttttattatcggtatggttagttaggtttcggagacgttgtaggtatttggggtgcgtagggagattcgggttgtgggatagagaggaatgagtagtttttggggattttttgggtatttttatttagtatatatttgtttatggttttgcgtggttgttgtgagcgtttattttttttttgaattttagagttaatgtttgatttatttattataggatagtttcgttaggatttgggggtaggttttttttaggtattatgtataatagggaatttatggtggtttaattttttttatttttgtttttttggttttttttattatggtaaatggtattattgcggtattatatgttaggaatttaggaatattttttttttttatttttatgttatttattagcgagatttgttggcgttgttttaaataggtgttattttttttgttattttttatcggggaggttgtgtagattttttttggtttttttgtttttgtcgtagatttagtattttttattttttgtatagaagttggagtatttaaaaaagaagtgattatgttatttttttgttttagattttttaggttttttatcgtgttttagataaagaaaatttgttttaggatttggttttaggattttatattgttattttttttagtgttatttttttttttttttttttttattttgtaatagttttgtggttttttttacggttttagaaggtattgggtttatttttgtgtttaggtttttgtatttgttgttttttgtgtttggaatgtttttttttcggttgttttttttttaggggttatttttgattattttatttgtaggtttatttgtattttttatttttgttattttttataagaataagttataaaaatgatttgtttattttgtttttttgatttgaatataagttttaggagggttatatatattgagattagtttttttgtttttttttttgtttttgtttttgttttttttgagacggagtttcgttttgttgtttaggttggagggtagtggtgcgattttggtttattgtaatttttgttttatgggtttaagcgatttttttgttttagttttttgagtagttgggattataggtatttattattatattaggttaatttttgtatttttggtagagatggggttttattatattggttaggttggttttgaatttttgatcgaggttagttttgatttttattgtgtatagtaggttttattttgttttagtgtttgggaatggggtaggtgtttttagtttaaggttttgtattgtttataagtgagtgtttgtttttgttatttaggttatagtgtatttgatttttattgattttttggaggggtgggtgtgtagatcgattaggtttgagatttagtgatttaggtcgtaggttttgaggaaagttttagttgggtttttttggtgtagttttgagtggtgaaagttttaggagggtgggggttgtattggaggttattgggtatatggggatttggtagaggggtgaaaggttaatattttttttggtagttttttagataagtttgtttgttttatttaggtgggtgaggtttaaagttgtttttgtttattatttggggtgggggtagggttttatatggattgggagttttggttgtcgtttagttttttttttttatttttgttttttgtagaatatttttgagttttggtaggtggttgggattttgatttgtttttttaggggtgggatggttgttttaggttatatattttgggtttttgttttttgttgttgttattgttgttttttaagagatagggttttgttttgttatttaggttggagggttggaatgtagtggcgtgattatagtttattgtagtttagaattgattatagtttattttagtttgaagagttggtatgtattggttcgattataatttattgaatttttgggtttaagcgatttttttgttttggttttttaaagtgttagggttataggtttttttgggtttttgaaaaggagtgttttataagttttaggtatttaagaattgtttgcggatattttttttaatgttttttttattattatttttatattttaagttatttaatttatatgtatttggtattttatttatttatttattagatatagggttttattatattgtttaggttggtttcgagtttttattttagtttttcgagtagttggaattgtaggtgtatgttttcgtgtttggtatttttgatattttttttaaattattttttttatatttttatttttataaatttgtgtagaaagaaaatttcgtattttttttagaaatggaaaatttgtattttttgttataaatagaaggtgattataaatattattttagtgaaattgaagaagttttagttttattattgaaatgtagtttggtgtggttgaggtgatgagtttagggtttgttttttttttgtagcgtgttagaaggtattataaatatggtagtattaacgtgggatttttttttgacgtatttagaagagttggaagatagttgtaatgggttgacgtgtttattttgtgatttatttattttatggggtgtttttttattatttaaaattatttttatttttatagtttaggaagttttgttttcgtgattaaggatgtgagaagttggttggtttgggtgaggttggggcgggagagattaggatttttagttgtagcggtgttagtattatatagattttttttttatgaatttcgttggttggtattaggattgaatttgagtttgtggttttggaatttgggtaggagttttttaggtgttaatagttgtagttttataatttgtgagtatttattttgtattaggtattgagttaaatttattaattttttaaatatttaatgagttaagtattattagtatttttgttagataggtggggaaattgaggtttagagcgagaggtgatttgtttaagattgtatagttggtaagtgaggtttaagttcggatttggttggtgttatcgttttgtgttggtgtgttgtttgtgggtagtgatgtttttgaaatgttttgttcggggattttatattttgtttttttttttttttgtgttttttggttttttttgttgggtttttttgattcgtttgagttatggtatttttagtttttagttttcggagtatttcgttttttttttatatttgtttcgttagtgattttattttgtttcgtaattgaaaatattatttatacgttgatgattttttatttgggttgtttataggtacgtgttgttacgtttagttaatttttgtatttttagtagagatagggttttattatgttggttaggttggtttcgaatttttgattttacgtgatttgttagtttcggttttttaaagtgttgggattataggcgtgagttattgcgtttggttttgattttttgatttcgtttttttttttttttaatttttcgtagtggttttaatgattttttttataatgtagtttttgttgtattatttttttgttttggtagttttgtgttttatattatttggttttttgattttatttggttttttttttttttataattttgtttgtttttttttttttagttatattggtttttttgttgttttttgaatatattaagtttattttgttttatttgcggttttttttgtttggagtgttttttttttaggtttttattttgtttttttattaatttttattatttttttttagtttttgttgaattgttttttttaattttttttttaagagtagtattttttattttttttaggttttttttagtttttattttttaagttattttttttagtagtattttttattttttgacgtgttttatatttatttatttttatttatttattgtttattttttttttttagaatttaggtttatgagggtggggaatttgtttttttgtttttttttttttttttgagatagagttttattttttcgtttaggttggagtgtagtggcgtgattttggtttattgtaattttcgttttttaggtttaagtaatttttttgttttagttttcggagtagttgggttataggtgtatatcgttatatcgggttaattttttgtattttagtagagatggggttttattgtgttgtttaggttggttttgaaattttgagtttaggtaatttattcgttttggttttttaaagtgttaggattataggcgtgagttattatgtttggtttgtttttttgtttttttttatggttttaggaattaggggtatttggtatattatgggtgtttagtatgtattgatggaaggaatgtagtgtatatagtgttttagggagtttggtattttagttttgtttgtgcggttgtttgtttttttatgttttttagagttattttttgagtgttatgattttgaattttttatcgtgtgaatttatttgtttggtgatatgtattgatatttgttttgtatagtagttgttttaggttgtgtatgtagtggtgaacgagattaatagtgtttgtttttttgaaatttgttttagttaggagtatagatattaattattaaattgtattacgatgaggattatggagtttataggagggatgttttatttagtaaatatttaaaatttattatttattgtgtatgtttgaagatgaaagtaaagtatttatattaagttttaaagtgaaaggttggaggggtttttatgggttggttaggttagcgttttatttttaaggtagagtgatttaggggttttttaagttagaaatgtgtttgttttaattttttcgttttttggaaagtttatttttttggtttgaacgtgacgtgtgtaaattttgtttttgtttttgtttttaaatttattcggttttttaagtaagttttttgtaggtcgtttttttgattgtttggtgaacggtttgtattttgggaaaatgtatttgagaaattgtattggtttttttgggttatcgtttttttttttttattagagttggtttggaggtggaggtttttttaatgtttggatttaaaggaagtgatgagaatgaattagatgtgggtgttttggattttttttttttttttgtgtttagttttatttagttttggttttttgttttattttattttttagtttttttgtagagggaaaggagttgggtataggtttcgaggttttagtttttttggggttagaatatgggagttggttagttttgagtattttattttttttttatatgtttatttatggaaatgggtttttaaaaggttattggttggtttagtgatttttattaggtttttttattattttagggttgggaggaaggggttttgtttagtattgtggttgggagtgtgggttggggatggaggaagagtcgtggggtagagtgaggagttattagggtaggggagtgtgtgtgttgggagtagggtggaaggtgggggtttggatgtgggtggtattgagttatttttgggagattgtggagggtttagggtgttaggggtagttttagagatgtagtatgggttattggtttgagggagagtttagtaggagaggtttagtttttttttttttttggtaggatttttgggtttttgtggtttataattttattttatttttatattttatttttttttttatttttatttattttttttttttttagtttttatgttttttttttgtgtgtttcgtttttttttttttttttttttgttttattaatttttttcgttttttttttttttttttttttttttatttttttttatttaattaagcgttattttgttttagtgatttatttttttttttatttttgtttttttttttttttagaggaggaggttgtgattatagaaatatttgtgagggggaggagggggtcgagttagggagaggttggtagagtgatattgtcgagtatggtaggtttggttgttgtttagagttaggtagtttggtgtagttagggttggagtaggagtttgggggtttggttggttagggtttaagttttgttttttttgttttatagttggacgattttgggtaaggtattttatttttttatgttttaggggttatgatatttattatataagtttgtttgaagagttaattagataatatatataaaatattaggtatatagtaagtgtttaataaattttagttaggtagtgatttataattgtaattttaatattttgggaggttaaggtaggaggattttttgaagttaggagttcgagattagtttgggtaatatagcgagtttttgtttttaaaaatatatataaaaaattagttaggtttggtggtatatatttttagttatagttattcgaagaggttgaggtgagaggattgtttgagtttaggtaatagagtaagattttatttttaaaataataataatagttgttcgtgtttttttttttttgttgttggtaaaatatgtttttggggagtttattattttgattttttttagggaaaaatattattgttgttattagtattattattattattattaaatagttgagttagagattaataataatgataataatagttaatatttttatgggattttttatgtgttggtattgttttaatttttagtgtattattttattttatttttattataattttatgaggtagatgttattttagtgttattttatagaatagaaagtggaagtatagatgaagtaatttgtttaaggttattttattagtttgtaatagagttaggatttgaaattaggtagtttggttttagagtttgttttgtaatttttatattatgattagatgatggtaataaaatttaattgtgggttgggcgtggtggtttacgtttgtaattttagtattttgggaggtcgaggtgggtggattatttgagatcgggagtttgagattaatatggagaaattttatttttattaaggtataaaattagatgggtatggtggtgtatatttgtagttttagttatttgggaggttgaggtaggagaatcgtttgaattcgggaggtagaggttgtggtgagtcgagatcgcgttattgtattttagtttgggtaataagagcgagatttcgttttaaaaaataaataaataaataaataaaattaattgtataaaggaatatataaatatattttaaaaatttaataatagggatgaaggaaaagatttttaaattttagttaattattttttatttttagggatatgtattaatttaggatatgtttttttaggtttttttttttttttttttttttgttaggatagagtgttattttgttatttaggttggagtgtagtggtataattacggtttattgtagttttgattttttttgatttaggtgatttttttacgttaattttcggagtagttggggttatagacgtatattattatgtttggttaatttttgtattttttgtagagatggggttttattatgttgtttaggttggttttgaatttttggatttaagtaatttatttgtttcggttttttaaagtgttgggattataggtgtgagttattgtatttagttttttcgggttattttttatgtgtttatgtatttatataggtatttaaagaaatttggtgttttgtgttggatattgttttttaaataaataggattatgttgtatttattattttgtaatttgttattataatttaataattatggagatttttttatttgattgatttatttttttaaaatatttgtgtagtattttgtagtgggaatttatcgtggtttatttaagttattttttttttttttttttttttttttgagataaatttttattttgttatttaggttggagtgtggtggtgtgatttcggtttattgtagtttttattttttgggtttaagtgatttttttgttttagttttttgagtagtgggattataggtatgtattattatatttggttaatttttttatttttagtagagatagggttttgttatgttggttaggttggtttcgaattattgattttaagtgatttgtttattttggttttttaaagggttgagattataggcgtgagttattgtgtttagtttaaattattttttttttgatggatattaaggttgtttttaatttttttttattataagtagtgttgtgggatatatttttggatatgtgaagcgtgtagatatgaatgtaggtgttggttggaagttgtatgtgtgattgttggttggaagggttttggattgttttttaggaagttgttttttgatattgatatagaagggagatgtaaacgataggatatggttttaaggggttgcgaggtgtttatgggggagagagaatttagaagggtgatgttagtattagttagatgtcggggtgtggattagtgatagttattggtttttgttttatgagggttttttgttgatagtggtggggtttttgtaattttatttgattgggtttatggatgtcgtttttaaaggtggaagtagtttggtgaagtgggtagagtggtgtttttgaggttagaaatgatggaatttttaatttaatttttaattgttgtgtgatttttggtaagttattttgttttttcgagttttagttgttttatttgtaaaatggggatgataatgtttattttttataaagattgaatgatttaatgattattaaatgttgatgtgtagtaagtgttcgagaaatggggatgataatgttgatttgtttagggttatttaggttttggttggaggttttgtattggaatagtgtgattttgggaagggtagagtgttttttattttttttgagttttagtttttttttttttttttttttttttgtgtttttgagttaattttttggaaagtagaggagaaagaaaaatttggagttgtttttagggagattagaaagggaattttagtttatttttattttattttttggagtttttttttttaatgattgatttgagatattttttttagtgttttagttttttttatgttttagagttgtgataagattagggttatttttttttttttgttttttttaggttattaagggttagagcgatgtttggatgagatagtgttttatttttttttatgtcgtttatttttattgatggtagtaatttgaaggtgtggtaggttttaggagatttttttggggaagtaggagtttttttttttaggttgattatggtgtggttataaaagttatatagagtttattttggaggagagaaaattagaagaggagagaggagagtaaaatttttttttatttttttgttaatttggaatgattttggagtagattcgtgtatgatggggtggagtcggaggagagtattttttagttatagtatttgagtcgtagcgtggtgatttagagtatttgttttggtgtttgtgttgttttggggaggttagagttgttggtagaaggataggttttttaatagtgtttaaaattattttaattttataatatatattattgaaatagtaatatggttattaggtatttagtatttatttaacgttagattttgtgtatgtatttattatttatagttttatagcgacgtcgtaagttgagtattattttttttattttgtagatgtggaaatagaggtttttttaagattatagagcgagtaagtggtagaggttattttgatttgaagttagattatttgttttaaaagtttaggttttgtttttgtataatgttgttttattaagatagaagggagaaattaaggtttttgttgtgaatttgtataattttgatatttgtataattagattttatgtgaagaaatacgttgaggggtggggattacgatgtgtttcgtttttttgttttagtaatttttttgttattttagaattagaattttagtttttatgaaaagatcgcgtgtagttggggttttagtattatggataagatattaattttggaggtttagaaagagtcggggttggaggagagggtatgcgtagtagagtggggtggggtgttggttttggtgttttttggagttgatatattttggttttgtttttttcgtttttttatttgcggaaggttgtttgggaatttggttttgtttttgtttttttttgattttatttttttatatttaatttatttttggtttcgagaattaagtagggtttttacgtaatttaggaattggataaattttagtgtcgggaaaatttttggttgttaaagtttagatgtatttatagatcgtaaatatattttttgcgtagtttatgatgaattgtgtatattattgtttacgggtattaaatagtaaatagaggtgggtttaattttgtgtaaatttaatatatgaaaatttacgttgattatagaaatatatggtttagaggagggttttatattttagtttttacggatttttaggggtttttggtggaaatttagagattttaaggttatttttgaattttttggaagtgtgaaacgttgtttttttgtttgtgtgtgtgtgtgtaaaaatttataagttttttattttttggggagaggtttgtgtgtgtgtgtgtgtgtgtgtgagattttattagatttttaaaaggtttatgaagtttaataagtgaagagtattgttgagttaaagaatgatttagtttagagagttttttgggattgtgggggttagtttgtaaagttaaattttaattttttcgggtttatgttttttttttagtggttgttgggaagtagttttttttttttttttttttttattttttttttttttttttgtttatttttgagaatggagatgtttgttagttcgtagtataattgagttataaaatgttaaggtaattagtatttttaggagtttattaagagatttagttgtaaatattggttttgtgtatatatttttaaaaaagtttttttattttgtggggtttaagagtaattgtttaggtaagattattgtttttaaatgtgaagataatttatatataaagtaattgttaagttttggatagtaataggtttttttttttaagtattgtttaattgtaattgattttgtgtgtgtttgtgtgtgtgatagagtttcgttttgttatttaggtttggagtgtagtgatgtgagtttggtatattgtaatttttattttttgggtttaagtaatttttttgttttagttttttgagtagttgggattataggtgtttgttattacgtttggttaatttttgtatttttagtagaggtaaggttttattttgttggttaggttggttttaaatttttgattttaagtgatttgtttgtttcggttttttaaagtgttgggattataggcgtgagttattgtgtttagttaattgtaattgatttttgtagcgttaaaggttttggaaggtgttgggtttattgtaatgtgtgtgttggtttgtgttacgtattgtttttgtagggatggttgtttttttgaattatttgatttgtgttttaggtattgttttgttttattgtattttttagagttttttatgaaattttgggttagggttagggtttagtgtgggattaggattagagtttagtttaggtttatagttgaggtttggtttgagaatttggttatgtagggttttatggtaggtgttagggtttagtggggggttaaggttagggtttggtttattgttgatgttagggtttggtttggagttagggttagggtttagtttaggattttagttgggatttagttaaggaatagggtttagtttaattttggtattagggtttagtttagaattaggattgaagtttagtttgtggttaggattagggttagacgggggtttttttttaacggatttatgtggttttttttttcgtagg

SEQ ID NO: 936 - DNA, 18281 bp, Artificial Sequence
  chemically treated genomic DNA (Homo sapiens)
tttgcggaaaggaaggttatatgagttcgttgagaaagggttttcgtttgattttgattttagttatagattgagttttaattttaattttagattgagttttagtgttaggattaaattgggttttgttttttgattgagttttaattagagttttagattgagttttgattttgattttaggttaagttttgatattagtaataaattaagttttgattttggttttttattgaattttgatatttattataaagttttatataattaagtttttaaattaagttttaattgtggatttagattgagttttgattttggttttatattgagttttgattttgatttagaattttataaggagttttaggaagtgtagtgagatagagtaatatttgaaatataaattagatggtttagaagaataattatttttgtaaagataatacgtgatataggttaatatatatattataatgagtttagtattttttaaagtttttagcgttatagaaattaattgtaattgattgggtatagtggtttacgtttgtaattttagtattttgggaggtcgaggtaggtagattatttgaggttaggagtttgagattagtttggttaatagggtgaaattttgtttttattaaaaatataaaaattagttaggcgtggtggtaggtatttgtaattttagttatttaggagattgaggtaggagaattgtttgaatttaggaggtggaggttgtagtgtgttaagtttatattattgtattttaagtttgggtgatagagcgagattttgttatatatatagatatatataaaattaattgtaattgaatagtatttgaaaaagaggatttgttattgtttagagtttggtaattgttttgtatgtggattgtttttatatttgggagtaatagttttgtttgggtaattatttttgagttttataaaatagaaaggtttttttgagaatgtgtgtatagagttaatgtttgtagttaaattttttaataggtttttaaggatgttggttattttggtattttatagtttaattatattgcgaattggtaggtatttttatttttaaaagtggataggaagaggaggaaggggtaggagggaggaagagaaagaagttattttttagtagttattgaaaggaaggtatgggttcggggaggttagaatttgattttgtaaattggtttttatagttttaaagggttttttgagttggattattttttagtttagtagtgttttttatttgttaaattttatgagttttttgaaaatttaatgaaattttatatatatatatatatatatataaatttttttttagaaaataaaaggtttgtaaatttttatatatatatatatagataagaaaataacgttttatatttttagaaggtttagagatgattttgaagtttttaggtttttattagaaatttttaggagttcgtgaaagttgggatgtgaagtttttttttaaattatgtgtttttgtaattaacgtggatttttatatattagatttatataaaattaggtttatttttatttattatttaatgttcgtgggtagtggtgtgtataatttattatgagttacgtaaagggtgtgtttgcggtttgtgaatatatttgggttttgatagttagggattttttcggtattgggatttgtttagtttttaaattgcgtgagagttttgtttagttttcgaggttagaggtgggttggatatggggagatgaggttagaaggaggtaggagtagagttagatttttaggtaatttttcgtagatggaaaggcggaggaggtaaagttaagatgtgttaattttagggagtattaaagttaatattttattttattttgttgcgtatgtttttttttttagtttcggttttttttaggtttttagagttggtgttttgtttatggtgttgaaattttaattatacgcggtttttttatagaagttggaattttaattttgaaatggtaaggaggttgttggggtagggagacgaagtatatcgtaatttttattttttaacgtgtttttttatatgaaatttggttgtataaatattaaggttatataaatttataatagaggttttggttttttttttttgttttggtgagatagtattgtatagaggtaaaatttgggtttttaagataggtgatttggttttaaattaaagtggtttttattatttattcgttttgtgattttgagagagtttttgtttttatatttgtaaaatgggagaaatgatatttagtttacggcgtcgttgtgaagttatggataataaatgtatgtatagagtttgacgttgagtaggtgttaaatatttggtagttatgttgttgttttagtgatatgtgttgtgaggttggggtgattttgagtattgttggggagtttgtttttttgttagtagttttggtttttttaaagtagtatagatattaagataaatgttttgagttattacgttgcggtttagatgttatgattagaggatgttttttttcgattttattttattatatacgagtttgttttaaagttattttaagttagtaagggagtaaaagagggttttatttttttttttttttttttagtttttttttttttagagtggattttatatggtttttgtgattatattatggttagtttggaggaagaggtttttgtttttttaaaagaattttttaagatttgttatatttttaaattgttgttattaatgggaatagacggtatggagagggatgagatattgttttatttaggtatcgttttgatttttagtgatttgaggagggtaggggagaggaggtagttttgattttattatagttttagggtatgggggaaattgaggtattagggggaatattttaggttaattattgggggaaggagttttagagaatggggtgaagatgaattgagattttttttttagtttttttgggaataattttaggttttttttttttttttgttttttagagagttgatttaagaatatagggaagaggaaagagagaaggaaattgaggtttagaaagggtagaggatattttattttttttaaggttatattgttttagtataaggtttttaattaaaatttgagtggttttgaataaattagtattattatttttatttttcgagtatttattatatattagtatttgatagttattaggttatttagtttttatgagaggtaggtattgttatttttattttgtagatgagataattgaggttcggagaggtaaaatgatttgttagaagttatatagtagttaagagttgagttagggattttattatttttggttttaggaatattattttgtttattttattaagttgtttttatttttggagacggtatttatgggtttagttaggtggggttatagaaattttattattgttagtaagaggtttttatggagtagaagttaatggttgttattagtttatatttcggtatttggttgatgttggtattatttttttggatttttttttttttataagtatttcgtagttttttggggttatgttttgtcgtttgtattttttttttgtattagtgttagagggtagttttttgaaggataatttagggtttttttagttaataattatatatatagtttttagttaatatttatatttatgtttgtacgttttatatatttaagaatgtgttttatagtattatttgtgataggaaaaaattggaaatagttttaatgtttattaaaagaagagtggtttaggttgggtatagtggtttacgtttataattttagttttttgggaggttaaggtgggtagattatttgaggttagtagttcgagattagtttggttaatatggtaaaattttgtttttgttaaaaataaaaaaattagttaggtgtggtggtgtatgtttgtagttttattatttaggaggttgaggtaggagaattatttgaatttaggaggtggaggttgtagtgagtcgagattatattattatattttagtttgggtgatagagtgagagtttgttttaaaaaaaaaaaaaaaaaagagaagagtggtttaaataaattacggtgaatttttattatagaatattatatagatgttttaaaagaatgaattaattaaatgaaaagatttttatgattattaaattataatagtaggttgtaaagtaatagatatagtatgattttatttgtttaaaaaataatatttaatataaagtattaagtttttttaagtatttgtataaatatataagtatatagaaaatgattcggaagggttaggtgtagtggtttatatttgtaattttagtattttgggaggtcgaggtaggtggattgtttgagtttaggagtttaagattagtttgggtagtatggtgaaattttatttttataaaaaatataaaaattagttaggtatggtgatgtgcgtttgtagttttagttatttcggaggttgacgtgggaggattatttgagttagaagaggttaaggttgtagtgagtcgtggttgtattattgtattttagtttgggtgatagagtgatattttgttttaatagaaaaaaaaaaaaaaaaaaagatttagaaggatatattttaaattgatgtatgtttttgggagtgaaaggtgattagttggaatttggaggtttttttttttatttttattgttgaatttttaaagtgtatttatgtatttttttgtgtaattaattttatttatttatttatttattttttgagacgaagtttcgtttttgttgtttaggttggagtgtaatggcgcgatttcggtttattataatttttgtttttcgggtttaagcgatttttttgttttagttttttaagtagttgggattataggtgtgtattattatgtttatttaattttgtattttagtagagatggggtttttttatgttagttttaaattttcgattttaggtgatttatttatttcggttttttaaagtgttgggattataggcgtgagttattacgtttagtttataattaaattttgttattattatttgattatagtgtgagagttataagatagattttggagttagattgtttggttttaaattttggttttgttataaattagtggagtgattttaagtaagttattttatttatgtttttattttttgttttgtaaaatggtattaaaatagtatttattttataggattataataaggataaaataaaataatatattgaaagttagaatagtgttagtatataggaagttttatagaagtgttagttattgttgttattattattagtttttggtttagttgtttgataatgatggtgatggtgttggtgatagtagtgatgtttttttttagaaagggttaaggtggtgagttttttagaaatatattttattaataataggaaaagagaggtacgaataattattgttgttgttttaaagatggggttttgttttgttgtttgggtttaagtaatttttttattttagttttttcgaatagttgtaattaaaggtatgtgttattaggtttggttaattttttatatatatttttagagataggagttcgttatgttgtttaggttggtttcgaatttttagttttaaagaatttttttgttttggttttttaaagtgttgggattatagttgtgagttattgtttagttgaaatttgttgagtatttattatgtgtttggtattttatgtatattatttaattgattttttaaatagatttgtgtgatagatgttatgatttttggagtataaggaggtaaaatgttttgtttaagatcgtttagttatgaggtaaaagaggtagggtttgaattttaattagttagatttttaagtttttgttttagttttggttgtattaggttgtttggttttgagtagtagttaagtttgttatgttcggtagtgttattttgttagtttttttttggttcggttttttttttttttttatagatatttttgtgattatagtttttttttttgaggaggaggaaagatagagatggaagggaagatggattattaagatagaatgacgtttagttgggtgagagagggtgaaaaaaggagggggaggaggaaaagcgggagaaattgatgggataggagaagggggaggggaagacggggtatatagaaggaagatatgggaattgaaggagagaaggatggatgggagtggggaggaaggtgaggtgtagagatgggatgaggttatggattatagagatttagaaattttgttaggaagaggaggaggttgggttttttttgttgggtttttttttaagttagtggtttatgttgtatttttgaaattgtttttaatattttggattttttataattttttaaggatggtttagtgttatttatatttaggtttttattttttattttgtttttaatatatatatttttttgttttggtagttttttattttgttttacggttttttttttatttttagtttatatttttagttatagtgttaagtaggattttttttttttagttttgaggtggtgggaagatttagtggaaattattaagttaattagtggttttttaaaagtttatttttataaatagatatatggagaggggatgaaatgtttaaggttgattagtttttatgttttgattttagaggaattggggtttcgagatttatgtttagtttttttttttttgtagggaagttagagagtggaatggggtaggaagttaaggttaagtggggttgggtataggaaaagggaaggggtttaagatatttatatttgatttatttttattattttttttaggtttaaatattgagggggtttttatttttaggttagttttggtgggaagaaagaggcggtgatttaggagggttaatgtaattttttagatgtatttttttaaagtgtaggtcgtttattaggtaattaggaaaacggtttgtaggaggtttatttaaggagtcgagtggatttgaaagtaggaatagaggtagaatttgtatacgttacgtttaaattaagagaatgggttttttagaaagcggggggattagaatagatatatttttggtttgagaggtttttgagttattttgttttagaagtaaggcgttggtttaattaatttatgaagatttttttagttttttattttagggtttggtgtgagtgttttgtttttatttttaaatatatatagtgaataatagattttgaatgtttgttgggtgaagtattttttttataagttttataatttttatcgtggtatagtttgatgattaatgtttgtatttttaattagaatagattttaagagggtaggtattgttggtttcgtttattattatatatatagtttagaatagttgttgtgtaaagtaggtgttaatatatgttattaagtaaatgaatttatacgataaaaagtttaggattatgatatttaagaagtgattttgaaaggtatgagaaaataggtaatcgtataaatagggttggaatattaggttttttgaagtattgtgtatattgtattttttttattaatatatattgagtatttatgatgtgttaggtgtttttaatttttgggattatgggggaaaatagaaagataggttaggtatggtagtttacgtttgtaattttagtattttggaaagttaaggcgggtggattgtttgagtttagggttttaagattagtttgggtaatatagtgaaattttatttttattaaaatataaaaaattagttcggtgtggcgatgtgtatttatagtttagttatttcggaggttgaggtaggagaattgtttgaatttgggaagcggaggttgtagtgggttaagattacgttattgtattttagtttgggcgagaaagtgagattttgttttaaaaaaaaaaaaaaaggtagaaaaataagttttttatttttataggtttaaattttagaagaaggaaataaatagtaaataaataaaaatgggtaggtatagaatacgttagggggtaggaggtgttgttgagagaaataatttaggaaatgaggattggagaggatttggggagggtgagaggtgttatttttgagagagggattaggggaggtaatttaatagaggttggaaggaaatgatggaaattagtgggagaatagggtggagatttgaagaaagggtattttaagtagaaggaatcgtaagtgaggtagaatgggtttggtgtgtttaaggaatagtaaggaggttagtatggttgaaagagaagaaataagtaggattatagaaggagaggaggttagatagggttagagggttaggtgatgtgagatataaggttgttagagtagaggaatgatgtagtaggaattgtattgtaaaggggattattggggttattgcggaaggttgaaagggaggaagagcggaattaggaagttagggttaggcgtagtggtttacgtttgtaattttagtattttgggaggtcgaggttagtagattacgtaaggttaggagttcgagattagtttggttaatatggtgaaattttgtttttattaaaaatataaaaattagttgggcgtggtagtacgtgtttgtaagtagtttaggtaggaagttattagcgtgtgggtggtatttttagttacgagataagatgaggttattaacggggtaaatgtggaaaaaggacgagatgtttcgaggattgaggattagggatgttatggtttaggcggattaggaggatttaatagagaagattagaaggtatagagaagaaaaggggtaaggtgtggggttttcgagtaaagtattttaagagtattattgtttataggtagtatattagtatagggcgatggtattagttagattcgagtttaaattttatttattaattgtgtaattttgggtaagttatttttcgttttgagttttagtttttttatttgtttaataggggtgttggtagtatttgatttattgggtgtttggggaattaataagtttagtttagtgtttggtatagagtgagtgtttatagattgtggggttgtagttgttagtatttgggagatttttgtttaggttttaagattatagatttaggtttaattttagtattagttagcgagatttatggaaagaaaatttgtgtggtattggtatcgttgtaattaggaattttgatttttttcgttttaattttatttagattagttaattttttatatttttagttacgagagtagagttttttgaattgtgggaatggagatgattttagatggtaaagggatattttataaaatgagtgaattatagagtgagtacgttagtttattatagttgttttttagtttttttaggtgcgttaagagaaagttttacgttgatgttattatgtttgtaatattttttagtacgttataaagagaaagtaggttttaggtttattattttaattatattaagttgtattttagtgatagggttggagtttttttagttttattgaagtggtgtttgtgattattttttatttatggtaaaggatatagattttttatttttagaggagatacgaagttttttttttatataaatttgtggaagtaaaaatataaaagagatgatttaaagaaaatgttaagaatgttaggtacgggggtatgtatttgtaattttagttattcgggaggttgaagtgggagttcgaggttagtttgggtaatatagtgagattttgtgtttaataaataaataaataaaatgttaagtgtatgtgaattaagtggtttaaggtgtggaggtggtggtggaagaggtattaaggaagatattcgtaggtagtttttgaatgtttgaagtttgtgaaatatttttttttaagaatttagggaagtttgtaattttagtattttgggaggttaagataggaggatcgtttgagtttaagagtttagtgagttatgatcgggttagtgtatattagttttttaggttggaatgagttatgattaattttaagttgtagtgagttataattacgttattatattttagttttttagtttgggtgatagagtaagattttgttttttaaaaaataataataataataataaaaagtaagaatttagggtatatggtttaaggtagttattttatttttgaagaagtaagttagagttttagttatttgttaagatttaagaatgttttatagggagtagggatagggagaaggagttgggcggtagttaggatttttagtttatgtggggttttgtttttattttaggtgataggtaggggtaattttgggttttatttatttgggtgggataggtaagtttgtttgggggattgttaaggagggtgttagttttttatttttttgttaagtttttatgtgtttagtgatttttaatgtaatttttatttttttagagtttttattatttagggttatattaaaagagtttagttgggattttttttaagatttgcgatttaagttattgggttttaggtttggtcggtttatatatttatttttttagggggttaataggagttaggtgtattgtggtttggatggtaagagtaggtatttatttatagataatgtaaggttttgagttaagagtatttattttatttttaggtattgaaataagatgggatttattatgtatagtggggattaaaattgatttcgattaggagtttaagattaatttggttaatatggtgaaattttatttttattaaaaatataaaagttagtttggtatagtggtgggtgtttgtaattttagttatttaggaggttgaggtagaagaatcgtttaaatttatgaggtagaggttgtagtgagttaagatcgtattattgttttttagtttgggtaatagagcgagatttcgttttaaaaaaaataaaaataaaaataaaaaaaaaagtaaaaaaattgattttaatatgtgtgatttttttggagtttatatttaagttagggaggtaaaatgaataagttatttttatgatttgtttttatggagaataatagggatggagagtgtagatgggtttgtagatagggtggttaaagatggtttttgggaagaaggtagtcgggggaagaatattttaggtatagggaatagtaagtgtaaagatttgggtatagaagtaagtttagtgttttttagaatcgtgagaaaggttataaggttgttgtagagtaagagagagggagaggggaggtgatattggagaggatggtagtgtgggattttgaggttagattttgagataggttttttttatttggagtacggtgggaagtttgaagagtttgaagtaggggagtgatatgattattttttttttaagtgttttagtttttatgtagaagatggagagtattgggtttgcggtagaagtaggggagttaggagaagtttatatagttttttcggtaggaagtggtaggggagatggtatttgtttagagtagcgttaataggtttcgttaatgaatggtatgagggtgagggagaaaagtatttttaagtttttggtatgtgatgtcgtaatggtgttatttgttatgatggggaagattagggaggtaaagatggggagagttgggttattataaattttttgttgtatatggtatttgggagaagtttgtttttaaattttgacggagttattttgtggtgggtgggttaggtattggttttggagtttagaagaaaggtgggcgtttataatagttacgtagggttatgagtaaatgtgtgttaagtggggatgtttagggggtttttaggggttgtttatttttttttattttatagttcgggtttttttgcgtattttaggtatttgtagcgttttcgaggtttgattggttatgtcggtggtgagggaggttatttgtacggtttgtttgcgggtagttagtaggattttgtagtaggtgaagtatatggtattcgagggtaggaagaaggtgaggttcgacgttataaggataaaaggtaggttggttagtaggcggtattggttagggacgggtggtcgtgcgtggtttagttcgtgttagtttagtagtaggggtaggaaggaggcgagagcggcgaggttttaggcgtttaggattagggttagggtacgtaggggcgttatgcgtagtttgtagcgtagcggcgagaggatgagtaggtagcggtttaggttgatgaggtagaggttgaggatggaggcgttgtagtatattacgtcgaaggcggtttagagtaggtagaggtcgcgcgttagtatttagcgttcgtatagcgcgtttagtatggtcggcggtattattattagttttattattaggttagacgtgaagagcgatattaggaagaagttggacgtgttgcgtagcgcgggttgagtgtagatgagcgcgattagtagcgagttggtcgtcgtcgttagcgcgatgattacgtatagcgcggtcgttatttagtcgttgtttttcggggtcgacggcggttttgttttttaggtcggggtgttattggcggttgggttcggttttgggattatgaggatcgagggtggacggtaagggagtgatagggtggcgggaaagtagatgagggtttcggcgaagcgtaggttggacggggatcgttcgtgagaatagatcgcgatttattacgtttttcgggggaggtgagtggggggatatgggcgggggcgttgggtcgcgttaggttagggggtagcgattataggaggatatagtgtggttatttgggcgttttcggggatggggtaggaatttttggagtaaacgggttggaagtttggggaggggtattcgatgagtcgaggtttttgaaggaagcggcgggaagttaagtagaggtcggatgggttttttggggtgggagtagagttttttggagggggcgggcggtaagataggggaggggcgttcggtcgggttagagtgcggggaagtgggaacgcggggaggtgggtgaggggggtgaatgggcgttttcgggtcggagtaggtttttcgcggtcggtgggcgtgtggggtattagggcgggggtttaggggtcggagtaaagtcgtttttgggaaaggtaggttttagttggcgcggaggtatcgggattcggcgtatacggtttgtgcggcgcgggggttcgtcggggtcgttaggtttcgcgggaagaggagggtagcggtcgcgcggcgttttttttttattcggtagtagggtcgttttcgtttttcgttcgtattggtatttggggcgttttggttgtttcgtcgtttgcgattgcggtaagcgtcgcggggttgcgagaggaagaggcggtcgcgggtcgggcgggcggcgggatcgggtttttcgagttcgggaggcgtcgcgaggggttcgtacgcgcggaggagaggtcgggtgtagtttggagcgcgcggttttcgcgtcgcggagcgtgcgtttcgtttcgcggtgggcggggagagtcgagttttggttttgtaggagggcggggtttcggtatttcgggtttgtgggtcgaagattagagcgttttagttgcgaggggttatttttcgggttgtggtagtttttatatttttagatgttttttttaatttatacgtggcggcggcgtaggcggaattgggagtagggggttgtgatttgtttttatttaggggttgttttttaatgggtgtttgtttatttataacggggttatcgggtttttaggggagttaggagttgggaaatattggataaatcgtttgatatttttttgggttttagttgttatatttgtaaaatgggttagtaattttgggtattttttatcgttagtttgagtaagaagttaattttttttagggtttttttcgtagaaattatttcgatttttaaaggggttaggtattaaggatgaagtttttgagttgttggcgtttttagtttaatagagcgtgaatagatttgagaatttttaggttaggtgtgttaagagtcgttgtaggtagaggcgtggggtgtggttttttttgggtgtgatttttttttgtacgttttttttttggttgagaagagtttttgtttaatattgttgtgtaggttaatattgttatttatttatttattgaatagatattttaatgtattttttaaggcgtatttattagatgttaggtattgttttgatttattaggatattatagtggttaaaataaagattcgtatttttatggagtttatattttagtggaagaaatagataataaataataagtataattaatagagaaagtgggtttagcgaggtggtttacgtttgtaattttagtattttgggaggcggaggtgggtagattatttgaggttaggagttcgagattagtttgattaatatggtaaaatttcgtttttattaaaaatataaaaattagttgggcgtggtggcgggagtttgtaattttagttattcgggaggttgaggtaggagaattgtttgaatttgggaggtagaggttttagtgagttaagattgtgttattgtatattttagtttgggtgatagagtaagattttgttaaaaaaaaaaaaaaaaaaaaaaaaaaaaaggaaagaaagaaagagagaaaggaaagaaagagaaagaaagaagagaaagagaaaaagaaaatgtagtataaagagaacggggtgggattattttttttttatagaaatagaaaaataatattttttaaatcgaaggtttttgcgttgtttttaggggttttgttgtacggtttttatttttttagttatttatttcgatttttataataatgttgagaggtagacgttaaattggggtttagagaggttaagggttttgttttagattattagtagtaagtggtgaagtggatttgaaatttagatttgttcgatgtttatggtaaagagagtttattatagatggttaaaaatttttttttaggtattttagagtttgtagtatttattcgttaattttaagttgttatttggtgtttagagttttagttttgtttatagaagtattttttaagtagatagaggaggtttgttttttttttttgttattatattgtattattgtgacgatttttgttatgtttttaaggaatagaacgtagtatagtaagtttgggtagagagttagaaatatatggtttgggattttcgttttattttagttttgggattatagggttagtggttttatttttttgggttatagtttttttttttgtaatagttagtagaataatatggtatttattttatagagtagttgaggggattaaatgatattgatgtaatttgtgtttttgatattatgttaatattagttggtcgggtatagtggtttacgtttgtaattttaatattttgggaggttaaggcgggtagattatttgaggttaggagttcgagattagtttggttaatatgatgaaatttcgtttttattaaaaatataaaattagttaggtgtagtgatgtacgtttataattttagttatttaggaggttgaggtaggagaattatttgaatttataaggtagaggttgtagtgagttgagattatattattgtattttagtttgggtaaaaatagcgaaattttatttaaaaaaaaaaaaaataaaaaaataaaaaaataaaaaaaaaatttagtttttggttttagtgtttttattagtataatcgtaatgtatttagttttgtgttaattttttgagtttagggatttttgacgtgaatagttgtaattttgagaggtgttgtgtggaaggattttggagtttagtattttgggtttattatttagagtttgttatttgttttgtgaagttgtgtaaagttttttaaattttttgttgttatgaaattaaggtagtggagttgtgaatgagatgagtaaaaaattttgtttgataaatgttgttttgtaaaaatttgtaggtagtgtatagaatattagtttttttgtttttattttttttataatatttgatattttttattttaaaaaaaagatttaaagattagttgagcgtggtggtgtacgattttagttttagttatttgtgagattgaggtgagaggattgtttgaggttaagtgtttaaggttgtagtgagttatgattatacgtgtgaatagttattgaattttagtttcggtgatagtgttttaaataaataaattaattaaagaaaatttggtaataattttaatatttgtttattttgggtgatggattcgttgatgtttgttataatgcgttttgtgttaaaatttaaaattttattttaagattgggttagggttatggtgttattttgtggttatattgttattattttgaatttgagatttttttttttttttttagagataagagtttcgttttgtggtttaggttggaggtagtgatgttattatagtttagtgtaatttcgtatttttgtgtttaagttatttttttattttagttttttaagtaggtaggattagaggtgtgcgttattatatttagttaaattttttaagttttttgtagagataaggttttgttgtattgtttaggttggttttaaatttttggttttaagtgatttttttgttttagttttttaaagtattagagttataggtatgaggttcgtatttggttgggatttttatagacgttttatgtgtgtttttttataattgttatttgggttatgaaataacgaagttttagattttttaatattttagggttggttaggcgcggtggtttacgtttgtaattttaggattttgggaggttgaggtgggcggattatgaggttaggagattaagattattttggttaatatagtgaaattttatttttattaaaaatgtaaaaaaattagtcgggtatggtggcgggcgtttgtagttttagttatttaggaggttgaggtaggagaatggcgtgaattcgggaggcggagtttgtagtgagtcgagattgtattattgtattttagtttggtcgatagcgtaagatttcgttttaaaaataaaataaaataaaaaataaataaaaaaaaattttagggtaaagagggatttttaagaatattcggtttttgtttgtttatttttagttatgagagttttttttttagaggagatagtaggtgttattatggaatagttgagttttagggagttatttgttttagatttttatgttcgttagtttataggggatcggggtaagttttttatgatagaggtggagaaattaaggttttagggaggttgttagtttgtttaaagttgttttgtgttagaaggtaattgaataattgggtaaattttttgaaggtaggtagggatttgtttgtttggtttacgttggatttttggtatatattaggtttttaataaatatttgtttagtgaatgaataaatgaataaaattattagtgtaatattttgtagcgtgggttaattatttatttttaattataataatagttgatatttattgaggttttattaaagttaggtatgtttcgagttttatatacgcgttgatttatataacgtttattgttattttaggagtgaggtaggtgtgattattattttttattttgtatataggaaaagtgagttttggagattttatgtgatttgtttaagattatagttaggtagtggtttagttaagatttgaatttaagtagatttaatttttttagaggtttggagtagaggaagaaaattagttgagagttggttttatataggtaaataaagtggaaagagagggatttgtgttgttatttgcgttgttattagtgttaattttttgtaaagattttaagttttaggttaggcgcggtggtttatttttgtaattttagtattttgggaggtcgaggtaggtagattacgaggttaagaaatggagattattttggttaatatggtg

SEQ ID NO: 937 - DNA, 6124 bp, Artificial Sequence
  chemically treated genomic DNA (Homo sapiens)
gtttcgaatttttgattttaggtgatttttttgttttggttttttaaagtgttgagattataggtgtgagttattgtatacggttttaaattttatttattatttatttatttatttatttagagatttagttttattttgttgtttaggttggagtgtagtggtatggtttcggtttattgtattttattttttgggtttacgttatttttttgttttagtttttcgagtagttgggattataggcgtttattattattttcggttaatttttgtatttttagtagagatggggttttattgtgttagttaggatagtttcgattttttgatttcgtgattcgtttgtttcggttttttaaagtgttgggattatttattttgttttttgtagagataggtttttattgtgttgtttaggttggttttgaatttttgattttaagtgatttttttattttagttttttaaagggttgggattataggggtgagttattgtattttattttttttttattttttgacggtttttttttgttatgaatgtgtatgtttagttgtttgttttttagaattgatatttattttttttatttattagttattggaggaggattgggatcgtttagattattgatttgatttattttttcggtagggttttttggtggttgttttttattattaaaattggaattagaagagtttttatagttttttttttttttttatatttttgttgaagtagagttttgaaaaataaaattataaattaagttattttttagaagaaatttgtaattaaagataagttttgtcgggtatagtggtttacgttttttggaggttaaggcgggcggattatttgaggttaggagttttagatttgttaggttaatatggtaaaattttatttttattaaaaatataaaaattagttagatgtggtggtgggtatttgtagttttagttatttgggaggttgaggtaagagaatcgtttgaatttgggaagtagaggttgtagtgagtcgagattgtattattgtattttagtttgggcgacggagtgagacgattttataaaaatttatataaataaaatgaaaagtaaaataaaaatataaaagttggtcgggtgcgtttgtttacgtttgtaattttagtattttgggagggtgaggtaggtagataatgaggtaagaagatcgagattattttggttaatacggtgaaattttgtttttattaaaaatataaaaaattagttgtgcgtggtgatacgtatttgtagttttagttatttgggaggttgaggtaggagaattatttgaatttgggaggtggaggttgtagtgagtcgagatcgtattattgtattttagtttgggttatagagtgagattttattttgaaaaaaaaaaaaaatataaaagttagttaggggtgttggtgggtgtttgtaattttagttatttgggaggttaaggtagaagaattttttgaatttaggaaacggaggttgtagtgagtcgagattatatttttgtattttagtttggataatagagcgagattttgttttaaaaaaaaaaaaaaaaaaaaaattaaataggtcgggagtagtggtttatgtttataattttagttttttgggaggttaaggtaggtggattatttgaggttaggagtttgagattaggttggttaatatggtgtaatttcgtttttattaaaaatataaaaattagtcgggtttggtggcgtatgtttgtaattttagttattcgggaggttgaggtaggagaattatttaaatttgggaggtaggggttgtagtgagttgagatcgtgttattgtattttagttagggtgatagagtgaaattttgttttaaaaaattaaaaaagaaatttagtaagtaatgagttaaggaattcgaatattaaggcgagtgataaggaacgtttaggatgtggtttaggatggagtaggggggatatttatttaggagaaagtttaggttataagataggaggagttagttttgttggggttgaagggaagagtattttaggttgagggaattgtaaggcgtttgtatgggatattatgggatggtttttgtttttggtgggtagtttttggtttgaggttattttttggtttgtttgattgtttggtaatcgggaggaagttttgttttttttggagatagaaataaaggtttaggaaatatttgttttttttttttttgaaaaacgtttaagggaacggaggattgggaggtgtcgtttttttttgttagtttgttttttattatagttattttatttttattttagaaagtgattcgttattttttaaaaggttcggattttgattaaggagttattttttttgttttagtatttttagttggtttagtttttaaaacggatgttaaatttagttttttttttaaggatattgtttagtttaggttttattattatttatttggattagaatagttatttttttttttattttttggttgtagtttttgaagttttaattgggtttttgtgaatatttgagttagggtaaggttttttttttgtttagaattttttatattttttatttcgttgggtataaaagttaaagttttggttaggtacggtggtttatatttgttattttagtattttgggaggttaaggggggcggattattagaggttaggagttagagattaatatggtgaaattttatttttattaaaaatataaaaattagttaggcgtggtgacgtatttttgtagtattagttattcggtaggttgaggtgggagaatcgtttgaatttgggaggtagagtttgtagtgagtcgagattatattattgtgttttagtttgggtgatagaacgagattggggtttagaaataaataaataaaataataaagttttttttaggtgataggaatttgtatttatttgttttgttatttttttgttcgttttttttttcgaattttttttttgttaagtttgttttagttatattgtttttttggttgtttttttttttttttttttttttttttttttgagttttatttttatttaggttggagtgtagtgtttttattttggtttattgtaattttcgtttgtcgggtttaagagatttttttgtattagttttttaagtaggtggaattataggtgtgtattattatattcggttaatttttgtattttgtatagagatgggggtttttttatgttgtttaggttggttttgaatttttgggtttaagtgatttttttatttcggttttttaaaatgttgggattataggtgggagtcgcgtttaggtggatttttgtttgattttgtttatttttgtgtttttagtatttggaaggacgttaagtatatagtaggcgtttaaaaaatattgagttatatgttgagaaaagaacggtattattgtggttgtaagtgggatttgggtcgcgcgggggagttcgcgtatttcgggtcggggtaagagtttagtggaattcgttcgaggaagaattcgtggcgtaggatttttttaggttttttgaggattaggggcgtttttcgttttattttgtgattttgtttaggtcgtttcggggcgggaatttagaattttttagttttttaagaaaaaaatattttcgtggaaattttttgggaatgatcgaggcgggggaaatatgcgtttttggatggttagtgattcgtagttttttttttcgataggaagggtttgcgcgttcggggatttttcgtttttttttttgttgcgcgatttttttggtttttcggagatttttatggcgacgtcgcgcgcgttttataataggaaagttttaggcggcgcggtttggtgttcggagatttaagagtatttagtttcgacgtggtggatgtcgagttttggggttatacgtataggcggtggttaagtaaatattcgtttatatttagtgtatgagtttgggttcgagttgtcggagtttcgcgcgtagggtaggggttcgagcgttttttttttttgtttcgtttttgcgtttgggggttgttgttttagttttttagcgataggtagggatttcgagcgttttttttttttttttcgttaagatttaagttagttgttttagttttttcgcggagtttgggacgttagcggaggggttcggcgcgtagggattacgtagttttttttttttttttgggagttgtaaagacgttttcgcggttaaggtcgaaaggggaagcgaggaggtcgtcggggtgagtgttttcgggtgtagagagaggacgtcgattttttcggacgtggtgagatcgcgtttcgttatttttacggttagcggtcgtcgggaggtgtttggttttgttttggtcgtttttcgagaaatgttcgtgttagttaggtgtggacgtgatttagggggaggggtattttttagtggagggagttcggggaggatttttgggtttttatttaggtagggggtttatttattcgattaaagaggtttgcgtaagttggagagggaggatttgagttcggattttttcgtagtttggagttttagtttatcgttttgtgaaatggatataataatagtttttatttttcggggaagttggtagtatttaaaagtatttaataaatcgtttagcgcggtgtagatcgtgatttaagtttagtttggtcgggaaacgggaggcgtggaggtcgggagtagttttcggggttatcgttttgttatcgtcgttcgattgttttagtttggaaatttcggagttgaagcggttagcgagggaggatgattttttcggttcgggtattttgttagttcggaaataattgtagtatttgtttcggaggggaaggcgcgaggttttcgggaaagtagtatcgttttttggtttttaggtggttagcgttataaaggattacgcgttttagtcgacgttgagtttttttgttatttagagttgtaattttagtttcgttatggtttttagtagttttcggttcgcgttgttcgtatttttggttttgttcggggttttgtttttaggtgagtcggggtggggattgtcgtcgggttagtttttcgaagtttcgggaggatcggttttcgggttaggttatgtatgtttaggtagttgtttatgggaaggaggggttagagatagcgattgaaaggtaatagttagtaggttcgaatttagattttgtatatttttacgtgtggttttgggttatagattgtagttttaaaaaagggtagggggttggagatggaggggaggggcgggtttcgttttgttgtttaggtcggttttgaatttcgggggtttagttttattttttgttttagtttttcgagtagttgggatgagaggtgtgaattatcgttttgtttggttagattgcgttttttatagttttttagttgtaaaacgggaaacgttatagcggttatttggtagggtattttggtttagcgtagtatttggttttaggattcgattatgatggtttgggaatttggttttgtgttaatttaataaggtttaagggatttttattttttttaagatgtatattttgttttttattttttttgtttttggggaagtttagggttgtttttatttgggggaattttagagttgatttattcgtggtttaaagttgagaagtgggacgttttagtatatttttttttagttttagtttagttagggaagagggaaggggttagagggttttttatggtggtgtaagtttggggaattaggagggtgggagattgatagtttggttaatagtttaataaagtttgagatttaggttagtacggtagtttatgttagtaattttaatattttaggagttttaggcgggcgaattatttaaggttaggagtttgagattagtttggttaatatggtaatatttcgtttttattaaaaatataaaaattagttggtatggtggtgggcgtttgtgattttagttgttcgggaggttgagggaggaaaattttttaagtttacgaggttgaggttgta

SEQ ID NO: 938 - DNA, 6124 bp, Artificial Sequence
  chemically treated genomic DNA (Homo sapiens)
tgtaattttagtttcgtgggtttaagggattttttttttttagtttttcgagtagttgggattataggcgtttattattatgttagttaatttttgtatttttagtagagacgggatgttgttatgttggttaggttggttttaaatttttgattttaagtgattcgttcgtttggggtttttaaagtgttgggattattggtatgaattatcgtgttggtttggattttaggttttgttgagttgttaattaagttgttaattttttatttttttggttttttaaatttatattattatgaaagattttttgatttttttttttttttttagttgggttggagttgggggagggtgtgttggggcgttttattttttagttttgggttacggataagttagttttggaatttttttaagtagaagtagttttggatttttttaggggtagagaggatgaggaatagaatatatattttgaggggggtgggggttttttaagttttgttgggttggtatagagttaagtttttaaattattatgatcgagttttggggttaggtgttgcgttgggttaagatattttgttaggtggtcgttataacgtttttcgttttatagttgagaaattgtaagagacgtaatttagttaagtaaggcggtggtttatattttttattttagttattcgggaggttgaggtaggaggtaaggttagattttcggagtttaagatcggtttgggtaataaaacgaggttcgttttttttttttatttttaattttttatttttttttaaagttgtaatttatagtttaaggttatacgtggaggtatgtagggtttggattcgaatttattggttgttgttttttaatcgttgtttttagttttttttttttataaatagttatttaagtatgtatgatttgattcgggagtcggttttttcggggtttcggagaattggttcgacggtaatttttatttcgatttatttgggaatagagtttcgagtaggattaggagtgcgggtagcgcgggtcgggggttgttgggagttatagcgaggttgaggttgtaattttgagtagtagaggagtttagcgtcgattggggcgcgtgattttttatagcgttagttatttgggggttaaggggcggtgttgttttttcggaaatttcgcgttttttttttcggaataaatgttgtagttattttcggattgatagggtgttcgggtcgagagggttattttttttcgttggtcgttttagtttcggaatttttaagttaaagtaatcgggcggcggtggtagggcgatgatttcgggggttgttttcggtttttacgtttttcgtttttcggttaggttaagtttgaattacggtttatatcgcgttaagcggtttattaagtatttttaaatattgttaattttttcggagagtggagattgttattgtgtttattttataaagcggtaaattgagattttaggttgcgagggggttcgaatttaagttttttttttttagtttacgtaggtttttttaatcgagtggatgagttttttgtttgggtgggggtttaggaatttttttcgggttttttttattgagggatgtttttttttttaggttacgtttatatttagttgatacgggtatttttcgagaagcggttagagtagagttaggtatttttcggcgatcgttaatcgtgggagtgacgaagcgcggttttattacgttcggggaaatcggcgttttttttttatattcgagggtatttatttcggcggttttttcgttttttttttcggttttggtcgcggaggcgtttttatagtttttagaaaaaggaaggaagttgcgtgatttttacgcgtcgagttttttcgttggcgttttaggtttcgcggggaaattgaggtagttagtttggattttgacgagggaggggagggggacgttcgaaatttttgtttgtcgttgggaaattgaggtagtagtttttaggcgtagaggcgaggtagggagaaggggcgttcgaatttttgttttacgcgcgaggtttcggtaattcgaatttaggtttatgtattaaatatgagcgggtgtttgtttggttatcgtttgtgcgtgtgattttaagattcgatatttattacgtcgaggttgggtatttttaagttttcgagtattaagtcgcgtcgtttaaggtttttttgttgtggggcgcgcgcggcgtcgttatggagattttcgaggggttagggaggtcgcgtagtagaaggggaagcgaagggttttcggacgcgtaggttttttttatcggggaagggggttgcgagttattggttatttagagacgtatatttttttcgtttcggttatttttaaggaatttttacggggatattttttttttggggggttgaggagttttgaattttcgtttcggaacggtttgagtaaagttatagggtgggacgggggacgtttttggtttttagaaggtttgggaaaattttgcgttacgggttttttttcgggcgggttttattgagtttttgtttcggttcgaggtgcgcgagttttttcgcgcggtttaagttttatttgtagttataatggtgtcgttttttttttaatatgtggtttaatgttttttaagcgtttattgtgtgtttggcgtttttttaggtattggggatataggaatgaatagagttagataaaaatttatttgggcgcggtttttatttgtaattttagtattttgggaggtcgagatgggaggattatttgagtttaggagtttaagattagtttgggtaatatagggagatttttatttttatgtaaaatataaaaattagtcgggtgtggtggtgtatatttgtaattttatttatttgggaggttgatgtaggagaattttttgaattcggtaggcggaggttgtagtgagttaagatagaggtattgtattttagtttgggtgagagtgagatttaaaaaaaaaaaaaaaaaaaaaaaaaaaggaatagttaggagaatagtgtggttggagtaggtttagtaaaggagagattcgaggagaggagcgggtagggagatgatagggtagataggtgtaagtttttgttatttgaggaggattttgttgttttgtttgtttgtttttgaattttagtttcgttttgttatttaggttggagtatagtggtgtgatttcggtttattgtaaattttgttttttaggtttaagcgatttttttattttagtttatcgagtagttggtattataggggtgcgttattacgtttagttaatttttgtatttttagtagagatggggttttattatgttggtttttaatttttgatttttagtgattcgttttttttggttttttaaagtgttgggataatagatgtgagttatcgtgtttggttaggattttggtttttatgtttagcgaggtgggaggtatagagggttttgagtagaggaaggattttgttttaatttaagtgtttataggggtttagttgaggttttaagagttgtagttaggagatgggagaggaggtgattgttttagtttagatgaatgatagtggggtttggattgggtagtgtttttggagaaagggttgaatttgatattcgttttggaggttgggttaattggaggtgttgggataagggggatgattttttgattagggttcgagttttttggaggatggcgggttattttttgagatgggagtgggatggttatggtagggggtaggttggtagagagagacggtattttttagtttttcgtttttttaagcgttttttaaggaaaagggaagtagatattttttagatttttgtttttgtttttaggaagggtagggttttttttcggttgttagatagttaggtaggttaaagaatggttttagattagaggttgtttattaagggtagaagttattttatagtgttttatgtaaacgttttgtagtttttttagtttggaatgtttttttttttaattttaataaggttggttttttttgttttgtggtttgagtttttttttaaatgagtgttttttttattttattttgggttatattttgggcgttttttgttattcgttttaatattcgaattttttaatttattatttgttgaattttttttttaattttttgagatagagttttattttgttattttggttagagtgtagtggtacgattttagtttattgtaatttttgttttttaggtttaagtgatttttttgttttagtttttcgagtagttgggattatagatatacgttattagattcggttaatttttgtgtttttagtagagacggggttatattatgttggttagtttggttttaaatttttgattttaagtgatttatttgttttggttttttaaagggttgggattataggtatgagttattgttttcggtttatttagttttttttttttttttttttttgagataaagtttcgttttgttgtttaggttggagtatagaggtgtgatttcggtttattgtaattttcgttttttaggtttaagaaatttttttgttttagttttttaaatagttgggattataggtatttattaatatttttggttaatttttgtatttttttttttttttaagatggagttttattttgtggtttaggttggagtgtagtggtgcgatttcggtttattgtaatttttattttttaggtttaagtgatttttttgttttagttttttaaatagttgggattataggtgcgtgttattacgtatagttaattttttgtatttttagtagagatagggttttatcgtgttagttaggatggtttcgatttttttattttattatttgtttgttttatttttttaaagtgttgggattataggcgtgagtaaacgtattcggttaatttttgtatttttattttattttttattttatttatgtaaatttttgtgaggtcgttttatttcgtcgtttaggttggagtgtagtggtgtaatttcggtttattgtaatttttattttttaggtttaagcgatttttttgttttagttttttaggtagttgagattataggtatttattattatatttagttaatttttgtatttttagtagagatgaggttttattatgttggtttggtaggtttagaatttttgattttaggtgattcgttcgttttggtttttaaaaggcgtgagttattgtgttcggtagagtttatttttgattatagattttttttggggaatagtttagtttgtggttttgttttttaaaattttgttttagtaaagatgtggggaaaaaaaaagggttatggaaatttttttgattttagttttggtgatggaagatagttattaggaaattttgtcgaaagaatgggttagattaataatttgagcggttttagtttttttttaatggttgatggatgaggaaggtaaatattagttttaagaagtagataattggatatgtatatttatagtagaaggaaatcgttaaaaagtagagggaaggtggggtgtagtggtttatttttgtaattttagttttttgagagattgaggtgggaagattatttgagattaggagtttaagattagtttgggtaatatagtgagaatttgtttttataaaaaataaaataagtaattttagtattttgggaggtcgaggtaggcggattacgaggttaggagatcgagattattttggttaatatagtgaaattttatttttattaaaaatataaaaattagtcgggagtggtggtgggcgtttgtagttttagttattcgggaggttgaggtaggagaatggcgtgaatttaggaggtggagtgtagtgagtcgagattatgttattgtattttagtttgggtaatagagtgagattaagtttttaaataaataaataaataaataataaataaaatttaaggtcgtgtgtagtggtttatatttgtaattttagtattttgggaggttaaggtaggagaattatttgaggttaggagttcgagat

SEQ ID NO: 939 - DNA, 6381 bp, Artificial Sequence
  chemically treated genomic DNA (Homo sapiens)
agtattattattgtttttttagagatagggtttttttgtgttgtttaggttgattttaaatttttgggtttaagggatttttttgttttagttttttaaagtattaggattatagatatgagttattatgtttagttgttattaatatttattttttgtttttttgaaaatagttattttaataggtgtgaagtgatattttattgtgggtttaatttgtatttttttaataattagtgatggtgggtattttttaatatattttttggttatttgtatgttttttttttttgagatggagtttcgttttgttatttaggttgaagtgtagtggcgcgatttcggtttatcgtaatttttgttttttaggtttaagtaatttttttgttttagtttttcgaggagttgagattataggcgtgtgttattacgtttagttatttttttgtgtttttagtagagatagggttttatcgtgttagttaggatggtttttattttttgattttatgatttatttatttcggttttttaaagtgttgggattatgggtgtaagttattacgtttggtttatttgtatgtttttttttgagaaatgtttgtttaggttttttgtttatttttgtttattttttttatttttttttttattttgataatattatatggtattaaataaagtttaagagatattgggttggtttgtgtttattttaaaattgtgttttttttttttgttattgagttgtttgagttttttatatattttggatattagttttttattgtatgtatggtttgtaaatatttttttttattttttatataatttaaaatgtgtttttttttttaaaaattttaagttagaattttagaatgttttaattttaatttttttttatatatttttatttagtattttagttttgaatttttaaaattttttaaaataaatattataatgattaatattattattattgtaaataatatttgtttggagttgtgtatttatttgttattttatttttttgtttttttttgtatagtaaattgttttgtaattattttttttttttattgaagtatatttgtaaatgtttatttaggtattttgggggataaattttttgtttatttgtttttgttaattttggtttttgaaagatggttttgttgggtatataattttaatagtttttttttttttttttttaaataagagaggaaagttattggattaggattttgttagagtataatttttttaaagttttgtgggagagatgagtttattttttaaattgagattttaattttttttttttttaaaaatttttttacgttttttagaattattttaatttttttagttttatagtttttttttttgagaaatttagggatttagagagtaaaataggagatattttatggtgaaaataattttttaggaaggatttcgagtttttttttttttttatattatggttagtttttttttatttttgtgttataggattaataggtgtgtaggtttattgttgtgtagtaataggttaattatattgatatagtagggttttttgtagagaaaaagtttaatgatttcggggtgttaaatgaggagatcggggagatcgttaaatttatttttttaaagagttttgggttgggattttagaggatattgtggagggtaagaggttggtaaattggggttaatgattggtcgaggtaaggggataaaattattggaatatggaaattgtatttttttgtgagttagttttttttggggttttttaggttagttggtattaattgggttttgtagattggttggtattagtggggttttttagattagtttgtatgagtatttttattggtatgtaggatttgaaagaatattttaaagggaaaatttaatattttataatgtttaagttgttatttttagagtagttaagggaattttaattttatgatagagtttgtataattttggggtaataggtatcgagtaattatgaggaagtaggtcgagagtatgttgatttaatgattaatgttgagtgtgttgtaagttttttttttgtcgtggatattttgtagggtaagttttatagtaattttttgtatgtaaggtggtgggtatttgtaattttagttatttaggaggttgaggtaggagaattatttgaatttaggaggcggacgttgtagtgagttgagattgtattattgtattttagtttgggtgatagagcgagattttattttaaaaaaagaaaatttttgtgtaggtttaatttaaagtgtttatttttaaggagtaaggtattatgattggttttgtttatattataaggttagttttgtggatttgggaagtagagattttagtagtagtaggaggaagatgttggataaaaaaaaaaaaaatagtaaatgtttaggatttaaaattaaaaatagttttcgtttaggtttgtttaggataaatttttttatttatttattaatttatgtatgtatttatttatttattaatttaataatgatgaagtatttattgtgtgttaggtagtgttttatattgggtggatgtagtagtatatgagatttagtttttgtttttattgttgatgggttagtggggaggtaggaaggttgatgtgttaacggttagaatatagtaattatttttaataaatagatggttatatgttcggtgtgttttagttaagtagggtttgtttaggaaggatgggagatattataggaggagatggggggtaggaattggggtttgtgttttcggggaggacgttgggttgtagaagttttgtttgaagagggaattaggttggttttgttgtgtatgtaggtgggatttttaagtattgttttttttagaagttgtttggagtattttaggtatggattattttatttttttatagttttttatagtgaggtaggttttagaatttttttttggttttttgttatgttgttttttttttttgagggttttttgggaattaggtttttaataattttttttttgcgtttgttcgggcgggttttaatagttattatggtaggttattatttatggtgattttattttttttaggtatgtgattttgaataagttatttaattttgacgtgttttagtttttttatttgtgagatggagatagtaatagtatttgttttagagagttaggggattaattggttaatatttatagagtgtttgtgatagtgttcgatttgtagtaagtaaatgtttattattattattattgatgttgttattgttattattattttgatttagtggaggatatagagtttttattatagtaatgtttttatttttatttttttgttttagtttttggtttgggttttaggagtgttttttgtttttaggattttgttggttttatatgaaattagatttttttaggttgggggtgaaattttattttgttttttttttttttgttggttttaggttttgtttttttttttttgtattatttttaagtttagtaatttcgtttagggatttttttgggtttaggttgataatggtagtttttgatggttgtgtatagtagtaatcgtttttgtttttagtagtgagggaagggtaggattttattttgtttttttaattcggaatggagtttggttaaagttttgaggattttggggtatttttttggaaaggttttattaggggtttttttgagaaagtaagaagttttgttttttttttgtttggttgtaaaagggattttaggtagaattgagggatgagattgtgtggcgattttttaggaaggttttttcgtttattgaaattttttttttatttgtttattgtttttgcggatttttttttaggaataaagtgaaatattttaggttttaatttttttaatttaaggtttttttttggagggagagagaggatggaggatattaggtaggttaggaaatgaaggttatggtttgggggtgtggttgtagttagattgattttattttttgtttgtgtttgggttgttggggattattatgggatgtattttttgaggttttgggttttaagttggttttgaattagttgagttaagattaagtttaggttgaaaattgagtgagggttaggtgcggtggtttaggtttgtaattttagtattttgggaggttaaggtaggtagattatttgaggttaggagtttaagattagtttagataatatggtgaaattttatttttattaaaaatataaaattagttgggtgtggtgacgcgattttgtaatgttagttattttggaggttgaggtaggagaattgtttgaatttgggaggtagaggttgtagtgaattaaaaattgtgttatagtattttagtttgggcgataagagtgagattttattttaaaaaaaaaaagaaaaagaaaaagaaaagaaaattgagtgggatgtgaaggtttatgtagaattgtattaggtatttagtaggagaagtttaaattgttttttaggtttttttagaaaagtttaagttattgtttttttttgttatggtaattgtaagttttggataggttttggtttttggatgtttgttttttaggtatgattttaataatgtattttatgggatttggggttttttagatttggggtttgtaggtttgatttttttttgtgtatacgttttatatacgtatgcgtgtatttattgtttgtttcgttttttgtatagggagttagtagggaggattgggttatgttttgtttattagtagttttttagttttttttgtttggatttttagaggtttggggttttagaacgagttggtgtacgtggttttttaaagattttttagataatgagaggaaatgtagttattagtttgtagaaggttagggattttgggttatagtttagatttgcgtttattatttttttttaggtagtttttggttggtttttgcgagttcgtggagattgttagagatgttttttttcggttataggattttgattgtggttttttttattttgatttgttgtttaggtaagttagttttttggggtttttgatttggtatatgttagtcgagagggtgggggtgttttgttttttgtggttttaggtggaagagaagttttaaaagttgttgaggtttttaggtttttttgttttgttttaagatagggtttcggtttattatttaggttggagtatagtggtatgattatggtttattgtatttttttgggttcgggtgatttttttattttagttttttgagtagttgggattataggtgagagttattatgtttagttaatttttgtattttttgtagagatggtaggggttggtttcgaatttttggatttaagtgatttattcgttttggttttttaaagtgttgggattataggtatgagttattatgtttagtttgttgaagttttttaaattttttatttttattataggtaggtttttgttttgttgtttaggttggagtgtagggtgtgattatagtttattgtagtttttaatttttgggtttaataatttttttgttttagtttttgtattgttggttttttttttttggattattgtttttaagtatttgtagggcgtgttacgtttttgtatgtttttgtttatagagttattatttgggtgaggtttttattgagtatagtatttaaagtggttttatttttattttttgttttttttttcggcgtttttttgttatttgatcgttgggtgttttgtttgttattgtttattggagtttcgttagggtagtgtttggtttattgtgattattgttgtatttttagagtttgatgttttggatatagtaggtgtttaaaaagtgtttgtgtaagaaaggaagggagggagggttatagagggttttttgtgggagggttttatgggggaggggatatttgggttgattttaaagattgagtcggattttattttatggagttggagtatagtttgaggaagattaatttggagttgatgggtagatgggttggaggaaggagagttagaggtagggtgttagttagggggttggaggaaggatagttagaggtagggagttagttggggggtggttttttggtttagtcggggttatgatatttgataaggggaaagtagtagcggggtttttaatgattttttttttttagtttttgatttaggagttagattgttttaatggatagttttattggagggtagggggtggggggatgatacgattgtttagtgtttttggttttttagg

SEQ ID NO: 940 - DNA, 6381 bp, Artificial Sequence
  chemically treated genomic DNA (Homo sapiens)
tttggaaaattagaaatattgggtagtcgtgttatttttttattttttgttttttagtggagttgtttattgaggtagtttggtttttgggttagggattgaagaggaaaggttattggggatttcgttgttattttttttttgttaggtgttatggtttcggttagattaggaggttattttttagttggttttttgtttttggttgttttttttttagttttttagttgatattttgtttttggtttttttttttttagtttatttgtttattagttttagattagttttttttaggttgtgttttaattttatggagtgggattcgatttagtttttaaggttagtttaaatgtttttttttttataaagtttttttatagagggttttttgtagtttttttttttttttttttttgtataaatattttttgaatatttgttatgtttaaagtattaggttttggggatatagtagtgattatagtagattaaatattgttttggcggagttttagtaaatagtgataggtagagtatttagcggttagatggtaggaaagcgtcgagaaagggagtagggagtgggggtgaggttattttaaatattgtgtttaatgaaggttttatttagatggtgattttgtgggtaaaggtatgtaggggcgtggtacgttttgtagatatttgggggtagtgatttaggggaagggggttagtagtgtaaaggttggggtaggaggattgttgagtttaggagttggaggttgtagtgagttatgattatattttgtattttagtttgggtaatagaataggaatttgtttataataaaaataaaaaatttaaaaagttttagtaggttgggtatggtggtttatgtttgtaattttagtattttgggagattaaggcgggtggattatttgagtttaggagttcgagattagtttttgttatttttataaaaaatataaaaattagttgggtatggtggtttttatttgtgattttagttatttaggaggttgaggtgggaggattattcgagtttagggaggtgtagtgagttatgattatgttattgtattttagtttgggtgatagatcgagattttgttttaaaataaaataaaaaaatttaagaattttagtaatttttgggattttttttttatttgaagttatagggaatagggtatttttattttttcggttggtatgtgttaaattaggaattttaggaaattggtttatttggatagtagattagggtgaagagggttatagttagggttttgtaatcgaaagaggatatttttggtagtttttacgggttcgtagggattagttaagggttgtttggagggagatggtgggcgtaggtttgagttatggtttagaatttttagttttttgtaaattgatgattgtatttttttttattatttgagagatttttgggaagttacgtgtattagttcgttttaggattttaggtttttaagaatttaggtagaggaagttgggaagttgttgataagtagggtataatttagttttttttgttgattttttgtgtaaggggcggggtaggtaatgggtgtacgtatgcgtgtatgagacgtgtgtataggggagagttaggtttataagttttagatttggggaattttaaattttatgggatgtattgttggagttatgtttgggagataagtatttaaaggttaggatttgtttaggatttgtagttattatagtaaaaggggatagtgatttgggtttttttaaggaagtttggagggtaatttgagttttttttgttaaatgtttggtgtaattttgtataaatttttatattttatttagtttttttttttttttttttttttttttttttttgagatggagttttatttttgtcgtttaggttggagtgttgtggtataatttttggtttattgtaatttttgttttttagatttaagtaatttttttgttttagtttttagagtagttgatattataggatcgcgttattatatttagttaattttgtatttttaatagagatggggttttattatgttgtttaggttggttttgaatttttgattttaggtgatttgtttgttttggttttttaaagtgttgggattataggtttgagttatcgtatttggtttttatttagtttttaatttagatttgattttgatttagttgatttagggttaatttgaggtttagagttttaggaaatgtattttataatagtttttagtaatttaggtatagatagagaatggggttagtttggttgtagttatatttttaaattatggtttttattttttggtttatttgatgttttttattttttttttttttttaggagggagttttgggttgggagggttggagtttgaggtgttttattttatttttagggaggaattcgtagaagtagtgagtaggtaagggagggattttaatggacgagaggatttttttgggggatcgttatatagttttattttttagttttgtttaagattttttttgtaattaggtagggaaagagtaggattttttgtttttttaggggaatttttgatggggtttttttaaagggatgttttagaatttttaggattttggttaagttttatttcgggttgggagggtagggtgaggttttgttttttttttattgttgagggtaaaggcggttattattgtatataattattaagggttgttattgttagtttggatttagggaagtttttggacggggttgttggatttgggaatgatgtagggaggaagaggtagggtttggggttagtagagaaaaggagaatagggtggagttttatttttagtttgaaggaatttgattttatgtggggttagtaaagttttgagagtaggaaatatttttgaaatttaagttaggggttgggatagaagggtggggatggggatattgttgtagtggagattttgtgttttttattgagttagaataataataataataataatattaataataataatagtaaatatttatttattataagtcgggtattgttataagtattttataaatattaattaattaattttttaattttttgaggtaggtattgttattgtttttattttatagatgggaaaattgaggtacgttaaggttaaatgatttgtttaagattatatatttagaaaaaatgaagttattatgaatgatagtttgttatggtgattgttgaagttcgttcgagtaggcgtaagaagaggattgttaggagtttggtttttaggagatttttaagagggaaaagtaatatagtagaaggttagaggaaggttttggggtttgttttattgtgagggattgtgggaaggtggggtgatttatgtttggagtgttttaaatagtttttggaagggatagtgtttgggaattttatttgtatatatagtagggttagtttgattttttttttaagtaaggtttttgtagtttaacgtttttttcgaaagtataggttttagtttttattttttatttttttttgtgatgttttttattttttttgggtaggttttgtttggttgggatatatcgggtatgtgattatttatttgttagaaatagttattgtattttaatcgttgatatattaatttttttgtttttttattggtttattaatagtgagggtagaagttgaattttatgtattgttatatttatttagtgtaggatattgtttggtatatagtaggtgttttattattgttgaattggtagatggatgggtgtatgtatggattagtgaatgaatgagagagtttgttttaaataagtttgggcgaaggttgtttttagttttaggttttaagtatttattgttttttttttttttgtttagtattttttttttgttattgttaaagtttttgttttttaagtttataaggttgattttataatgtaaataaggttaattatggtattttattttttgaggatgggtattttgagttaggtttgtataaaggttttttttttttgagatggagtttcgttttgttatttaggttggagtgtagtgatgtaattttagtttattgtaacgttcgttttttgggtttaagtgatttttttgttttagttttttgagtagttaggattataggtgtttattattttgtatatagagagttattgtggggtttgttttataaaatgtttacgataggaaaagagtttgtagtatatttaatattaattattaggttagtatgttttcgatttgtttttttatagttgttcggtgtttattgttttagaattatgtagattttgttataggattagagtttttttaattgttttaaaggtaatagtttgaatattataaaatgttaagttttttttttgagatatttttttaggttttgtatattagtgaaagtatttatgtaggttggtttgaaggattttattgatgttagttagtttgtaggatttaattgatgttagttggtttgaaggattttaagaggagttgatttataaaagaatgtagtttttatattttagtgattttatttttttatttcgattagttattgattttagtttattagttttttgttttttataatgttttttaaaattttagtttagaattttttggggagatggatttgacggttttttcgatttttttatttggtatttcgggattattaaattttttttttgtaggaaattttgttgtgttagtgtaattggtttgttgttgtatagtagtgggtttatatatttgttggttttgtaatataggaataagaggaaattgattatgatgtagaagagagaagaaattcggggttttttttggaaaattgtttttattatgaaatgttttttgttttgttttttggatttttaagttttttaaggaagggggttataaaattggaggagttaagatagttttggaaaacgtgagagaatttttgaggggaggggagattagagttttagtttagaaagtgaatttattttttttatagagttttggaaggattatgttttgatagggttttaatttagtgattttttttttttgtttgaaagaaaaaaaaaaaaaattattagaattgtgtatttagtaaaattattttttaagaattaaagttaataaaaatagataaataaaaagtttattttttaaaatatttaaatgagtatttataaatgtgttttagtaagaagaaaaaatgattatagaatagtttgttatgtaaagaagggtaagaaaataaaatggtaaatgagtatataattttaaataaatattgtttataataatggtaatattaattattataatgtttattttgagaagttttagaagtttaaaattaaaatattgggtaagaatatataaggaaggattggagttaaagtattttaaggttttaatttggaatttttaggagggaggatatattttaagttatataaggaatgggagaaaatatttgtaagttatatatgtagtaaggggttaatatttaaaatatataagaaatttaaataatttaatagtaagaaaaaaaaatataattttaaaatgggtatagattagtttaatgttttttggattttatttaatgttatataatgttgttagaataaagagaaagatgaaaaaaataaataaaaatgggtaaaggatttgagtagatattttttaaaagaagatatataaatgggttaggcgtggtggtttatatttataattttagtattttggaaggtcgaggtgggtggattatgaagttaggagatggagattattttggttaatacggtgaaattttgtttttattaaaaatataaaaaagtagttgggcgtagtggtatacgtttgtagttttagtttttcgggaggttgaggtaggagaattgtttgaatttgggaggtagaggttgcggtgagtcgagatcgcgttattgtattttagtttgggtgatagagcgagattttattttaaaaaaagaggatatataaatggttaagaggtatattaaggagtgtttattattattaattattaaggaaatgtaaattaaatttataatgagatattattttatatttgttagaatggttatttttaaaaagataagagataagtgttgatgatagttgggtatgatggtttatgtttgtaattttaatattttgggaggttgaggtaggaggattttttgaatttaggagtttgagattagtttgggtaatatagggagattttgtttttaaaaaaataataataatatt

SEQ ID NO: 941 - DNA, 5675 bp, Artificial Sequence
  chemically treated genomic DNA (Homo sapiens)
gttattatgtttggttaattttttgtatttttagtagagattgggtttttttatgttagttaggttggtttcgaatttttgattttaggtgatttattcgttttagttttttaaagttttgggattataggtatgagttatcgtatttggttcgttttattatttttatatataatatatgtttttttggttgggcgtggtagtttaagtttggtggtagacgtttgtaattttagttatttgggaggttgaggtaggagaatcgtttggatttggaaggtagaggttgtagtgagttaagattgaattattttattttagtttgggtaatagagtgagaatttattttaaaaaatattgataataataagattatttttagaatttagtttttggtgtatgaagagatttaatatagtttttttatttttagtttttagaaagaagaatatgttagtttgattaatatggtgaaattttcgtttttaataaaaatataaaaattagttgggtgtggtggcgtacgtttgtgattttagttatttaggaggttgaggtaggagaatcgtttgaatttgggaggtggagattgtagtgagtttagtttgggagatagagtaagatttatttttaaaaaaaaaaaaagaagaagaatatgaaagagataggattaataattatttttattgtttaatagtttaagagtgaaagtttagtatagtggtttatttttgtaataattttagtattttgggaggttgagttgggaggattatttgagtttaggggttcgagaatagtttgggtaatatgttaaaagtttttttgtagaaaaaatataaaaattagtcgagtgtagtggtatatatttatagttttagttattagggaggttgaggtgggaggattatttgagtttgggaggttaaggttgtagtgagttatgattatgttattgtattttagtttgggagatagagttagattttgttttaggaagaagaaaaaaaaaaaaaaagttaaatttttttattttaggatgtttgaaaaggatagagtttatggagtatggatgtagaaaagtagttatttttattagaaaaaaaaaaaatgaaatgtggatatagttatttaagattagagatttaattagtgaaagtaattagttttaattttattgttattaggagggcgtatattagagaatttgggagaaagtttgttagagtttttagtatttttagtgttattggtgttgtggtttaataatttttgtgggaatgaggagaattagagattattattattatacgtaaaaaggattttatagtaataatgtggttgttaaaaattagttggaggttaggcgcggtggtttacgttgtaattttagtattttgggaggtcgaggcgggcggattatttgaggttaggagtttgagattagtttggttaatatggtgaaatttcgtttttattaaaaatgtaaaaaattagttgggtgtggtggtgtatgtttgtaattttagttatttgggaagttgaggcgggagaattatttgaatttgggaggtagaggttgtagtgagtttagattatgttattgtattttagtttgggtgatagattgagattttgttttaaaaaaaaaaaaaaaaattagttggagtttaaattatatattgtttgtaatttagattgtatttgtttttttgttaatggtttgagatatgtgtagaggttttttaaatatgtgtaggtgatttttttttgtcgtttaggttggatgtaggggtataattttagttaattgtaatttttatttttcgggtttaagtaattttttcgttgtagttttttgagtagttgggattataggtgtgtgttattaagtttggttgatttttttgtattttttttttttttttcgagatggagtttcgttttgtcgtttaggttggagtgtagtggcgtaattttagtttattgtaagttttgtttttcgggtttatattatttttttgttttagttttttaagtagttggtattataggcgttcgttattatgtttagttaatttttgtattttttttagtagagacggggttttatcgtgttagttaggatggtttcgattttttgatttcgtgattcgttcgtttcggttttttaaagtgttgggattataggcgtgagttattgtatttggtcgattttttgtatttttagtagagatagggttttggtatgttgtttaggttggtttggaattttcgattttaagggattcgtttgtttaggttttttaaagtgttaagattataggtgtgagttattacgtttggtttagaaatattttttttttttttttttgagatggagttttattttgttgtttagtttggatggagtgtagtggcgcgatttcggtttattgtaagtttcgttttttgggtttacgttatttttttgttttagtttttcgagtagttgggattataggtatttgttattatttttttttgtatttttagtagagacggggttaatttttttttgtatttttagtagagatggggttttatcgtgttaattaggatggtttcgatttttttatttcgtgatttgttcgttttagttttttaaagtgttaggattataggcgtgagttattatatttggtttagaaatatttttttattagaaatattattggcgggtgtagtagggtacgtttataattttagtattttgggaggtcgaggtaggtagattttttaagtttaggagtttaagattaatttgggtaatatggtgaaagtcgtttttatagaaaattagttaggtatagtggtgtgtatttgtggttttagtttttagggaggttgaggtgggaggattatttgaatttaggaggttgagattgtagttagttgagatttggtttttgtattttagtttaggcgatacggtgagattttgttttaaaaaataaaaaagaaatatgatttatttataaatattttttttttttttatttttagagatagggttttattattacgtaagtattataaattatatatatatgtttgtttgtttgtttgtttttttgagatagagttttgttttgttatttaggttggagtgtagcgttaaatttttatttattgtaattttcgttttttgggtttaagtgatttttttgttttagttttttgagtaattgggattataggtgttcgttataatgtttagttaattttttatatttttggtggagatggggttttattgtgttagttaggatggtttcgattttttgatttcgttatttatttattttagttttttaaagtgttgttaggattatagacgtgagttagtaagttcgatattttttttttttttttttttttttgtggaaatagggttttattgtgttttttaggttggagtgtaggggtataatttcgatttattgtagttttgattttttaggtttaagcgatttttttattttagttttttaaggagttgggattataggtattaggtttatgttattggtttttgttgtttataaatatattagatttgggttttagttgtttttttaatattaggtgggaaatggattgttcggaaggtagaggaatagaggagggatttgtttaggaaggtgggggtgttttagatgagagaggaggtgttgtgattttaaggtttggggaaagtgggtgagtgtagggttttattaaggtttttaataaggtttttttttttggagtttagatgtgaagtttagaaggtaggttagaggtttgaggttagaggtaggttaaaggtgggggttttatttggtttttttggcgtttttttttggaatgtagtgattagttgtttggaagggtgggtaaggggataataggatggggtaaaggttagttataagtagaattttggaaggtcgggcgtagtggtttacgtttgtaattttaatattttgggaggttaaggcgggtagtttatttgaggttagaagtttgagattagtttggttaatatggtgaaatttcgtttttattaaaaagtataaaaattagtcgggcgtggtggtatatgtttgtaattttagttattcgggaggttgaggtaggaaaatcgtttgaattcgggaggtagaggttgtagtgagtcgagatttcgttattgtattttagtttgggtgatagagtgagattttgttttaaaataaataaataaaaattaagtagaattttggatagatagtggtttagggatttagttgtttttaaattatttattttagttttttgtgtaggggatgggggatttttaagatttttaaagatagggaggtatttttaagatttttaaaggtggttaggcgtggtggtttacgtttgtaatcgtaatattttgggaggttaagatgagaggaggttattttaaggttaggagtttaagattagtcggggtaatatagtaagattttgtttttgtttttgtttttgtttttgttttttaatgttttttcgaaattttattttaatatttatataatggtgtttatagttttttttattaattttttttttggggatagaatatttttttatttatttaagtttagttagaaggagatgttttattttttttatttaggttttttagtgttgagaataaaagaaattagtttagttagtattttttgtgaatttaaatgggggttagtagtgtaattgggattagtttattttttgggggagatttagtagtgttggttattttgtagagtttcgtttgggttttttattttggtttttaagggttatagtatttttttttatttataggtttgggtaaggtgtagtttttagatttttgtaattttaatcgttgtgttttcgtcgtagtgggaggtttcgtttttttttttgtttgtttttcgggtattttaggaaggtatttttttttgttagaatggttattatggtattattcgtgttgtggtttagggtttgttggattttgttggtttgttgtttgttgattttaggtgagattagttaagtcggggagggttggagagggttgcgttttggggattagtagagggtagaggaatagaacgtaacgttgtttatattttgttatattgcgatttggtcgttgattttgtattttcgggagaaagttttggttttttagtttagtttttaggtggttaggttttagtataggtttgtacgttattttttttttttaatatatatatatatattttttatgttttttgttttatttgaatttttgaaatttgttttttgcgtatgtgtttttttttgttaggattatttgttttttttatttgttaatttttatttagtttttagtttcgggttgtaatggttttcgtttttaggaagttttttttgatttatttttttttatgttggattagagttttttttggtttttttttgagtttttttcggtttttgatggattttattttttttattggattatgaaggtaggaatttttttgtttcggtataaggagagaggtgttaaatggtggggtttgttgatgcgtgggttgggggataaggaaataaatattaggatttttttatgtttttgaagg

SEQ ID NO: 942 - DNA, 5675 bp, Artificial Sequence
  chemically treated genomic DNA (Homo sapiens)
tttttaggaatatgaagaagttttggtgtttgtttttttgttttttaatttacgtattaataggttttattatttaatatttttttttttgtgtcgagatagaagggtttttgtttttatggtttagtgggaaaggtagaatttattagagatcggggagaatttagaaggaggttagaagaggttttgatttagtataggaggaggtgagttagggaaggttttttggaagcggggattattgtagttcgaaattgaaggttaagtaggagttagtaagtgaaagggataggtgattttggtagagggaagtatatacgtaaagggtaaattttaggagtttagatggagtaggaagtatgaggggtgtgtgtgtgtgtgttaggggagagggatggcgtataagtttatgttggggtttgattatttgaaggttgaattaaggaattagaattttttttcgaggatatagagttagcggttaggtcgtagtgtggtaggatgtgaatagcgttgcgttttatttttttattttttattgatttttaaaacgtagttttttttagtttttttcggtttgattggttttatttggggttagtagatagtagattagtagagtttagtaggttttgggttataatacggatggtattatggtggttattttgatagaggaaggtgtttttttgaggtgttcgaagggtaggtaggggaaaaggcggggttttttattgcgacggaagtatagcggttaagattgtagaagtttggggattgtattttgtttaggtttgtgggtggaaggggatgttgtggtttttgggggttagggtgggggatttagacggggttttgtaaagtggttagtattgttgagttttttttagggaatgggttggttttagttgtattgttggtttttatttgaatttataggaaatgttaattaaattggttttttttgtttttagtattgggaagtttgggtgggggggatgaggtatttttttttggttgaatttaggtgggtaggggaatattttgtttttagagaggaagttaatggggaaaattgtaggtattattgtgtagatgttaaggtgggatttcgaggaaatattaaaaaataaaaataaaaatagaaatagaagtagagttttgttatgttgtttcgattggttttgaatttttggttttaagatggtttttttttattttgattttttaaagtgttgcgattataggcgtgagttattacgtttggttatttttgaagattttgaggatatttttttatttttgaagattttggggattttttattttttgtataaagagttaaggtaggtgatttggggatagttgagtttttgagttattgtttatttaggattttatttggtttttgtttgtttgttttgagatagagttttattttgttatttaggttggagtgtagtggcgggatttcggtttattgtagtttttgtttttcgggtttaaacgatttttttgttttagtttttcgagtagttgggattataggtatgtgttattacgttcggttaatttttgtattttttggtagagacggggttttattatgttggttaagttggttttaaatttttgattttaagtgagttgttcgttttggttttttaaagtgttgggattataggcgtgagttattgcgttcggttttttaggattttatttgtaattggtttttattttattttgttgtttttttgtttatttttttaggtagttggttattgtattttaagggaaggcgttaaggggattaggtgggatttttatttttgatttgtttttgattttaggtttttgatttgttttttgggttttatatttgagttttagagagagaggttttgttgagagttttgatggggttttgtatttatttattttttttagattttgaggttatagtatttttttttttatttagagtatttttatttttttaagtaggttttttttttatttttttatttttcgaataatttattttttatttggtgttgagagagtagttaaaatttaagtttagtgtatttgtaaatagtagggattagtagtatgggtttggtgtttgtagttttagttttttggaaggttgaggtgagaggatcgtttgagtttgggaggttaaagttgtagtgagtcgagattgtgtttttgtattttagtttgggagatatagtgagattttgtttttataaaaaaaaaaaaaaaaaaaaaagatgtcggatttattggtttacgtttgtaattttagtagtattttgggaggttgaggtaggtggatgacgaggttaggaaatcgagattattttggttaatatagtgaaattttatttttattaaaaatataaaaaattagttgggtattgtggcgggtatttgtagttttagttatttaggaggttgaggtaggagaattatttgaatttaagaggcggaggttgtagtgagtggagatttggcgttgtattttagtttgggtgatagagtaagattttgttttagaaaaataaataaataaataaatatatatatataatttataatatttacgtaatagtgagattttgtttttaaaaataaaaaagaaagaaatatttgtaaataagttatattttttttttgttttttgaaatagagttttatcgtgtcgtttaggttggagtgtaggggttaaattttagttaattgtaattttagttttttgggtttaagtgatttttttattttagtttttttaggagttgagattataggtatatattattgtgtttggttaattttttgtagagacggtttttattatattgtttaggttggttttgaatttttaagtttaagggatttgtttgtttcgattttttaaagtgttgggattataggcgtgttttgttatattcgttagtaatatttttgataaagaagtatttttgggttaggtgtggtagtttacgtttgtaattttagtattttgggaggttgaggcgggtagattacgaggtaaggagatcgagattattttggttaatacggtgaaattttatttttattaaaaatataaaaaaaaattagtttcgtttttattaaaaatataaaaaaaaatggtggtaggtgtttgtagttttagttattcgggaggttgaggtaggagaatggcgtgaatttagaaggcggagtttgtagtgagtcgagatcgcgttattgtattttatttaggttgggtaatagagtgagattttattttaaaaaaaaaaaaaaagagtatttttgggttaggcgtggtggtttatatttgtaattttaatattttgggaggtttagataggcggattttttgaggtcgggagttttagattagtttgggtagtatgttaaaattttgtttttattaaaaatataaaaaatcggttaggtgtagtggtttacgtttgtaattttagtattttgggaggtcgaggcgggcggattacgaggttaggagatcgagattattttggttaatacggtgaaatttcgtttttattaaaaaaaatataaaaattagttgggtatggtggcgggcgtttgtagtattagttatttgggaggttgaggtaggagaatagtgtgaattcgggaggtagagtttgtagtgagttgagattgcgttattgtattttagtttgggcgatagagcgagattttatttcgaaaaaaaaaaaaaaagtataaaaaaattagttaagtttgatggtatatatttgtagttttagttatttaggaggttgtagcgggaggattgtttgagttcgggaagtggaggttgtagttagttgagattgtgtttttgtatttagtttgggcgatagagaaaggttatttatatatgtttaaggggtttttgtatatattttaagttattgataagaaagtaagtatagtttggattgtaaataatgtataatttaagttttagttgatttttttttttttttttgagatagggttttagtttgttatttaggttggagtgtagtggtatagtttgggtttattgtaatttttgttttttaggtttaagtgattttttcgttttaattttttaagtagttgggattataggtatgtattattatatttagttaattttttgtatttttagtagagacggggttttattatgttgattaggttagttttaaatttttgattttaggtgattcgttcgtttcggttttttaaagtgttaggattatagcgtgagttatcgcgtttggtttttagttgatttttgatagttatattgttgttataggattttttttacgtgtgatggtgatggtttttggttttttttatttttataaaggttgttgaattatagtattagtaatattgagaatgttaagggttttagtaggtttttttttaggttttttggtgtgcgtttttttggtgataatgaaattgaagttaattgtttttattggttgagtttttgattttgagtggttgtgtttatattttattttttttttttttggtaggaataattatttttttgtatttatgttttatagattttgttttttttagatattttgggataaaaagatttggtttttttttttttttttttttttttgagatagggtttggttttgttttttaggttggaatgtagtgatataattatggtttattgtaattttgattttttaggtttaggtgatttttttattttagtttttttagtagttgggattataggtgtgtgttattatattcggttaatttttgtattttttttatagaggagtttttgatatattgtttaggttgttttcgaatttttgggtttaagtgatttttttaatttaattttttaaagtgttgggattattataggggtgagttattgtgttgggtttttatttttaggttattaaataatgaaggtagttattgattttattttttttatattttttttttttttttttttttgagaatgagttttgttttgttttttaggttgggtttattgtaatttttattttttaggtttaagcgatttttttgttttagttttttgagtagttgggattataggcgtgcgttattatatttagttaatttttgtatttttattagagacgggggttttattatgttggttaggttggtatatttttttttttaagaattgagagtgagggggttgtattgaatttttttatgtattaggaattgagttttgaagatgattttattattattagtattttttgagatgggtttttattttgttgtttaggttggagtgaggtggtttagttttggtttattgtaatttttgttttttaggtttaagcgatttttttgttttagttttttaagtagttgggattataggcgtttgttattaggtttgagttattacgtttagttaaaagagtatatattatgtatagaaataataagacgagttaggtgcggtggtttatgtttataattttaggattttgggaggttgaagcggatggattatttgaggttaggagttcgagattagtttgattaatatgaggaaatttagtttttattaaaaatataaaaaattagttagatatggtggt

SEQ ID NO: 943 - DNA, 9367 bp, Artificial Sequence
  chemically treated genomic DNA (Homo sapiens)
  unsure 2701, 2726: n is a or g or c or t
tttttttatttattttttatttagtttgtatttgtttttattttttcgggtagtttttttattaggtttttttgtttgggtgacgcgtggttgtttttaagttttaagatttattattggaattatattttttttatattttttaatacgttttatttttaattttatttttagggcgggttattttttgtataatgggagatgtagtgttggtattgttattatttgttttagatttatgtttttttttttttttgttttattttgcgtttttgtttaagaaatttttattagtagttgttgtttttttagaggcgaattttaggttggaagtattttagttaggtttgtttgtgacggtagggtttatttttttattaggtttgggaggcggtaggtgttattttagagagggtttggttggttttatgataagaataagaagtgttaattggtattagagtttttagatagagttgcgagggttttcgttgtgggcgcgagtttcggagtagtaggttggatggagtattttttttatagggatatagtcgtttgttagttgggtttaaagtttggagtttgtttttgaaagggatcgtttgttgttttcgttgttttattggagtttttagggttttttatagtgtaggtggttttattagagggaagttatttttatttggtattttagcggtttggtagtgatatggtagtgggagggttttgaggtttttattttgataatggttaggttgttcgtgtttttattttaatattaaaagcggtttttttaggggttgagcgtgggtgtttagtgtttacgttatattttttgggtaatgtggggttggatggggtttttatttttatttttatggaaggaggttaggtttttagttattttttatttagttatgtacgtatttgttgggttggttttttgggaaatataggtgattcgaatgaattttgtatttttaacgtgttttttattgttttaggatttgggggtttttttgatttttattggtttgtttttagttttgggtttggttttatttgttttggagtttagagtttttggtttggagttatttttttggggtgggttttaggttttattttttttttttttgagtttagtgttttgtttagttttttttttgtattttagcgtttttagatttttgatagagcgacgatgtagggtttttcggggtttaaggtggttttagggttaggggtgggatttgtagggaattcggggagtttacgggttgcgttatttttgttttggtagttgaagtttgggagagtttttgcgtggtgtaattggttttagttcgttttttttgtgtcgtcgtattttagtgttttttatagtttgtttttacgtgttattttttatttacgggaaaaataaatgttttttttttatttattattgcgatttttttttaggaggttttttaggttgggtagagtaggggtttgtagtggttaggttaagagtaaggaagatttggttgttttattgtggttgaaaatttaaaatatttggaattatttttttttaattacgtttttttttgtttaaagataaagttaattaaattattttgttattcgaggttttaaattaaattttggacgtaaatttattagttttataaagtttaggttgatttatgtgatagtttggaatcgtttagttatggagtcggtggtcgtgttttttgttttggagggaattggttagtagtgattatatcgttgatgttaagtggggatttttattattgtcgttgtttagttgttttgttttttagtgtttttttgttgtaagttagatgaggttatttttttttttatcgatgttaggtttttgtcgttgacggttaatggggtttggggttaggggtagagaattttaatagtaagagagttttaggtgatgttggttttttacgtgtattcggtacgttttattgtagttattattaatttggtaaagtaggtaagtttagtttgtggtttttattttgtagatgggttttcggggttagtgatgggaagagtagaagaggatgttagtttagtttggtttaggagtaggtgtcgttgtggaggaaagtttaaatttaatagtttttatttaatatttgttatttgtatggttttagatgttttcggtgtaggttaggttaaggtgggagtaaattttttttgtttttttttttatagaagtattagatttatttgagttttagagttttatgttagtagtttttggttgttttttatttgaggttagagtagtagttgttagtttatagatggggcggatggtaggtgatagattgggaagtattgttgggtggtggaggtgggtagtggtattatgacgggtttttagttatatagttgtttttattacggggtagggagtagtttcggtaataggtaaaggttagagttagagtggtggggaggataggggttgttgtttcgtttttggaaagttattgtagaggggtagtggttggtagtgttaggtttgggggaagtggaagcgttttgtttgggggtagatttttaagtaagggtgatttatggttaagggttattggaaagttggagagagtttgggattttttttatttggggttaataaggtaagtggattgtttgagtttanggagtttaagattagtttgggtgangtagataagaaattttgtttttataaaaatatataaattatttagtatatgttagtaattttagttatttgggaggttgaggtgggaggatagtttgagtttaggaggtagaggttgtagtgagttgaaatcgtgttattgtattttagtttcggtaatagagcgagagttaattttaaaaaaaaaaaaaaaaaggaggttttttgatttagggcggtatagagaagaagaaaggggttttatgtaggttttatgtaggattttttatataggaatagtattttaatttataggttttatagaaaggtttgtgtttgtaagttttttagttgttagaaatgattttttttttttttttttttatgaatgttttttttttgaagtattatttcggtttatagaaaattaaggaggagaaagggaagattggttttagtttttagtgtttatttttttgggagaataggtgtttttttttggttttttttttagggtttttattttggatagtttacggtagtagtaggtaagaggagtttgttagttgtttttttttttattttagggcggtttgttttatttttttttttatttatttttttttttagaatttaggttattagatggtttaagtaggttgtgtttatttggggttatggaaatttgtagttttttttttttattgttttgggttaggtgtagagttggagtttagttttagagtaatgatgttatggaaaggttttgattttattatttataattttttagttttcgatttgagtgaatgtttggttttgtttttttgagtagtttattttagttgttatagagatgcgtttattttttttgaggttttgggattaagttaaatagcgcgggatttaggagattttttttttaattcgagatagagttcgagatatgttaattgttatttttttttagtttgagtttataaagttagtgtttagaaagtggtttatttttttttaaagatttgttgtagttataatgcggagatggtaaaagtttggtgtgatgataattttttgttttaattagttagtattttcgggggtatatttttttagataattatgtttgtttttaaaaatagaattttttattaagaaataatcgttagtattattaataattatgaatatttatttagttttgtttttatttattatatagttttttaatatagtaatttaattaaggtttagttgtttttaaatattgtttgttttattgtgaattttttttagaattggaatttgtttgtagtttattttttattagcgttatgaaagggttttagttagttggtagttttttgaattttttttttatttttcgagggatttttttttttttggttggaagaaagtattattttgttttataaagttgaagggcgggggacgatgttttaggttttgtaaatatttttttcggtggtttgttttttttttttatttggtatttgttttgtagagttgttgggtataagttagtatatatacgtgtttagcggggaatttgtttataggttgttttgtaaaaagagtttggcgtttttaaaatttagttttattagaatttaatttttaaaagtatatttttatagaatttattttattagtatttatggggtgtttacgatgtgttatgttttgggtgttggggatatattagtgagtcggtgtttttttggagtttatatttcggttaggagatagtaattagataattaggattgagtgatttttgtaaaggaagagaaaaaagataaattagagtagagtaaaggggttgggaagcgcggggcgggagatgttttaggttggtcgggtaggtttcgttgttgtttgaattgggtagtgggcggtttaggcggagggtacggattttgaaaggagagaagtggtgtttttgggggttataagatcggggtattttttcggtagtagttcgttttttggttatcgttttttttagttaattaggtttttcggaggcggtcggttagaaagtatcggcgggattttagtttgtcgttttttttcggcgggatttagaaattgcgcggaattaaagttcgagggcggttcgagtttgcggatcgcggggaggaagcgttcgtcggaagtagtcgtaagatttgagtatggcggttattaggtgtttgcgttggggtttgagtcgagtcggagtttggttgtttttatcgttcgtacggtgtttacgtcgggcgttgtataagtagaaagacggtattgagtttaagagtatttatagtttggataagttttatttcgaattttagggttcggatatcgtttggagggtttcggtgagtcgggaaggattggacggaaggggcgttttgttaggttgttgggtgacgttaggaattttaggtttattggtcggatgtggagttacgtcggggggttacgtgatggtcgtcgcgggagggggttggttgtttgcgttaatttggtcgggagtggggtgttcgttgtagcgcgagatgtgtaggagttcggaaggtcggttgggtatgttttttttaaggttgttagtttttttacgttcgtgtttttggtttttaagattaaattttagttttaaggggaaatacgggtattttggttttttaaggcggataataaaggtaagaggttgttaagttgtttgttattttttgggacgttatagtgtttattgtttttagtaattttaggacgcgcgaataaaatagtttttttgtcgtttttttaggatgtatttatttagttagttgtgtgtaggtattgaattaagtttcggagtaagagagataagatttatttaaatttattgagtttttatttataggattggaaaagaatatttatttatttgtttattaatttatttatttatttaataaaagttgtgttaggttaggggatggagtagtaaataaaattgaaattttaaagtttgtggagtttatgttttagtggagggagataagtagtaagtaaatgattaatatagaatgtgtgaggtagtattttgtagaaaataaagttaagaaggaagaagtagtgttagaggtaggaagtagggttgtaattttaagtaggattgtttaggaacgttgttaatgaggtggtatttgaataacgatttggaagaagttagatagtaagttatgagaatagggggcggatgagtattttaggtagagggaagagaaagtgtaataatttgaaggtagtagtaatttttaggtgtggtttagtaggggttaggagataaagttaaagagagggatggttggggaaaggtttgttattaggatttaatggtttttagttttttttttgaacgtaagggagatttattggagagtttgaagtagaatggaattattttagttttataaggattatttagagagttttatagagaatagatagaggatgttaagattagggagataagtaaggagattgtaatgtagggtaagagatgataagtagggtggaagtagtaggagttatgagaattggttagattttagacgtattttggaaagaaagtttgtaagatttgttaattgattggatgtgagaagtgagaataaaagaggaattgaagtttggggttttttttttttttttttttttttttgagacggagttttattttgtcgtttaggttggagtgtagtgatgtaatttttgtttattgtaagtttcgtttttcgggtttacgttatttttttgttttagttttttgagtagttgggattataggcgtttattattataatcggttaattttttttttttttttttttagtagagagggggttttatcgtattagttaggttggttttgattacgggcgtgattatcgcgttaggtttttttttttttttttttttgagatagggttttattttgttatttaggttggagtgtagtggcgtgattttagtttattgtaattttcgttttttgggtttaagtgatttttgtgttttagtttttcgagtagttgggattataggtatgtattattatgttcgatttatatttttgtatttttagtagagatagggtttttattatgttggttaggttagttttaaatttttgattttaaatgatttgttcgttttagttttttaaagtgttgggattataggcgtgagttatcgatggttagttaagtttggggttttgagtagtgaaaggattgagttgttattaattgagatgagagagtggtaatagtatttatttgtttatttatttaataaaatgtttattgtatatttattgtgtttattattatttgagtttagtatatatagttatgataaataaaatataggattttttttttttatggagtttaattttaatggaaggagtagatagtaaataaatagggaaaatattaggtagtgagaagtagtgtaatgaataggttagggtgttgtaataaagtgttgaggttattttagattattagtaagggaagttttttgaggcggtttaaggtttgggtttattagatatttgagaagagacgttgagtagtagttgggtatatgggtgtggagttgagaagaaaggtttgagtttgagttagaaagttgggtgttaaaaataggttattttttggttaggcgtagtggtttatgtttataattttagtattttgagaggttaagggtagattatttgaggttaggagttcgagattagtttggttaatatggtaaaatttcgtttttattaaaaatataaaaattagtcgggcgtggtggtatacgtttgtagttttagttatttaggaggttgaggtaggagaatcgtttgaatttaggaggtagaggttgtagtgagtcgagattgtattattgtattttaatttgggcgataattttaagattttattttaaaataaaaacgaaaaattggttatttttattagtatagatgaagtattttagagaaagaaagaggagagagagagaagtattttaagggtatgttagtgtttaaaagttgttaagagttagtaaaggagagtgagaaagagttttaggaaggtaagaggaaaattttagaaggaatagaaggaatatgttttaggaaggagggtgtggtttatgatttttagtgttgtagataggtggagtaggataagggttttatttttaaataatttttttttttttttttttttttttttttttgagataaagtttcgttagttgttatttaggttggagtgtagtgttttaggtaggagtgtagtgttttgattttagtttattgtaatttttattttttgggtttaagtaattttgttttagttttttttagtagttaggattataggtgtgtgttattatgtttagttaattttgtatttttagtagaggggaggttttattatgttgtttaggttggtttttaatttttgatttgaagtgatttattcgtttcggttttttaaagtgttgggattataggcgtgagttattgtattcggttaatttttaaataattttaagataaaagaaatgaagataggttgggcgtggtggtttacgttcgtaattttagtattttgggaggttaaggcgggtaagtttttttgaaggttaggagttcgaaattagtttggttaatatggtgaaatttatttttattaaaaatataaaaaaaaaaaataataatagttaggtatggtggtatgcgtttgtaattttagttatttaggaggatgggataggagaattatttgaatttaataggcgtaggttatagtgagttgagatcgtattattgtattttagtttgggttatagagcgagattttattttttaaaataaaggaatgaaggtagtcgggagtgaagttgaggatattgatgttttgagtttggaggcgtagataagttttagagtgggagacgtttgtattggtattagtgggttagaggatttaaaggtgaaggagcgttattgttttatggaatagtaagagagatagagatatggagattgaggagatttggtgtgattgattatattttgaagaatattattagcgtagtaattatgtttattgtgtaaagagaacgtcggatagttagtttattagaaattttttaaggtgtattttatagttatttgtttaaggtggattgttttgtgtgggagttttttgtgttttcggaaagaatagggtggtttattaggtttgttgttttaggttgatagagggtgttgtttttggaggttttttgatgtatgtgtattgtgtttttatttttcgttggagttaggtttttgatggtgtttgatattagttaaggttagggtagggaaggttggagatattagatttattttcgtagaggagtgtttttgaggtggtatttttggagtttgaggatgttttttttgttatcgtgatattattttgtaggggatttgaaaatattaatgtataatgtttgtgttgtggttttatattatttttttgttgttttgaattagttaggagttatttagtaggtaatatttatttgatattgtgtatattatattataga

SEQ ID NO: 944 - DNA, 9367 bp, Artificial Sequence
  chemically treated genomic DNA (Homo sapiens)
  unsure 6642, 6667: n is a or g or c or t
tttgtaatgtaatgtatatagtgttaaataaatattatttgttgggtgatttttaattggtttaaggtaataaagaaatgatgtaaagttataatataaatattgtatattagtatttttaggttttttgtaaaatgatattacgatgatagaaaaagtatttttagattttagaggtattattttagaaatatttttttacgaaaatggatttgatgtttttagttttttttgttttagttttagttagtgttaggtattattagaggtttggttttagcgggaggtgggagtatagtgtatatgtattagggaatttttaaaagtaatattttttgttaatttggagtaataagtttggtgggttattttgtttttttcgggggtataggagatttttatataaggtagtttattttggataggtgattataaagtgtattttgaagggtttttggtaaattaattattcgacgttttttttgtataatgaatataattgttacgttgatggtgttttttaaaatgtaattagttatattagatttttttagtttttatgtttttgttttttttgttgttttatgaagtagtaacgtttttttatttttaaattttttgatttattggtgttagtgtaaacgttttttattttgaggtttatttgcgtttttaggtttaaagtattagtatttttagttttattttcgattgtttttatttttttattttgagagatggagtttcgttttgtagtttaggttagagtataatagtgcgattttagtttattgtaatttacgtttgttgggtttaagtgatttttttgttttatttttttgagtagttgggattataggcgtatgttattatgtttagttattgttgttttttttttttgtatttttagtagagatgggttttattatgttggttagattggtttcgagtttttgatttttaagagaatttgttcgttttggttttttaaagtgttaagattacgagcgtgagttattacgtttagtttgtttttattttttttattttagaattatttgggagttggtcgggtgtagtggtttacgtttgtaattttagtattttgggaggtcgagacgggtggattattttaagttaggagttggagattagtttggataatatggtgaaattttttttttattaaaaatataaaattagttaggtatggtggtatatatttgtaattttagttattgggggaggttgaggtaggattgtttgaatttaggagatggaggttgtagtgagttgagattaggatattgtatttttgtttgggatattgtattttagtttgggtgatagttaacgagattttgttttagaaaaaaagaaaaaagaaaaagaaaaagaattatttggggatgaaatttttattttattttatttgtttgtagtattgaagattatgggttatatttttttttttgaagtatgttttttttgttttttttgaaattttttttttatttttttaggatttttttttatttttttttgttagtttttagtaatttttaaatattgatatgtttttgaaatattttttttttttttttttttttttttttagaatattttatttatgttgatgaaaatagttagtttttcgtttttgttttgagatggagttttaaggttgtcgtttaggttggagtgtagtggtgtaatttcggtttattgtaatttttgttttttgggtttaagcgatttttttgttttagttttttgagtagttgggattataggcgtgtgttattacgttcgattaatttttgtatttttagtagagacggggttttgttatgttggttaggttggtttcgaatttttgattttaagtgatttatttttggttttttaaagtgttgggattataggtatgagttattgcgtttggttagaaaatagtttgtttttgatatttaattttttggtttaaatttaaatttttttttttaattttatatttatatatttaattgttatttaacgtttttttttagatgtttaatggatttaaattttaagtcgttttagaggattttttttattaataatttgaggtagttttagtattttgttgtagtattttggtttatttattatattattttttattatttgatattttttttatttgtttattgtttgttttttttattagaattaagttttatgaaggagagagattttgtattttgtttattatggttgtatatgttagatttaagtagtagtagatatagtagatatataataaatattttattgaatgaatgaataaatgaatgttattgttatttttttattttagttaatagtaatttaatttttttattgtttaaggttttagatttggttggttatcggtggtttacgtttgtaattttagtattttgggaggttgaggcgagtagattatttgaggttaggagtttgagattagtttggttaatatggtgaaaattttgtttttattaaaaatgtaaaaatatgagtcgggtatggtggtgtatgtttgtaattttagttattcgggaggttgaggtataagaattatttgaatttaggaggcggaggttgtagtgggttgagattacgttattgtattttagtttggatgatagagtaagattttgttttaaaaaaaaaaaaaaaaaaaagtttggcgcggtggttacgttcgtgattaagattaatttggttaatacggtgaaattttttttttattaaaaaaaaaaaaaaaaaaaattagtcggttgtagtggtgggcgtttgtagttttagttatttaggagattgaggtaggagaatggcgtgaattcgggaggcggagtttgtagtgaatagagattgtattattgtattttagtttgggcgatagagtgagatttcgttttaaaaaaaaaaaaaaaaaaaaaaaaggttttagattttaattttttttttatttttattttttatatttaattaattagtaaattttgtaggttttttttttaaaatacgtttaggatttgattaatttttatgatttttattgtttttattttgtttattattttttgttttatattgtaatttttttatttgtttttttgattttggtattttttatttgttttttgtaaggttttttgagtgatttttgtaaaattaagataattttattttgttttaagttttttaataggttttttttgcgtttagaggaaaggttggaggttattaagttttagtaataggtttttttttagttatttttttttttggttttgttttttgatttttgttgagttatatttggggattgttattgtttttaggttattgtatttttttttttttttgtttaggatgtttattcgttttttatttttatgatttgttgtttggttttttttaggtcgttatttaaatgttattttattgatagcgtttttagataattttatttaaaattgtaattttattttttatttttggtattatttttttttttttggttttattttttgtaaagtattattttatatattttatattagttatttatttattgtttgtttttttttattagaatataagttttataagttttagaattttaattttgtttgttattttattttttagtttagtatagtttttgttgagtgagtgagtgaattaatgaataaatgaatggatatttttttttagttttgtaagtggaagtttaatgggtttgggtgggttttattttttttgtttcggggtttgatttaatgtttgtatatagttggttaaataaatgtattttgaaggaacgatagagaagttgttttattcgcgcgttttggggttattagagataatggatattgtaacgttttaaagggtagtaaataatttggtagttttttgtttttattgttcgttttggagggttagaatgttcgtatttttttttgggattggaatttggttttgagggttaaggatacgaacgtagaaaagttggtagttttgaaagaagtatatttagtcggtttttcgggtttttgtatatttcgcgttatagcgagtattttattttcggttaggttagcgtagatagttagttttttttcgcggcgattattacgtagtttttcgacgtagttttatattcggttaatgggtttggggtttttaacgttatttagtagtttgataaaacgtttttttcgtttagtttttttcggtttatcgggattttttaggcggtgttcgagttttgagattcggggtagagtttgtttaggttgtagatgtttttgaatttagtgtcgtttttttgtttgtgtagcgttcggcgtgggtatcgtgcgggcggtgggagtagttagatttcggttcggtttaggttttagcgtaggtatttggtggtcgttatgtttaggttttgcgattgttttcggcgggcgtttttttttcgcggttcgtaaattcgagtcgttttcgagttttggtttcgcgtagtttttaggtttcgtcgaggggaggcggtaaattggggtttcgtcgatgttttttggtcggtcgttttcgggaggtttggttggttggggaagacggtggttagagagcgagttgttatcggaagagtgtttcgattttgtggtttttagaaatattatttttttttttttagagttcgtgtttttcgtttggatcgtttattgtttaatttaaatagtagcgaggtttgttcggttagtttggggtatttttcgtttcgcgttttttagtttttttattttgttttaatttattttttttttttttttttataaaaattatttagttttaattgtttaattgttgttttttagtcggaatgtgagttttaggagggtatcggtttattggtatatttttagtatttagaatatggtatatcgtgggtattttatgagtattgataaaatgaattttgtaggaatgtatttttgaaagttgggttttggtagagttgagttttaggaacgttaggttttttttataaggtagtttatgagtaaatttttcgttgagtacgtgtgtgtattggtttatatttagtagttttgtaggataaatattagatgggaggagaaggtaggttatcgaaagaaatgtttgtaaaatttggaatatcgtttttcgttttttagttttatggagtaagatgatgtttttttttagttaggagagagggggtttttcgggaggtagggagagaatttagagaattgttagttaattagaatttttttatagcgttggtaagggatgaattatagataagttttaattttgaaaaaggtttatagtagagtaagtagtgtttgaaaatagttaaattttagttaagttattgtgttgagaggttatgtggtaaatggaaataaagttaaataaatgtttataattattagtaatgttagcgattgttttttaatgaagagttttatttttaggaataagtataattatttagaaaaatgtgttttcggggatgttggttgattgaaataggagattgttattatattaagtttttattattttcgtattatggttatagtaaatttttaagaaggaataaattattttttaagtattggttttataagtttagattagaaaggggtgataattgatatatttcgggttttatttcgggttgggaggagagttttttgggtttcgcgttgtttgatttagttttaagattttaaagggaatagacgtatttttatggtaattggaataagttgtttagaggagtaaaattaggtatttatttaggtcgggggttaaggggttatgagtaataaagttagaatttttttatgatattattgttttgaggttgggttttagttttgtatttgatttaaggtaataggaaaaggaagttgtaggtttttatggttttaaataaatatagtttgtttgggttatttggtggtttggattttgggagaggaggtgggtagaggagagaatgaggtaagtcgttttggggtggagagaggagtagttggtaagttttttttatttgttgttgtcgtgaattatttagaatgggggttttgggagaaaggttagaaaggggtatttgtttttttaaaaagatgggtattaaaggttgaggttagtttttttttttttttttttggttttttataggtcgagatggtgttttagggaggggatatttatgggagaagagaggaaagaggttatttttggtagttgaggagtttgtagatataagtttttttatagggtttatgagttggggtattatttttatgtagggggttttatataggatttatataggatttttttttttttttttgtatcgttttgggttagaagattttttttttttttttttttttgagattgattttcgttttgttgtcgaggttggagtgtaatggtacgattttagtttattgtaatttttgttttttgggtttaagttatttttttattttagttttttaagtagttgggattattggtatgtgttggataatttgtgtatttttgtagagataaggttttttgtttatnttatttaggttggttttgaattttntgggtttaagtaatttatttattttgttggttttaggtggaagggattttaagttttttttagttttttagtggtttttaattatgggttatttttgtttgggaatttgtttttagataggacgtttttattttttttaggtttggtattgttagttattgtttttttgtagtggttttttaggagcggggtagtagtttttgttttttttattattttgattttggtttttgtttgttgtcgaggttgttttttgtttcgtagtgaggatagttgtgtggttaggggttcgttatggtgttattgtttatttttattatttagtagtgttttttagtttattatttgttattcgttttatttataagttggtagttgttgttttagttttaggtgaggaatagttaggagttgttggtatgaggttttggggtttaggtgggtttggtgtttttgtggggagggaggtaaagaaagtttatttttattttgatttggtttgtatcgggggtatttggggttatgtaggtggtagatgttgggtagaggttgttgagtttaagtttttttttataacgatatttgtttttgggttaggttgggttggtatttttttttgttttttttattattgatttcgggggtttatttgtaaaatggaaattataagttgagtttgtttattttgttaagttgatgatggttgtagtgaaacgtgtcggatgtacgtggagagttagtattatttggggtttttttgttgttggggttttttgtttttggttttaagttttattggtcgttagcggtagaagtttggtatcgatggagaggaaggtgattttatttgatttatagtaggaggatattgaggagtaaagtagttagataacggtagtggtgagggtttttatttggtattagcgatgtggttattgttggttagttttttttagggtagggaatacggttatcgattttatggttgggcggttttagattgttatataaattaatttgggttttatgaagttaatgaatttgcgtttaagatttggtttggagtttcgggtggtaggatgatttaattagttttgtttttaagtaagagggaacgtaattggagaagggtagttttagatgttttgagtttttagttatagtggggtagttaggttttttttgtttttggtttgattattgtaggtttttgttttatttaatttgagaggttttttgggaggaagtcgtaatgatagatggagaaggggtatttgtttttttcgtggatggaaagtgatacgtggggataagttatgagaaatattgaggtgcgacggtatagagaaagcgggttgaggttaattatattacgtagggatttttttaggttttagttgttagggtagaggtggcgtagttcgtgggtttttcgagttttttgtaaattttatttttgattttgagattattttgggtttcgggagattttatatcgtcgttttgttagaggtttgaagacgttgagatataggggaggggttgagtaaggtattgaatttaaaagagggaggggtggggtttgagatttattttagagaggtagttttaggttaggggttttgggttttaggataggtggggttaggtttagggttgggggtaagttagtgagggttagggggatttttaggttttgaagtagtagaaggtacgttgaaaatgtagagtttattcgagttatttgtgttttttaggaggttagtttagtaagtgcgtgtatggttgagtgggaggtggttggggatttggtttttttttatgggaatggaagtgggggttttatttaattttatattgtttaagggatatagcgtgaatattgagtatttacgtttagtttttaagggagtcgtttttagtgttggagtgggagtacgggtagtttgattattgttagggtgggaattttagagtttttttattgttatgttattgttaagtcgttgaggtgttaggtggggatggtttttttttagtaggattatttgtattgtaggaggttttgagggttttagtggggtagcgagggtagtagacggttttttttagagataagttttagattttaggtttagttggtaggcggttgtgtttttgtagaagggatgttttatttagtttgttatttcggagttcgcgtttatagcgagggttttcgtagttttatttggggattttggtattagttagtattttttgtttttgttatggggttagttaggttttttttgaggtggtatttatcgttttttaggtttggtgggagggtgggttttgtcgttataggtagatttggttaggatatttttagtttgggattcgtttttgaagaggtagtagttgttagtggaggttttttagataaggacgtaggatggggtaggagaggggaggggtatgggtttgggataaatgatggtagtgttagtattgtattttttattgtgtagggagtagttcgttttggaagtagggttgggggtgaagcgtgttggaagatgtgggagaggtgtgattttagtaatgagttttagaatttgggagtagttacgcgttatttaggtagaaggatttggtgggagagttgttcgggggagtgaggataggtgtagattgggtggaaggtgggtggggaga

SEQ ID NO: 945 - DNA, 6145 bp, Artificial Sequence
  chemically treated genomic DNA (Homo sapiens)
attgtttggtatgataggaaagttttgggtttgaggggaggaaaaaaaagaaaagaagagagggaagacggtgggacgagaattggaaagaagaggaaggaagggaaagattgtttagaggacgatgtaagatgtttataggtaaacgggattgagattaattttttttattgtgagagaatattttagtttttaaagtttttgatatagtatgtgatgtagggtaggagtttagtaaatgttagggtttttgtgatgtttagttttttggttgtttttttatgttttatgcggttttatttttttttgggaagtaaaatagaattagattttggttgtgttgttatttatttttatttttttggaattttagggagtttagggttgttattgttgtattttagtttttagggtagtatagatttggttacggaattagatgtttatggatgattatttatattttttagagtttagattgagagtagagttttagtacgttgttttacgtattttgagatagttttttttgggaatagtgtttttcgtgtttagcgtatttgggtaatatttatagtttacgttagatttttttttggaatattattttacgtgtttatagagtttagggttttttttatgattttgtaggggagagagtttttattggtattgggttgaggatagtttgggatattttttttttttatttaggtagtttttattatggtttttatttcgagtttttgaaattttacgaaggtattagtttttgggatatagtagtaaatggatagggtagagtttgtttttgaggggtgtttatttaaggatttttggatttggaatgagagataaattttgaatttttttttgaatttttattttattattgtgtgggattatatattaatttgttagtgtgtattgttttttttttttggagttaggtttaaaggcgggggtagggtagaagtttaagagtaaggggattttttttgttgtatggtattttagaaggtttagagttttagaattttttttatattaaatttatatattttagttgtagaagtgtttggagtagttttttgagttttttgtgatattaaagtggtatgggaaagtagttgaattttttcgtgtttttaaggaggtaagagagggagggagagagaaagagggaaagagaaagagggagagagggagagggagagggggagagagagagcgagagggagagtacgtttttaaaaaatgttatatagaaaatggtatggattgtgtagttaggaattaggttagaatgacgatattatattggaagatagtatgaaggtatgttatttttgagcgttggatgggattgtatattgggagtggatgttggtatggataggttgttattgataataagtagattttttttttttttgtttttttttttcgaatttaagagttttatagaatttaggtgataggttggggtaaaggagatagttttaaattgtttgataataataattggtaattagtaagataatttcgaagtaattgggaaaatgtggaattgattagattaaattttttgttatttgttggagttgagatttaagatagggtttttttgtggtagatgttattttagatggtttttaagttttttgttttttagtgtatgtgattttttgtgtatgggtagaatgtattataattagtttttttatttatgtgttttatatttgtggatttaattatttgttgaatttgaaaaagatgggtggttgtttttgtagtgaatatgtatagattttttttttttgttattattttataaataatgtagtataataattatttatatggtatttatattgtattagggattataagtaatttagaggtaatgtaaagtatacgggaggatgtgtatgtatgttatatgtaaatattgtattattttatataaaggatttgagtatttgtggattgtgttattcgtaatttcgagttttaagtgagaatgtagttttttattgtagttttttgagattttgaatttaagatttagtttagttgtgtttggatttttgatttatagaaagtaggaggtgataaatgagtagtgtttatagttattaagtttgtggttatttgttatatagtattgattggtttttattttttatttattgaagatttaggtattaggtttataggtgattttggtattttgtgttttgttattattttgggggattgtagtgtatttattagtagtttgtgttatttatagatttttgattttttttttatttttaatttttagtaatttttttttttttattttagttttttagttttaaggttatatttttgatttttaaattattaggatttgttttattttagaaattttaaattttagggttttattttgggattaaaattagtatttttatatttttgttgtttttttatatttttatttattttttagatttttgtttgtttttagtttattagtttttttaattattgttagttatttgaattgtttttttattggttttttttatttgtttttatttttgtttttttgttgttatgagttttagtaaaatttcgagtttatattagagtaaataaataataaaaataaatatatataattgtgttaagtggtatatataattttttattttagttgagataattaattttgttaaattttgaattgtttataggtagtgttagttttttagggttgttgtaataaagtattataaattatatggtttagaataatagaaatgtattgttttatagttttggaggttagaagttttaaattaaggtgttagtaggattatgtattttttgaaatttatagaagaagaatgtttttttgtttttttttagttttttgtggtttgttggtaattattggtatttattggtttgtagatgtattattttaatttattgtttttatatggatgttttttttttatgtgtttgtgtttgtgtttaaatttttttttttgataaggattttagttatattggattagggtttaatttaattatttttttttaatttgattattttgttaaagattttgtttttaaataagattatattttgaggtattgggtgttaggattttaatatataatttttggggggaggatattaatatttaagttaaaaaggattaaaagatatattatataaagtaaaggttttttgttttgtatttttttttttttgtttttattttaaatgtttttatttttattttttttagtagattgtttttgtttttttaaatattatgttatttttatattaattttttaatgtttttaattttagatattgttgatttttttttatgatagatgagattatttatttatttttttttttatgtatatatttttaattttggattttggaaattgattaaatttatataagattatagaaaatagtataataaattttaggtgtttattaatgaattttattggttattaatttatgataaattttgttttatttttttttgttatttttttttttttttttattatatagatttattgttatttttaagttttttattgtttatttttgtatttttaagtaatatttttaaatttgtatttttttttttatgaattggggatagcgattattgatttattattattattattattatttttttgcgataggttggggtaaaggagataattttaaaatgttaattttaaattaatgtgtttatattttttgttatttttttttttttttttagttttttgttaattgttgttgtaggttaggtttttaaggaagttgattaagatgtagagtaatgtgtaggaagttttttagggagtatttttaggattaatatttgtagaaggggaggggagggaagaaattaaaatttaatagatagagaaagtgggtagttttaaaaaaggttttagttaattttatagggagttttgaagttgaaatggttttttagagatgttttaagttggggtaaggggttgtatttttgtatttttaagttgaattattgatgtgggttttttgagaataggggtgattttggttgaggtatttatttttttttaagataatttttgatgagggttaacgatagttaatagtttttaagttagttagggaaataaaatttttggtgttgaagggagatttgagtagtgtattatagtattattatagttgtatttgtatttttttattgtttattgttgtttagttataattaagttatttgggttttgttatagattgatttttaaagttgaaaattaaattgtgtttgtagtattaggacggtataatagtatttagtatagtatagtgtagggttaggattttatttttttataattgttgttttttttgtttggcgtattttttttgtagattttaatgcggtttgtttttttatttgttttaaaattttgtttaaatgttattttattagtgaggttttgtttggttattttatagaaaataataagtatgtttcgtatttacgttttatttttttttagatcgggtatgtttatcgatattttttatatttttttattgttttaagttttattaaagtagggatatagagttttagtgttattaatagcgtttggtatatatatttgcgatatttaataagaattagttgaagaaatgaataggaaagggagtttttttagatggaggaagggatttttttaaaaggttttatggaaggagaatggtattgaggttggtttataagaagtgtgttttttataaaaagaaggaagggtagggtttttaggtgaaaggtatagtataagtaaaggtaaaaagacgggtaattgttagttgttaagggtagtggttgaatcgttatatttttagtagttttatatttaggggtttgcgggtcgttgggtttgcgaagtttgtaaggtaattggttcgttttcgttttgcgtttgtttttcggttacgtttattgttgtaggatgacgcgtatttttagaattcgtttcggaggggaggggacgtagggaagagtcgtacggacgtattcgcgttgcggttagcgttcgggtttgcgggttcgggcggcggttgtgttgcgtagtttttatgggttttcgacgaggaggtttttgtggttgcggcggcggttgttaattgcgttatttgttgtagtttgttttcgtcgttttgaagcggtcgcgtcgaagtcgaaatgtcgttatttcggatcggtcgaggttttttttggttgggtttggttttgagtttcgtttgcgtcgttttcggattcgaaacgtaggttaattcgattataggtgtcgtttacgttttttttgttattttttttttttttttttttttttttttttttttttttttttttttttttttttttgtttatatttattttttttatttttttttttttttattatttttttttttatttattattcgttttttttttttattttttatttttttttatcgtttttttattttttttttttttttttttatttatttatttatttattttttattttttcgtgtttttttttttttttttttttattttttttatttttatttatttatttttttttttttttttttttttttattggtttattcgttttttttattttttatttatttatatttttttttttttttttttttttttttttatttttttttttttttagttatttatttttttttttttatttttttttatttaattatttgtttttttttgtatatattatttttttttttttttaaatttattttttttttttattattttttatttattatttcgtttttttatttaggttggaggttatgattaaagtttaattttgttatttaggatttaggtttttttttcgagttttatttttatttttgttgaggtatagcgttttttttggttaggttgttaaggtgtagggtttagttttgggttttttagtaatttagtatttattatgagggagggtttagtgttagtgtaggttattttattaaagttttttttttttgtgtaga

SEQ ID NO: 946 - DNA, 6145 bp, Artificial Sequence
  chemically treated genomic DNA (Homo sapiens)
tttatataggagggaggggttttggtgaggtaatttgtattgatattgaatttttttttatggtaggtgttaggttattaagaggtttaaggttggattttgtattttaatagtttagttagggagggcgttgtgttttagtaagggtgggagtggggttcgaggaggaagtttgagttttgggtggtagggttaggttttggttatggtttttaatttgggtgaggaagcgagatagtgagtgaaagatggtggaaaggaaagatgaatttaggaaaaaaagagaatgatgtatgtaggaaaggatagatggttggatggaggaagataaggaggaaaagatgaatagttgaagggaagaaaggatggagagaaggaggggagaagagagagaaatatgaatggatagaaggtaaaagggacggatggattaatggagggaggaaaggagggggaaagatggatggatagagatgggaaagatggggggaaagaggaagggaagtacggagggataggagatggatggatgaatagatggaaagagggaagggagggatgaagggacggtaggaaggagtgaaaaatggagggagggaacgaatgatggatgaaagaaggaatggtaggagagaggaagggtaaaaagaatggatataaataaagaaggaaggaaagaaggaaggaggaaggaagggagggaggaagggagaagagatggtagggagggcgtgggcggtatttgtggtcgagttggtttgcgtttcggattcgagggcgacgtagacggagtttagaattagatttagttagagaaggtttcggtcggttcggggtggcggtatttcggtttcgacgcggtcgttttagagcggcggggataggttgtagtaggtggcgtagttagtagtcgtcgtcgtagttatagagattttttcgtcgggaatttatgaagattgcgtaatatagtcgtcgttcgggttcgtaggttcgggcgttggtcgtagcgcgagtgcgttcgtgcgatttttttttgcgttttttttttttcggggcgggttttagaggtgcgcgttattttgtagtaataggcgtggtcgagagataggcgtagagcgggggcgggttagttgttttgtaagtttcgtagatttagcggttcgtaggtttttaggtgtagaattgttaggggtatagcgatttagttattgtttttaataattagtagttattcgtttttttgtttttgtttgtgttatgttttttatttggaagttttgtttttttttttttttataaaagatatattttttgtaagttagttttaatgttattttttttttatgaggttttttgagaaagtttttttttttatttaaagggatttttttttttatttatttttttaattaatttttattaagtatcgtaaatatgtatattaggcgttgttggtggtattggggttttatgtttttgttttggtggagtttaaaataataaaaaaatatagagagtgtcggtgggtatattcggtttggagaaaaataaagcgtgggtgcggggtatgtttgttattttttatggggtggttaggtagggttttattagtgaagtggtatttgaataaaattttgaagtaagtgagggagtaagtcgtattgaggtttgtaagaagggtgcgttaaatagagagagtagtaattgtggggagatggaattttagttttatattgtattgtattgaatattattatatcgttttaatattgtaaatatagtttgatttttaattttgagaattaatttataataaagtttagatgatttaattatgattaaataataatggataatgggaaggtataaatatagttgtgatggtgttgtggtgtattgtttagatttttttttaatattaaaaattttatttttttagttggtttgagagttgttagttgtcgttagtttttattagaaattgttttagaaaaagataggtattttagttaaggttatttttgtttttaggaagtttatattagtgatttaatttgaaggtataaaggtgtagttttttattttaatttgggatatttttgaaaggttattttagttttagagttttttgtggggttaattgaagttttttttgagattgtttattttttttgtttgttgaattttgatttttttttttttttttttttttataggtgttgattttaagagtattttttaagaaattttttgtatattattttatattttagttagtttttttgggaatttggtttgtagtaatagttgataaaaagttgggaggaggaagggagatggtaggaaatgtaggtatattaatttagggttagtattttaggattgttttttttgttttagtttatcgtaaaaaaataataataataataataataaattaatagtcgttatttttagtttatagaaagagaaatatagatttagggatattatttaaagatataaaagtaaataatagaaaatttaaaaatggtaataaatttatatagtaaaaggagaagggaaaatggtagggagagatgaaataaaatttgttatgagttgataattaatgaagtttattgatgaatatttggggtttattatattattttttgtaattttgtataggtttgattaatttttaaaatttaaggttaaaaatatgtatataaaaagaggaatggataagtgattttatttattataggaagaagttagtaatgtttaaagttgaaaatattagaaagttgatatagaaatagtatagtatttagaaagatagggataatttattagaagaaatgaaagtagaaatatttaaaatgagaatagaagagggaaggtgtagggtagagggtttttgttttgtatggtatgttttttggttttttttgatttaggtgttagtgttttttttttaaaaattgtatgttggagttttaatatttagtattttagaatgtgattttatttggaaatagggtttttaatagggtaattaagttaaaaggaggtaattgggttgggttttaatttaatatgattggggtttttattaaaaggaaaaatttggatatagatataaatatatagagagaagatatttatgtgaagataatggattgaagtgatgtatttataagttagtggatgttaatgattgttagtaaattataagaagttaggaagaggtaaggaagtattttttttttataggttttagggggtgtatggttttgttggtattttgatttaagatttttggtttttaaaattgtaagataatgtatttttgttgttttaagttatgtaatttgtagtattttgttatagtagttttagaaaattaatattatttataaataatttaaaatttaataagattgattgttttagttgggatagaaaattatatatgttatttggtataattgtgtgtgtttgtttttgttgtttgtttgttttggtgtaagttcgaggttttgttggggtttatagtagtagaaggataagagtgggagtaagtggagagagttagtaagagagtagtttaggtggttgatagtggttaagaagattggtggattggggataaataaagatttaggagatgggtgaggatatagagaggtagtaagggtgtgagagtattggttttagttttagaatgagattttgaaatttaagatttttgaggtaaaatagattttggtgatttaaaggttaaggatgtggttttgaagttgggaggttgaggtgggggggaagagattgttagaggttagagatgaggaagaagttaagggtttgtgagtggtataggttgttgatgaatatattgtagttttttagaatgatgataggatatagggtattaaggttatttgtgagtttggtatttgagtttttagtgaatgagggataagggttaattaatgttatgtaataaatgattataagtttagtggttgtaaatattatttatttgttattttttattttttgtgggttagaaatttaggtatagttaagttgggttttaggtttagggttttaaaaggttgtagtgaaggattatatttttatttaaagttcgggattgcggatagtataatttataggtgtttaagttttttatataagatggtgtagtgtttatatataatatatatatatattttttcgtatattttatattatttttagattatttataatttttaatataatgtaagtgttatgtaaatagttattatattgtattatttatgaaataatgataagggaaaaaagtttgtatatgtttattgtagagataattatttattttttttaaatttaataggtggttgaatttatagatgtggaatatatggataaggaggttgattgtagtatattttatttatatataaggggttatatatattaggaggtaggaaatttgggggttatttagaatggtatttattataaaagagttttattttgagttttaattttaatagataatagaaaatttaatttagttaattttatatttttttagttatttcgggattgttttattaattattaattattgttattaagtaatttaggattgttttttttgttttagtttattatttaaattttgtgagatttttaaattcggagagagagagtaagagagaagagaatttgtttgttgttaatggtaatttgtttatgttagtatttatttttaatgtataattttatttagcgtttagagatggtatatttttatgttgttttttaatgtggtgtcgttattttaatttggtttttagttgtatagtttatgttattttttatgtgatattttttggagacgtgttttttttttcgtttttttttttttttttttttttttttttttttttttttttttttttttttttttttttttttttttttttttatttttttggaggtacgggaaaatttaattgtttttttatgttattttagtgttataggaagtttaggggattgttttagatatttttgtagttaagatatgtggatttggtgtgagaggagttttaggattttggattttttagggtattatatagtaaagggagtttttttgtttttggatttttattttattttcgtttttgagtttaattttaggaggaggggataatgtatattggtaaattggtatatagttttatataatggtaggatgaggatttaggggagaatttaagatttgttttttattttagatttagggatttttggatgggtattttttaagggtaggttttgttttgtttatttattattgtattttaggggttagtattttcgtggggttttaagggttcgggatgagaattatgatgagaattatttggatgaggaaagggagtgttttaggttgtttttagtttaatgttagtgagggtttttttttttgtagagttatagggagggttttgggttttgtaggtacgtgaaatggtgttttaaggaggagtttaacgtgggttgtgaatgttatttaaatgcgttgggtacggagggtattgtttttagaagagattattttaaggtgcgtgaggtaacgtgttagaattttgtttttaatttgaattttggagagtatagatggttatttataggtatttagtttcgtagttaggtttgtgttattttgaggattaaggtgtagtagtagtagttttaggttttttggggttttagaggagtgaaagtgaatggtaatatagttagaatttgattttgttttattttttaggaagaagtgaagtcgtatggagtatgagggggtagttaaggggttgggtattatagaagttttgatatttgttgggtttttattttgtattatatattatattaaaaattttaggagttgagatatttttttataatggaagaggttagttttagtttcgtttgtttgtggatattttgtatcgttttttgaataattttttttttttttttttttttttttagttttcgttttatcgttttttttttttttttttttttttttttttttttttaagtttaagatttttttgttatgttaggtaat

SEQ ID NO: 947 - DNA, 5814 bp, Artificial Sequence
  chemically treated genomic DNA (Homo sapiens)
  unsure 5111: n is a or g or c or t
tttttagtagagacgagtttttatcgtgttagttaggatggtttttattttttgattttatgattcgttcgtttcggttttttaaagtgttggtattataggtatgagttagcgcgtttggtttagtgtcgtttatttttaaaattataagtgattggttgattttaggtttttttgggatagaggttgttatagattttgagtttttggttttatttttagttgtttgtatgtattgggttataggattagtattttataagtttagtttggttttagagaggtttttttaggtaggatggaggtaaagttgttttttgttgttttttatttgtgggagggggcggttttttttgttttcggtggtttgtcggatgttaagtgtgggaggaggttatttttcgtaaatttttgggttgtttggtaagttttgtgggattttttgagcgaagagaaatgggtgcgtgcgtgagggtacggtgttgttggttatattgttggggagttcggtggacggttgttgttttatttttgttcggacgtttttagtgaaaggcggatttggaagtaatgtgttaggcgtggttttagttttgaggttttcgtcgattagtggttttttttttacgtttattataagttattgggttattgtttaaaaggtgttttttgtagggtagagatttgtgtgaattttttgttttatagagttttaaaatttaaatcggaatcgtatacgtttttatatatagtaaggttttttttttggtttgtcgtggtcgggttcgtgtgtttttttatattttattgaaataaattttggggatatattttagaataattttttaattttttttgaggtcgttatagttttttttgtgttaaattttttttcgttttttttgtataggaatattgggattatatttagggtttattcggataattagaattatttttacgttttggatgttttacggaattatgtttgtaggcgttcgttatgtgaggcgataggcgcgggtttggataggacggagggcgtttttaggaggtttttttttttttttattttattttttttatatagtatttgtgttatttttgttgtaaattttaattttttagaaatatgtgaaattttgtaatatgattgttttatgcggttacgatttattaggtttatatataatatatcgtttttgttgtttttgttggggtttagaaaatgttatttagagtgaaggttttggaagttaggtttttttttgttttttgtttttggttttttattgttttaggtaggtcgtagaaatttaagttttttttttttaaagttagttataaatttaaaagtatgattttaataatttttttttgtttttttgtgtaaaaattggttataaaggaattttttggtttgttttgtttgattgtatgtggttagatttttatttcggggcgttgtgtttttatttagtaggagggagagttgtagagagaggtttttaggaatcgaagtagatgggtttcgttgggtttttttaggagtttgttagtttgttaggttttaatttttcgtttaattttatttttagatttatagaatttgagtataaaaatgtggttttttttgcgtttttaggtttttgttttgaaagttgttgtgttatataaaattataatttaagaaatttgtgtatttttttagtgaaattttagaaaggtaggggaggttttttttttttttcgtattttttatttttttttttgtatttttgagttgggatttgggatattattttttttatttgaagaatattatttaattttgttttttttttttgaaatagggttttattttgttgtttaggttggagtgtagtgacgtgattttggtttattgtagtttttgttttttaggttaaagtaatttttttgttttagttttttgagtagttgggattatagacgtatgttattacgttcggttaatttttgtatttttggtagagatagggttttattatgttggttaggttggtttcgaatttttgattttaggtgatttgttcgttttagttttttaaagtgttgggattataggtatgagttattttgtttagtttagttggatttaatttgttgttaaattaattcgttattagttttattgagatatgatttatatataataaaatgaagtaagtttaagtgtattatttaataaatttttattaagttttatgaggttttaatattttttttaatgtttttattttgaaaaattttaaatttatagaaaagttgtaataatagtatatagtttttatttaggtttattaattgttaatattttgttatttttgtttttattttagtttttgtatgtaatttaaatttattgttttgttttaatttttagagtaattttggttataaatttattgattttttatttttaaattttttagtatggattataaatgaataaaaaatttttatttataatcgtgatgtaattattgagtcgtttaataattttggagtttgatttagcgcggtggtttatgtttataattttagtattttgggaggtcgagataggtggattattcgaggttaggaggtcgagattagtttggttaggatggtaaaacgttgtttttattgaaaatataaaaattggttgggcgtggtggtttatgtttgtaattttagttatttaggaggttgaggtagaggttgtaatgagttgagatcgtattattgtattttagtttggataatagagtgagatttcgtttaaaaaaataaaaaataaaaataaaaaaaattttggagtttattattggtagaattttgttgtataatgtataaggtatattttaaattgtgaatgtttttattatgtattttgtaataattttttttgattcggatttattttagtatcgtgtagtgaggatttttgtttgtttttgttttgttttatttttttttagggaaggtgtatttttttgtttataggtgtttcggtgagcggtttattttaatttttttagggtttgaggtgatttaaggttggttttagtttttataaagataattttgttgttggtttatttttgtttttaggggatagaattttggggttttaagaaaaatttaaagtttttattaggtttttcgtttgagtttcgatttttgttttgtggttatagtgtgaggaacgaacgtagtagcgtgtcgttatgttttgtgtggttgggatacgttgtaggggtgtggagtcgtcgttttaaagcgggtttcgttttttttcggtttgtttttgtagagtttcgaggttttagaggttttttagagtttttagtgttttggacggtttcgtttagcgttttttagttttgatggttgtttttaggaggcggttggtttgaaataatttagtttttattgttgtgttttgtattacggtgtgggattggtggttttttattgttttttttagttttttgacgttttgaggaattgtttttaaagcgagttatttattattttagttgttttttttggggtcgttggattgagggttttatttcgttgtttttggagatagttttgtatttgtatggtttttttcgttttttttttttttttttattttttagttttttaatgaatttttttgtattatgttttttttttttgttaatttggaatatatatatattattttatttttaaatggttaattatttttaatgtaattttaatataagaagatttaatgttaagtaatattttaatttttttttttaaaataaaaagatttagaatattgtaattttaattattttttttttaatttagagaggattattgtttagtattttcgttttgttagtagattgtttttttttttttttttttttttagagatggggttttattttgttaattaggttggaatgtagtggtgtgattatggttcgttttagttttgaatttttaagtttaagtaattttttattttaatttcgtgggtagttgggttttataggtatatattatcgtatttggttaaattttttttttgtatagatggggttttggtatattttttaggtcgattttaaattttaggttttaagtgattttttcgtgttggtttgtaattttaaagtgttgggattgtaggtgtgagttatcgtattaagtttgttttttttattattatttttatataatgtttgtttggatttatatatgtatatatggattatatatgtattatagttgttttatggtattttcggggtattggttttaggatttttttagatattaaaatttgtaggtgtttaagtatttgatataaaatggtatagtatttgtatattatttacgtatattttattgtgtagtttaaattaagattatttatagtttttaaaataatgtaaatgttttgtaaatagttgttatattgtattgttttaaaatatgtattatttcgtattgttttggttttaaaataatatttttagtttgtttggttgaatttatggatttgaagttaagtgtaaggagggtttagtgtgtttttttggggtaatttttttttttgttaaagcgtacgttttatttaggaggttggggtgagaaaatcgttgaagtttcggagatggaggttgtagtgagttgagatcgcgttattgtattttagtttgggcgataaagtaagattttgttttaaaaatatataaaaatagagaaaaataagatagtaatggtttaatttatatagtattaacgggcgaagcgtttttttgagcgtttttcgagttatcggtttttagagtagtttttgaggttcgtaaggaagcggggttttaagtttgcgcgtgttttcggtttttcgaggtttttcgaggttatttaattttttttattcggttatcgtttttttattaaggtttcgtttcgcggcggcggttatatggggtgcgcgtttagatttcgattcggaggcggaatcggtagtgtagttcgaagtttcgtagttttcgagtacgcgtggttatgcgttttttgcgttttcgcgngcgttgttgttggcgtttttggtttcgtttttggtcgcgttttcggtggttttagtcgaggtttcgtatttggtgtatgtggacgcggttcgcgcgttgtggttttgcggcgtttttggaggagtataggtttttggtgagcgtttcgcggttttcgggattttttggtcgtacggggagagttcgggcgttttttgattgcgtattgtgagagttttagagatcggagtttttttttttggggttttggttttttcgggttcgtttttcgtcgtgtttgtgggtgggttttttatttgagtgggcgtcggggcgtgagtttgggtcgttttttgtagtttaggtcgatgttcgggattttgttttttgaggtaaattaggagttttttttgggagtggacggttttgtagcgggatttggtttgtttgttttattttttttatttagagttgaggtattcgtttttttggtagggttagggttagggttggcgttggtttttcgttttattgttgttgtcgttttttatgaagatgggatttttttatatttttggttttaagggttattttattagttattgaacgtacgggtagcgtttggattttgcgttcgggtagttttgggtttgaacgtgtgtgttagtcgcgttgttagttatgttgaggttcgggattgagtcgtttttttgttgtttttagt

SEQ ID NO: 948 - DNA, 5814 bp, Artificial Sequence
  chemically treated genomic DNA (Homo sapiens)
  unsure 704: n is a or g or c or t
gttggggataataaaggggcggtttagtttcgagttttagtatggttggtagcgcggttgatatatacgtttaagtttaggattgttcgggcgtaggatttaggcgttgttcgtgcgtttagtgattaataaaatgatttttagggttaggaatgtggggaggttttatttttatggggaacggtagtagtagtaagacgaggggttaacgttagttttggttttggttttgttaggaaggcgggtattttagttttaggtggaaggaatgggataggtaggttaggtttcgttgtagggtcgtttatttttaggggagatttttggtttattttaaagagtaggatttcgggtatcggtttgggttgtagggggcggtttaggtttacgtttcggcgtttatttaggtggaggatttatttataaatacggcggggggcgggttcgggagagttagggttttagaggagggagtttcggtttttgaagtttttatagtgcgtagttagggggcgttcgagtttttttcgtgcggttagggggtttcggaggtcgcggagcgtttattagaagtttgtgtttttttagaagcgtcgtagggttatagcgcgcgggtcgcgtttatatgtattaggtgcggggtttcggttggggttatcgggggcgcggttaggagcgaggttaggagcgttagtagtagcgtncgcgggagcgtaggggacgtatggttacgcgtgttcggggattgcggggtttcgggttgtattgtcggtttcgttttcgggtcggagtttgggcgcgtattttatgtgatcgtcgtcgcgggacggggttttggtgagggggcgatggtcgggtgggaggggttgggtggtttcggggagtttcggggagtcgggagtacgcgtaggtttggagtttcgtttttttgcgggttttaggggttgttttgaggatcgatgattcggaaagcgtttagaagaacgtttcgttcgttggtgttatgtgagttgagttattattgttttgtttttttttgtttttgtgtgtttttgagatagagttttgttttgtcgtttaggttgaggtgtagtggcgcgattttagtttattgtaatttttattttcggggttttagcgatttttttattttagttttttgagtaaagcgtgcgttttagtaggaaggagaattattttagaagagtatattgggttttttttatatttggttttagatttatggatttaattaagtagattgaaaatattgttttaaagttaaagtaatacgaaataatatatattttaaaataatatagtataatagttatttatagagtatttatattgttttagggattataagtaattttgatttaaattatatagtaggatgtgcgtaggtaatgtgtaaatattgtgttattttatattaagtatttgagtatttgtaaattttggtatttgggagggttttggaattaatatttcgaggatattatgggataattgtagtatatgtgtagtttatgtatgtatgtgtgaatttaagtaaatattgtataaaaataataatggaaagaataggtttggtgcggtggtttatatttgtaattttagtattttggaattgtaggttaatacgggaggattatttgaggtttggagtttgaaatcggtttgggagatgtattaagattttatttgtataaaaaaaaaatttagttagatgcgatggtatatgtttgtgaggtttagttatttacgaaattgaggtgggagattgtttgagtttaggagtttaaggttgagacgggttatgattatattattatattttagtttggttgataaaatgagattttatttttaaaaaaagaaaagaaaaaaagaatagtttattaataaaacgaaaatattggataataattttttttaagttgggagaaggataattagagttatagtgttttgggtttttttattttggggagaggggttaaaatattgtttaatattaggtttttttatgttgaaattgtattaaaagtgattagttatttaaaagtgaaatagtgtgtatatattttaaattagtaaggaggaaaaatataatataaaaaaatttattaagaaattaaaaagtaagaaagggagggaaaggcgagagaaattatgtaagtatagaattgtttttaggaatagcggggtaagatttttagtttaacgattttagagaaaataattaaaatgatggataattcgttttaaaaataattttttaaagcgttagagaattgagaaaaatagtaagaaattattagttttatatcgtggtgtaggatatagtaatggaaattgaattgttttagattagtcgttttttgagagtaattattagaattggagagcgttgaacggaatcgtttagggtattgggagttttgaggagtttttgaggtttcggggttttgtagggataagtcgggagggggcggggttcgttttggggcggcgattttatatttttgtagcgtattttagttatataagatatggcgatacgttgttgcgttcgttttttatattgtggttataggatagaagtcgaggtttaggcggggggtttggtaaagattttgggttttttttgggattttaaagttttattttttaaaagtaaaggtaaattagtaatagaattgtttttgtggggattgaagttagttttaaattattttaagttttgagagaattaaggtgagtcgtttatcgggatatttgtggatagaaaagtatattttttttggaggaaggtaaaataaaataaaaatagatagaagtttttattgtacggtgttggaatggattcgggttaggaaaaattattataaagtgtatgatggggatatttataatttggaatatgttttgtatattgtgtaataaaattttattaatgataaattttagaattttttttgtttttgttttttgtttttttaaacgaagttttattttgttgtttaggttggagtgtagtggtgcgattttagtttattgtaatttttgttttagttttttgagtagttgggattataggtatgagttattacgtttagttaatttttgtatttttagtagagatagcgttttattattttggttaggttggtttcgattttttgatttcgaatgatttatttgtttcggttttttaaagtgttgggattataggtatgagttatcgcgttgggttaaattttagaattattaaacgatttaatgattgtattacggttgtgaatggagattttttgtttatttgtgatttatgttgaagggtttagaggtgaagaattaatagatttgtaattaaagttgttttggaaattaaagtaaaataataaatttagattatatatagagattgagataaaagtaaaggtagtaaaatattaatagttggtgaatttgggtgaaaattatatattgttattgtaatttttttgtgagtttgaaattttttaaaatgaaaatattgaaaaaaatattaaaattttatgaaatttagtaaaaatttattgaatgatatatttgaatttgttttattttattgtatgtaaattatattttagtaaagttgataacgaattggtttaatagtaaattaaatttaattaggttgagtaaggtggtttatgtttgtaattttagtattttgggaggttgaggcgggtagattatttgaggttaggagttcgagattagtttggttaatatggtgaaattttgtttttattaaaaatataaaaattagtcgggcgtggtggtatgcgtttgtaattttagttatttaggaggttgaggtaggagaattgttttaatttgggaggtagaggttgtagtgaattaagattacgttattgtattttagtttgggtaatagagtgagattttgttttaaaaagaaaagataaaattaaatggtgttttttaagtagaaagaatgatgttttaaattttagtttagaggtgtagaggaagaagtgaagagtgcggggggaagggaaaattttttttgtttttttgaagttttattaaaagggtatatagattttttggattgtagttttatgtgatatagtagtttttagagtaaagatttaaaggcgtaggggaaattatatttttatatttaggttttgtgaatttggaaataggattggacgaaaggttaagatttgataggttaatagatttttgggggagtttagcgaggtttatttgtttcggtttttggaggtttttttttgtagtttttttttttgttgggtgggggtataacgtttcggaataggggtttgattatatatagttaaataaggtaggttagagaatttttttatggttagtttttatatagaaagatagagaaaagttattagagttatatttttaggtttatggttggttttggggaaaaggggtttaggtttttacgatttgtttgggataatgaggggttagagataggaggtaggagaaggtttggtttttaaggtttttattttgggtgatattttttgaattttaataaaagtaatagaaacggtatattgtgtataaatttaatgaatcgtaatcgtataaaataattatgttatagggttttatatatttttggggaattaggatttatagtaagagtggtataggtgttgtatgggaaaagtgaagtgagaggggaggagagttttttgaagacgtttttcgttttgtttaggttcgcgtttgtcgttttatatggcgagcgtttgtaggtatggtttcgtgaagtatttaagacgtagagatgattttagttattcgagtgggttttgagtgtaattttagtgtttttatataggggagacggaggggggtttgatatagaggaggttgtaacggttttaggagagattgaaagattgttttaaaatgtgtttttagggtttattttagtgaggtgtggggagatatacggattcggttacgataggttaggaggaaggttttgttgtgtgtagagacgtgtgcgatttcgatttagattttggggttttgtgaggtaagagatttatataggtttttattttgtaggggatattttttgggtaatggtttagtggtttataataaacgtggggaagaagttattggtcggcggaggttttagggttgagattacgtttggtatattgtttttaggttcgttttttattgggggcgttcgggtaggggtggagtagtagtcgtttatcgggttttttagtagtgtggttagtagtatcgtatttttacgtacgtatttattttttttcgtttagagggttttatagggtttgttaggtagtttaggggtttacgggaggtgatttttttttatatttggtattcggtaagttatcgaggataggggaagtcgtttttttttatagatggaagatagtaaggggtagttttgtttttattttgtttagagaggtttttttgaggttaagttgagtttgtggggtgttggttttgtgatttagtgtatataggtagttggggatgaggttagaggtttagggtttgtgatagtttttgttttaggagagtttggggttagttagttatttgtggttttaagagtggacggtattgggttaggcgcgttggtttatgtttgtaatattagtattttgggaggtcgagacgggcggattatgaggttaggagatagagattattttggttaatacggtgaaaattcgtttttattaaaaa

SEQ ID NO: 949 - DNA, 18512 bp, Artificial Sequence
  chemically treated genomic DNA (Homo sapiens)
tttttttttatttattaattatttagtttattatttattttagattttattgtttttatttattttatggttttttttattttggatatttcgttgttatttatatgaatttgatattttttaaatttttttaagttttgtagttaatttttttttgtttattatatgtattttagtaattttttattgtttatgttttattaatgaatttttttttattttttaatggtgtaatggaattatttttatttttatatttatttttattgagattataggaggaaagagatttaaattgaataaaattttagtttttatgagtattttatattttttttttgttaattattgtattggtttatttttgtattgttataaagaaatatttgagattggataatttataaagaaaagaggtttaattggttcgtggttttataggttgtatagaaagtatgatgttggtatttgtttcggttttggggaggttttaggaaatttataattatggtagaaagtaaacggaaagtacgtgtattatatggttggagtaggagtaagagagagggggtattttaattcgaaaggattagaaatagtttttatttatatggaatgggtaatatatatatttaaagtttttttaggttttatttgttattttttgatataatataatatgtagagatttggagtatttggattttttataagatattattgtttttttattgatagtattattttgattagaggagatgaggaagtagtatgttaaatattttggtaagatagatgtgttttagagggtaggaaataaagtttggtatatcggtaaaatttttaggaaattagtgtttaggaacgtgttagtatattttttttaatgtaaaagataaattattgtattttgtattttttttaataaagaaggaagtataaaatttgatgaggttttttggattttgggagtaaatattttgtagtagggaatattgttttagttgttaaagtagaaatggtttttgtagtggtttagtagattttatggtattagaagttttagtgatgggggaaaaaatgttgtgtggtgtttgaggaagattttgtgggagaattataatataggattttagggttttggagtaaggttatgttatttgtagtagagaattgtgtgttttttaaagattaatttgtatattattggtttttggtaaatgtagaataatgaattataggatattatattattatacggttagaattgtttattatgatttggatttaaatggattcgtaaagtataaggataagtaggtttaggaaaaatgtattgtaagatagaagtgtgatatttagagttaaatataaataggattagaggtatgagtaatgtgtataaataggtagtaggtagtttagattgtttttgtttttagtatttaaatagttgtatttatggtttttttttagtttatatttatagttttttggggaatttggtatgattagttgaaggaggagagaaaaggttatattttgtttatagatgggttggtttggtatataggtaagttaaaaatagatagaggtagttttatagttatattttggagtggttttgaaagatagtggtgagagaaagtttttttaaagggtagagttgtagggggtatatttggttatttatttcgtgtggaaagagaggtggtttgaggttagatttatatagaattataggtaatagtgattttttgattattttttgtttttgaaatgaaaaatatttaaagattaagagtaaaaagttttgggaggtaaatagtaattttagtttgagaagtgaatggtaattaagggtttagattatttttgaaagagatcgtgggttatgttattaggtacgttattgagattagtagaggtgggaggtcggagtgaagagaatttagaatggatatgtgtatatataggattgggtatgaagtatataaatttttgtattatggttaggtacggtggtttacgtttgtaattttagtattttgggaggtcgaggtaggtagattataaggttaggagattaagattattttggttaatatagtgaaattttatttttattaaaaatataaaatattagtcgggcgtcgtggcgggcgtttgtagttttagttatttaggaggttgaggtaggagaatggtatgaattcgggagtcggagtttgtagtgagtcgagattacgttattgtattttaatttgggtgatagagcgagatattgttttagaaaaaaaaaaaaaaaaaagatagagaaaaaagaaaaaggaaaaaaaatttttgtattatatgttaatgtttattagaaagtatttattaaagaaaaggtattaaataattaataaaatggtttaattagtttggtttaataaaacgattgagttaaaatgattgagttttagttattagttattttattgttggtacgatgggtataagaatgaagtgatcgtggtaatagagatagaggttatttatgaggttaatagtatagatttcgaggtttatttagtttttattattaataaatgtttaatttgatagtagttgatattaatattgtttttataagatggtataattttttaaggagattaattagttatttagtggtaaattaattatatttgatttttttattttttggagggttagtggtttatttttataggaatagatatatttgaggtatgagtgtgttttttttgtttgtagggtttttattagtattataatttagagaattatagagtgtttaattatttagtaaagattatattttgttagataagggtgtttattttatagtaaagtaggtttaggagtgggtttgtgattatgtaattttttggttatattatatattatattatttagaagttggtggatttatagaatgttataatgggttgttgaggatagagttgaggtgttagttaaatgtaaaattttgtgagaatggggtgttattttttaggaagtagtatatatatttaattaaagatttttatatagtattatgtttttaataggaagaatatttgggtttgggaattaaggaataaaggtaagaattattatatttattattattattattgattaattgggggttttgtgtattttgtttttatagttgtagattttgtagggttcgttattttggtttttaaaggattatatttttattaggggtaagtaagagttttatggaattataaattagagttgttgtttggggtacgttgggttttttgtgtttaggaattagtaagaaagagttagaatttataagggtaattggttttgattatttcgaggaagtagggttgttattattataatgtgggtagggaggaagatgtgtagaatttatataatttattggggtattttttattttttgttttttttggttttttttttaagagagggtttttttttgttatttaggttagagtgtagtggtgtaattatggttaattgtagttttaatttttttttgtgttgtttaggtttattttaaatttttggttttaagtaatttttttgttttgattttttaaagtgttgggattataggagtgagttattatgtttagtttgttttttgtgatagtagggataaaaatggtaatttttgtttgagaaataaaaggtaattaggggtttagattatttttgaaagagagtgtgggatatgttatttagtaagttatcgagattagtagaggtgggaggttaaggtaaagggaatttaaaatggataggaagggggttaagggtaagttttaattatagttttaagattaattgtaagggtaggagttgtagttttttttattaatttttttttttaagtttttttttaagaatagggatttattgaaatgtttaaggagttatttttggagtgtatatggaatatagatttaagaggtgtaagtatgtattttgaaagatatagagatgagttttttagaatttttgttaaggaaggttttgttatttggttgtaaagagtgtagttagaagatatttttttttgatagtatataattgttagatttttttgtgtttgttttagttatagaaaattgttttatttaagtgtatgttttttttgggtaatatatagtaggggattaagtaaggtagaatataatggtttagttatttatattgaaattaggggtattgtgataggttatatttattttagtttaatttttatttttgtttatttttgtttttttttttttttttgtatggatatcgatttttaataaatatttgtgttttatatttattgttttaagtttgtttttgatgaatttaattgtgttagtatttttgttattatagatttattttataaatagataaattttgtatgatagttggtattggtataagaatatttgtttttaaaattttttgtattttaaaaatataatttgattatagtataataaatgtatggtaaagaagttggtttttagagttttaaatgtattttgtagtttttattatatggtttatttttatttttattgttttttagtttttaattttaagtttaaaaaattatatttttattgtataaaaaaaaaattaaaaaattgtttttaatataatttttgttttttttggaatatagaattgagttattgtaattaatagggtgggaggaaattagttttttttggtggaaataagtttttattggttattttttttagttttttaatgggaaggttattttttggttttagttacggtaaatttttttggattttagttaaatttttttagagtttaaaagtataaagttttttaggaggtttgtttttttgaaatatttttttagaggttaaaaattaaattttaaaagaatatttggagtggaaaagagtttttagtagagataaagatttcgaatatttttaatatgaagtttttttatgtttttttgttatttttgtgtttttatttaaggttttgtaaggtaagtaatttaatttttatgtaaataattttaattgataatttaaaggttgtaaaaatatagaaaataattttaaatatataattttgatttaaatattatatagtttagttataataatgttattttatagttagtaataaatgttttatgttaatattttgataaaagtgattttttaaaagtagttttttttatgtgtttatatatgtagaggtattgaattgaataagaattttattaatataaggttgtgatttattgtaattgtagtaaattaaaaatatttattaggttttttttgtgtgtaaggtatagtgttacgaagatagtgagattgatttttttttttaatagttttttagtacgttttatagttatagaaaggggaaataataagtaaatttgaaatatttgaaaatataaaagtgtaagttataagatagtatatatttaattgttaaaagtgatataaatatgtggtaaaggattttaatgagaggataaattattttatgttgagaggttatgaagagattatagattaagtaggatttgagttgaacgtttaattttgtattatatgtgattagtggtgagaaagaggagtgatttttagtttttttagttaggaaaagtagtaagtgttattataggaaggtagtaatgtattaggtttttttaaataaatgaatttatttgattagaatgaaggttttgtgggttataaaggaattcgaaattgaaatgatatattttattgaagttagagtgttatttattaaggtgaaaaatgtttaaaatattttggatatttattgatgattgttaattttggtggtaatttaaaattattttgttttagtgttagtttgtagaagaaaatatttaaagaaaattatttaagaaaatatattttaagatttttgtaatttttaaaatagttgttattattgtaatgtttataatagagaataaatggaaataattaaatgtttattaataagatattggttaaattattgtatatttaaaattgaattattatatagttattgaaatgatatatttatttaaataaaaagtttttattataattttatttttattgaagaaaaatatatatatatatatgtatgtgtgtttatatgtatatatataaatgtatatttatatttatttatatatatgattaaaagattttatagtgtatgtattaaatagttaatagttgttattattggttaataagattattggtgattttattttttgttttcggttttattgaatttatttagataaggaaattaggggatttagaaaagatggaaaagaaatttatagtatagtgggagtggttgttggggttttttaatggggggaataattagaggatgtttaataataaggaagttgattaggtgtgggggtttacgtatgtaattttagtattttgggaggttgaggtaagaggattgtttgagtttaggagtttgaggttgcggggagttttgattatgttattgtattttagtttgggtgatatagtaagattttgttttaaaaaaaaaaaaaaaaaaaaaaaaaattagagaagttaaatattttagttaatatgattatttattataattgtgttgtgacgtaattattaattgatattttaaattttattttattttaaaattttattataaatttaggtatatatgggtggtattttagagagaaagaattggggtaatgttaagtagaatgataatattttggaaataagggtggtatataggagggtgtgtagtgtaagtgatggtagcggaaatggtagagtaggtagatttattaaaattaaaaattaaaaatttatttttatagaaattaaagggaagttgttagaattaattttatttagaattttggaaaatagttaaaggtttatagtatttaagaaaatgttgaatgtaggaataggtaattaaaaatggtatgaaagtttagtagtattttgtgtgtttgttttttgtgtttttgttttatattttttttaatttggtagtggttttgaaggatatttgagtatataaaatagttttaatataataataataaattttggtttattaaaataagtttatatattgttattaaaaagatattttgaaatttattgtatttttattattttagtttgtaaatgttaaagtaatttttttttaaaaatataaattgttttttttattatgtagaatattattttaattatttattatatttttattattttattatttataatattgttgtaaattaattattaagtggtttttttatttataatttttttatgtattttagattttagttttttaattttttatgggaaagtatataaatttgtttatttaatatggaagaaatttttttaattttggtgtagtaaatattgattatgtacgttttttatttagggagggattcggttttttagtattggaaagaatagagaagattttatttaaaaataatgtgtttgttttttttattttaaggtttttttgtaggatagattttaggtatttgttttggttttatttagtttagaatttagagtagaaaagtattaatattataaagtataggtattgtaagattaatgagtaattttagttgtttggggtaaaggattatagtggaggtatataatagagtattaaagtatggggaaaaattaagattttatggaaaattagggtatttaaaagtgtttgtgtgtattggggagtttaggaagttttatatatgtttagggtaggatatatgtttagaaagattttagaagattttgagtttgtatttttggtggttgtttaagtttagtgtaagtatgaagtgaaggttaaggtagagttgtaaatggtttggatgagtgagtgtttaggatagaattaatttgtaaagattgggagagattttgagattttgatttgtttttttgggttttttttttttttttttttttttttttttttttttgtattgaaggaaatttttgtttaaatattagttgaatataagttaaaggaatagattttaaagattatatgtgataaagaatagatttgttaaaagtagtttagaaaagttattaaataaatattaagtaattaaagtaaattttaagtaattaaaataaattttaagtagaaggaagagtttgattttaagagttattgtaagagttaaagtgttaattaaaaatttttaattaaaaattatgatgtatgtaaagatatgagaaagtatggattatttatagaagaaatgaatataatttgttttagaagaattataaattttggatttattaaataaagatttaatggttttttttaaaaaaaaaaaatattttattgagttatgattgatatataataaattttatatatttagtgtatataatttgatgagtttgagtttggagattagtatatgtttgtgaaaatattataatatatgttataaacgtatttattatttttaaaagtttttttttattttttttatttattattttgtgtgtgtatgtaataatttttaataaagaaattgtgtttttagtaaatttttaagtatataatatagtattatgaataataggtattattttgtagtatagatttttaagaattatatattttgatttttgattaatatttttttgttttttttttatttagtttttggtaattattattttattttttggttttatgagtttgattattttagatttttaatataagttgtattatgtggtatttatttttttgtttttgttttgttttatttagattaatgttttttaggtttatttatattgttataaatggtaggattttttttttttttaaggttaaataatattttattgtatgtatatattatattttttttattaatttttttataattgtagaagaatttttttttttgtatatttttagttatatttgttatttttggttattttgataataattattttaattggtgtgtgattttgatttaaatttttttaatggttagtgatattaaatatttttttaagtatttattgattatttatatattttatttgaagaaatgtttatttagtttttttgtttattttttaaagtagattatttggtttttggtttttgatttgtaggaattttttatgtattttagatagatattaattttttattagatgtatagtttgtaaatattttttttattgtatatgttgtttttttattttgttgtgtagaaggtttttagtttgaggtagttttatttgtttgtttttgtttttgttgtttgtgtttttgtcgttatagttaagatattattgttaagattaatgttaagaagtttattatttatgttttattttaaaagttttatgattttaggtgtatgtgtaagtttttaatttattttgagttgatttgtgtgtatggggtaatataggggtttaattttagtttttgtatgtggatttttagtttttttattattatttattaaaaagattattttttatttattatatatttttggtttttttgttgaagagtagttgattatttatgtatggttttatttttgaattttttattttgttttatgaatttatatgtttgtttttatgagagtattatattgttttgattattgtagttttgtgatattttttgaaattaggaagtgggatgtttttggttttgttttttttgtttaaaaaattgttttggttattttgtgttttttgaaattttatgtaaattttagaattatattttttatttttgtaaaaaaatgtttttgtaattttggtagggattgtattaaatttgtagattatttgtaatagtataaatatttaataatattaatttttttagtgaaggaatgtgagttgttttgttatttttttgtgtttattttaattttttttattagtgttttatagtttttagggtatgagttttttattttgttggttaaatttatttttaagtgttttatttttttaattgttattgtaaatgagattgttttgttttgttaaagatagggttttgtattgttgtttaggtgggaatgtaatggtaaattatagtttattgtagttttcgttttttgtgtttaagttatttttttattttagttttttaagtaattatgattaaaggtgtgtattattatgttaattaattttattttttgtagtgatgggattttgttatgttgtttagattagttttaaatttttggttttaaaggatttttttattatggttttttaaagtattgggaaataggtatgaattgttgtatttggtttgagatggtttttttaaaattttttttaggatagtttattattgatgtatagaaatattattgatttttgtatgttgtttttgtattttgtagttttagtgttgttgtttattatttttttattttaatttgaataaaattttttattattttttgtaaggtaggtgatgtattttttgttttgatttattagggaaagtttttattttttttttatttttagaggatagtttttttgggtgtaatatttttggttggtagtggttttggggttttttgttttttcgttatgatattttgaatatattattttatttttttttggtttgtagtgtttttgaagaagaagaaatttgaagaataaatttattgatagttttatagggttttttttgtatatgataagttgtttttttcgtttttttaaaattgtttttttgtttttgatatttgagaatttgattataatgtgttttagtttagatttttttaggttagatatttttgtgatttttttggtttttatgaatttagatgtttatttttttttttagatttgagatgtttttaggtattgttaatttaaataagtttttttttttttttttttttttttttttttttgtaaataatataatgtatttattcgttggtttgagggtattttataagttttgtagtttttatatttttttattttgtttttttgattatataattttaaataatttgtttttgagtttattgatttttttttttgtttgattaagtatggtgtatgagttttttattgaattttttagtttttttattgtattatttttatttttaaaatttttttttggtttttttttatggtttatgtttgttgaatattttattttgtttatgaattatttttttttaattttgtgtagttgtttatttgtgtttttttatagttttttgagtttttttaagatgttattttgaattttttgttaagtaatttgtaggtttttaattttttagagttatttattggagttttatgtgttttttggatagtgttttttttttttataatttttgtaatttgtattaatgtttggatgtttgaagaagtagttattttttttagtttttatagattgattttggtagaaaaagttttttataaattagttagttagagattttgggtgggttagttggtaaggttcgtgtgaacggtttgttgtttgagattatgtgtgggtgggtttggtgtttgggtttattagtgggttcggtgttgtggtttacgggtaggtttggtgttatcgttattgtgtgggtagatagttttgatgttagtgtttaggagtagggttgtttttttttttttttataagagagtttatgatttaaaggaattttttttagtatcgtgtatgttgtgtagggtaaagggtaattttataaagtgaaatttatttttttatttttttaatttttttttatatatttgttttatttgtatgttgtaattttttattttgattttggagtttttataaaggtatttttatttgtagatggttgttatattggtgtttttgtgggaagataagtgttgggatattttgttttattattttgttaatgttatacgttttaattgttttaaatgtgtttagagttataggaaattttgataataatgtataaataaatatagaatattaataaataaatagaattgttttggagatagagttttgttttgttatttaagttggagtgtagtggtataattttggtttattgtaatttttgttttttaggtttaagtaatttttatgttttagttttttgaatagttggaattataggtgtttattattatatttagttaatttttgtatttttagtaaagatggggttttattatgttggttaggttggttttgaatttttgaattttaagtgatttatttattttatttttttaaagtgttgggattataggtatgagttatcgtgattggttaataaatagaaattttaaaaaggaattagataaaatttttggagttgaaaagtataataataaatatgaaaaattttttaataggttttagtagaagatttgagtaggtagaagaaatagttaataaatttgaagattagtttatttaattaattatttagtatgagaagtagaaagaaaaaaggatgataaggaatgaatagagtttatgagattcgtgtgatattataaagtatattaaaatatatataatggaattttagaaggagaaaataagaaagtaagagagaatatatgaagaaataatggttgaaaaatttttatatttgattaaatgtatggttgtttatatttaaaaagtttaatgtaatttaagaaggataaatataaaaaggtttaaattaagatatattataattaaattgttaaaattaaggatgaagaaagttttgaaaataatatagttatgagatttcgtaagattagtagtagtttttttattagaaattatggagggtagatgaaaattttatttgttgaaagtaaaaaattgttaattaagaattttgtatttggtaaaattattttttataaatgaaggagaaatgaagaaatttatagataaatagaggttgaaggagttagttattaatagatttgttttataggaaatgtattataagtagttgggtgtggtggtttattgtttataattttagtattttaggggaatgaggtaggaggattgtttaagtttaggagtttaagattattttggaaaatatagtaggagtttatttttttaaaaaataaaattagttaggtgtagtggtatgtatttgtagttttagttattcgggaggttgaggtgggagaattatttgagtttaggagtttaaaattgtagtgagttttgattatattattttatttaaatttgggtaatagagtgagattatttttaaaataaaattaaattaaaataaagaaatatagtgtaagttagagaattttgtatattgtagtgaaaggatatttggtagttatttgaagtaatatgaagaaataaagaattttagtaaaggtaattatataggtaaatataaaagttagtattatattattttggttttgtatttttttttttttttttttatatgagttaaaagataattatataaaacgattttaattttgtgttaatagtgtataatgtataaagatgtaatatgataataataatataaaggaatggatggagtagtataggaatagagttttgtatgtttttaaagttaagttattaatttaaattagattattataaatttaattattattaattgtaatttttatagtatcgaaaaagaaaatatttaaaaaatatatatagaaggaaataaagagagaattgaaatagttgaatatgaaaaaattaattaaatataaaaagggtagtaatggagaaaatgagaaataaaaaaggtataagatatataataaataaatagtaaatagaagagtaagtttttttttattagtaattattttaaatggaagtggattaaattttaatattaaaaggtagagattggtagaattagttttttaaaattattatttaattatatgttgtttaaagaggttgtttttaggtttaaagaaataaaggatagaaaagatattatgtgtaaataataattaaaaaagagttaaagtggttatattaatattagataaaatagattttaagttaaaaatcgttataagagataaattatatgatatattaatgaaagggttaattttttaggaatatataataattatgaatattatatattaaataatagagttttaaaagatatgaatgaaaagtgatagaataaaagagagaaatagataatttttgttttggggggggtgggtttgtttttgtttttgtttttgtttttgagatggagttatttaggttggaatgtagtggtatgatatcggtttattgtagttgatttaagtgatttttatgttttagttttttaagtatttgggattataggagtgtattattacgttcggttaatttgtgtatttttagtagagatagggttttattatgttgtttaggttgattttgaatttttgattttaggtgatttgtttttggttttttaaagtgttgagattataggcgtgagttattgtgtttgattagaaatagataataatataataatagttggaagttttaatattttattttttataatgaatagaaggttaataaggaatggagaatttgaataatattataagtttagtagatttaataattagatatatatagaattttgtatttaataatagtagaatatatattttttttaagcgtatatggaataatttttaagatagatcgtataggatttgttataaaatgagttttaataaattttataaatattgaaattatatagagtagtttttttaattatagtggaataaggttggaaattaataatagaaagaaaattagaaaatttataaatatgtggaaattaaataatatatttttaagtaattaatggttaaagaagaaattataagggtaattgtgaatatttggagataaatgaaaataaaatataatatattaaaatatatgatatgtagcgaaagtagttattaaagataaatgtatagtagtaaatgtttatattaaaaaagaatagaggatttagaaataaggttgtatttttataagtatgtgattttttataaatttgataaaaagaagtaatggggaaaggattttttatttaataaatgatgttgggataattggttagttaattgtagaaaattgaaattggattttttttttagattatatataaaaattaatttaagatagattaaagaattaaatgtaaaatttaaaattatgaaaattttggaagataatttaggtaatattattttggatataggaatgagtaaagattttatgacgaagatattaaaagtaattataataaagtaaaaattgataaatgggatttaattaaattaaagagtttttgtatagtaaaataaattattagtagagtgaatagatattttacggatgggagaaaatgtttgtaaattatgtatttgataaaggtttaatatttagtatttataaggaatttaaataaatttataagaaaaaaataatttattaaaaagtggataaaggatatgaatagatattttttaaaagaagatttatatgtagtagtaattatatgaaaaaaagtttaatattagtgattattggataaatgtaaattaaaattataatgaaatattattttatattagttagaatggtattattaaaaagtttaaaaaaataatatgttgtcgaggttgtggagaaaaaggaatgtttatatatatttagtggtagtgtaaattagtttaattattgtggaatatagtgtggtaattttataaagatttaaaaagagaaattttatttaatttagtaattttattattgggtatatatttaaaggagtataaattgttttattataaagatatatgtatatatatgtttattgcggtattatttataatagtaaagatatggaattattttaaatgtttattaatggtagattggataaagaaaatgtggtatatatatattatggagtattatttagttttaaaagagaataagattaataagattatgttttttgtaggaatatggatggagttagaggttatttttttagtaaataaatgtagaaatagaaaattaaatattatatgtttttatttataagtggaagttaaattatgagaatatatagatatatagaggggtttattagatatattgggtttattagaagatggaggttgggaggaggaagagtattaggaaaaataattaatggttattaggtttaatatttgggtgatataataatttgtataataaatttttatgatacgagtttatttatataataaatttgtataaatttatttataaaataaattttgaatttaaaagttttaaaaaagagtaaagattttaaattgataatttaattttataatttaagaagtatattttttttagaaaaaggaagagtaaattaaatttaaagttagaagaaaaaatagaataaagattagagtagaaataaaaaatatatagtaagataatagaattaatgaaattataagttcgttttttggaaatagttataaaattgttagattttagttaaattgagaaagaaaaaagagagaagatataaatatttaaaattagaagtgaaattggaggtattattattgattttatagaaataagaatgataagagaatgttatgagtaattatatgttagtaaattagataatttagaaatattaatgaatttttagaaatatataaattattaaaattaatttaagaagaattaaaaaatttgaatagagttatagtaagtaaaagtattaaattagtaattgtaaaattttttaaaaaagaaatatttgtaattagatggttttattcgtgagttttattaaatatatagagagaattaatattaattttttttaaatatttttaaaaggtagagaggagggatatattaattgtttttcgcgggggtaataaatttttataatagaaaaattaaagatttttttattttttaataggttttagtgtgtgatgtttttttttttgtgtttatgtgtttttattgtttaatttttatttatgagtgagacgatgtggtgtttggttttttgtttttgtaatagtttgttgagaatgatggtttttagttttattcgtgtttttataaaggatatgagtttattattttttatggttgtatagtattttatggggtatatatgttatatttttttaatttggtttattattgatggatatttgggttggttttaagtttttgttattgtgaatagtgtcgtaataaatatacgtgtgtatgtgtttttatagtagtatgatttataattttttgggtatatgtttagtaatgggatggttgggttaaatggtatttttagttttagatttttgaggaatcgttatattgatttttataatggttgaattagtttatagttttattaatagtgtaaaagtgtttttgtttttttatattttttttagtatttgttatttttcgattttttaatgattattattttaattggtgtgagatggtattttattgtggttttgatttgtatttttttgatggttagtgatgatgagtatttttttatgtgttttttggttgtataaatgtttttttttgagaaatgtttgtttatattttttgtttattttttgatggggttgtttgttttttttttgtaaatttgtttgagtttattgtagattttggatattagttttttgttagatgagtagattgtaaaaatttttttttattttgtaggttgtttatttattttgatggtggttttttttgttgtgtagaagttttttagtttaattagattttatttgttaattttggtttttgttgttattgtttttggtattttagatatgaagtttttgtttatgtttatgtttagaatggtattgtttaggtttttttttagggtttttatggttttaggtttaatatgtaagtttttaatttattttgaattaatttttgtataaggtgtaaggaagggatttagttttagttttttttatatgtttagttagtttttttagtattatttattaaatagggaattttttttttattttttgtttttgttaagtttgttaaagattagatggttgtagatatgcggtattatttttgatttttgaagttattagataatattatttttatttgtattgtgggttgtatttgttttgttttttttttttatttatttatttttaaataggagtttttaatttgttgttaagttaatgtttattttgtattttata

SEQ ID NO: 950 - DNA, 18512 bp, Artificial Sequence
  chemically treated genomic DNA (Homo sapiens)
tgtaaaatgtaaaataaatattaatttagtaataaattaaagatttttgtttgaagatgagtaagtgaaggaaaagagtaaaatagatatagtttatagtatagatgaggatggtgttgtttggtggttttaagaattagaaataatgtcgtatatttataattatttgatttttgataaatttgataaaaataagaaatggggaaaggattttttatttgataaatggtgttgggaaaattggttagatatatggagaaagttgaaattggattttttttttatattttatatagaaattaatttaagatggattaaagatttatatgttagatttaaaattataaaaattttagaagaaaatttaggtaatattattttggatataggtatgggtaaggattttatgtttaaaatattaaaagtaatggtaataaaagttaaaattgataaatgggatttaattaaattaaagagtttttgtatagtaaaagaaattattattagagtgaataggtaatttatagaatgggagaaaatttttgtaatttatttatttgataaagggttaatatttagaatttataatgaatttaaataaatttataagaaaaaaataaataattttattaaaaagtgggtaaaggatatgaatagatattttttaaaagaagatatttatgtagttaaaagatatatgaaaaaatgtttattattattggttattagagaaatgtaaattaaaattataatgagatattattttatattagttagaatggtgattattaaaaagtcgggaaataataggtgttggagaggatgtggagaaataggaatatttttatattgttggtgggattgtaaattagtttaattattgtggaagttagtgtggcgattttttagggatttagaattagaaatattatttgatttagttattttattattgggtatatatttaaaggattataaattatgttgttataaagatatatgtatacgtatgtttattgcggtattatttataatagtaaagatttggaattaatttaaatgtttattaatgatagattagattaagaaaatgtggtatatatattttatggaatattatgtagttataaaaaatgatgagtttatgttttttgtagggatacggatgaagttggaaattattatttttagtaaattattgtaaggataaaaaattaaatattatatcgttttatttataggtgggaattgaataatgagaatatatggatataggaaggggaatattatatattggggtttgttggggggtgggggaatttttgatttttttattatgggaatttattgttttcgcggaaagtaattgatgtgttttttttttttattttttgaaagtgtttgagaaaaattagtgttaattttttttatatgtttggtagaatttacgagtgaagttatttggttatagatattttttttttgggaaattttataattattgatttaatatttttatttgttatagttttgtttagattttttaattttttttgaattagttttggtgatttgtgtgtttttaggaatttattaatatttttaggttatttaatttgttggtatataattgtttatagtatttttttattatttttatttttgtaagattagtagtaatatttttaattttatttttgattttaggtatttgtattttttttttttttttttttttagtttagttaaggtttgataattttgtggttatttttaaagaacgaatttgtgattttattgattttattgttttattatatattttttgtttttattttaatttttattttatttttttttttagttttgggtttagtttgttttttttttttttaaagaagatatgttttttaagttgtaaagttagattattaatttgagatttttatttttttttaaaatttttaagtttagggtttgttttataggtaaatttgtgtaggtttgttatgtaggtaaattcgtgttatgggggtttgttgtatagattattgtattatttaggtattaagtttagtaattattagttattttttttgatgttttttttttttttagtttttattttttaataggtttagtgtgtttgataggtttttttatgtgtttatgtgtttttataatttagtttttatttataaatgagaatatgtggtatttggttttttgtttttgtatttgtttattgaggaaatggtttttggttttatttatgtttttgtaaaagatatgattttgttgattttgtttttttttaggattgagtagtattttatggtgtatatgtattatattttttttatttagtttattattgatgggtatttaaggtgattttatgtttttgttattgtgaatagtgtcgtaatgaatatatgtgtgtatgtgtttttatgatagaataatttgtatttttttaggtatatatttagtaatgggattgttgggttgaatggaatttttttttttaggtttttgtggaattgttatattgtgttttataatggttgagttaatttatattattattaaatgtgtataagtatttttttttttttataatttcgatagtatgttatttttttggattttttaatagtgttattttgattggtgtgagatggtattttattgtggttttaatttgtatttatttagtgattattgatgttgggtttttttttatatgattgttgttgtatataagtttttttttgaaaagtatttgtttatgttttttgtttattttttaatgggttgttttttttttgtaaatttgtttaagttttttatagatattagatattagatttttgttagatgtataatttgtaaatatttttttttattcgtagggtgtttgtttattttgttgataatttattttgttgtgtagaagttttttagtttaattagattttatttgttaatttttgttttgttgtgattgtttttggtgttttcgttatgaaatttttgtttatttttatgtttagaatagtattgtttaggttgttttttagggtttttatagttttgggttttatatttaattttttaatttattttgagttaatttttgtatatggtttaaagaaggggtttagttttaattttttgtaattggttagttagttattttagtattatttattgaatagggagttttttttttattgtttttttttgttagatttgtagaagattatatatttgtaagggtgtagttttatttttgggttttttatttttttttaatgtaggtatttattgttatatatttatttttgataattgttttcgttgtatattatatgttttggtatgttgtgttttgtttttatttatttttaagtatttataattatttttgtgattttttttttgattattggttgtttaagaatatgttgtttaatttttatatatttgtagattttttaattttttttttgttattggtttttagttttattttattgtggttagagaagttattttgtataattttaatatttgtaaaatttattaagatttattttgtgataagttttatacggtttattttagaaattgttttatgtgcgtttgagaaaaatgtgtattttgttattattgagtgtagagttttatatatgtttagttattaggtttattgggtttatagtgttgtttaagttttttattttttattgattttttatttattatagaaagtggagtattgaagtttttaattattattatattattatttatttttggttaggtatagtgatttacgtttataattttagtattttgggaggttaagggtagattatttgaggttaggagtttaagattagtttgggtaatatggtgaaattttgtttttattaaaaatatataaattagtcgggcgtggtggtgtatttttataattttaaatatttgggaggttgaggtatgagaattatttgaattagttgtagtgagtcgatattatgttattgtattttagtttggatgattttattttaaaaataaaaataaaaataaaaataaatttattttttttaaaataagaattgtttgttttttttttttattttgttattttttatttatattttttggggttttattgtttagtgtataatatttataattgttatatatttttgaagaattgatttttttattaatatattatgtaatttattttttgtaacggtttttgatttaaggtttattttgtttggtattagtatagttattttagtttttttttgattgttatttgtatataatattttttttattttttatttttttggatttaaaggtagtttttttagatagtatatagttggataataattttaaaaaattgattttgttaatttttgttttttgatattagaatttaatttatttttatttaaagtaattgttgataagaaaggatttatttttttatttgttatttgtttattgtatgttttatattttttttgttttttattttttttattattgttttttttgtgtttagttgatttttttatatttaattattttagttttttttttatttttttttgtgtatattttttagatattttttttttcggtattatggagattataattaatagtgattaaatttatagtaatttagtttgaattgataatttggttttgagagtatataaaattttgtttttatattgttttatttatttttttatgttgttattgttatgttatatttttatatattgtgtattgttaatatagaattagaatcgttttatatagttgttttttaatttatgtgggaaaggaaaagaagagatataaaattaaaataatataatattggtttttatatttatttatgtagttatttttattggagttttttatttttttatattattttaagtaattgttaaatgtttttttattgtagtatgtagggttttttgatttgtattgtatttttttattttaatttaattttattttagagatgattttattttgttgtttaggtttgaatgaagtggtgtagttagagtttattgtagttttgaatttttgagtttaagtgatttttttattttagtttttcgagtagttgagattatagatatatgttattatatttagttaattttattttttagagagatgggtttttgttgtgttttttaggatagttttgaatttttgggtttaagtagtttttttgttttatttttttaaagtgttgggattataggtaatgagttattatatttagttatttgtagtgtattttttgtaggataggtttattagtagttaatttttttagtttttatttatttgtgaatttttttattttttttttatttgtgaaggatagttttgttagatatagaatttttggttgatagttttttatttttaataaataaaatttttatttgttttttatggtttttgatgagaaagttgttgttaattttacggaattttatgattatgttgtttttaagattttttttatttttggttttgataatttgattataatgtgttttggtttgaatttttttgtgtttattttttttggattgtattgagttttttgaatgtggatagttatgtatttgattaaatgtggaaattttttagttattatttttttatatatttttttttatttttttattttttttttttggggttttattatatatattttggtatgttttatggtgttatacgagttttataggttttgtttattttttgttatttttttttttttttgttttttatattggataattaattaaatggattgatttttaagtttgttgattattttttttgtttgtttaaattttttattgaaatttattagaaaattttttatgtttgttattgtgttttttaattttagaagttttgtttagtttttttttaaaatttttatttgttggttagttacggtggtttatatttgtaattttagtattttgggagggtgaggtgggtggattatttgaggtttaggagtttaaaattagtttggttaatatggtgaaattttatttttattaaaaatataaaaattagttgggtgtggtggtgggtatttgtaattttagttatttagggggttaaggtatgagaattgtttgaatttgggaggtagaggttgtagtgagttaagattgtgttattgtattttagtttgggtgatagagtaagattttgtttttaaaataattttatttatttattaatattttatatttgtttatatattattattagggttttttgtagttttgagtatatttaagatagttgaagcgtgtgatattggtaagatggtggaataaaatgttttagtatttgtttttttatagaaatattaatgtaataattatttataaataaaaatatttttatgagagttttaggattaaggtgagaggttatagtatgtaagtggaataaatatatgagaaaaaattgaaaggataagaaaataaattttattttatagagttattttttattttatatagtatatacgatgttgaaagagatttttttggattatgagtttttttgtgggggaaaaagagagtaattttgtttttgggtattggtattaagattgtttatttatatagtgacggtggtattaggtttgttcgtggattatagtatcgagtttattggtagatttaggtattaggtttatttatatatggttttaagtaataagtcgtttatacgggttttgttagttgatttatttagaatttttggttgattgatttgtgaaagattttttttgttaaagttagtttgtgaagattgaaagaggtggttgtttttttaaatatttagatattaatataggttataaggattatgaagaaaaaagatattatttaaggagtatataaagttttaataagtgattttaaagaattggagatttataaattgtttgataaagaatttaaagtaatattttaaagaagtttaaagagttataaaaggatatagataaataattatataaaattaggggaaaataatttatgagtaaaatgagatatttaataaatataaattataaaaaagaattaaagagaaattttggaggtgaaaataatataataaaggaattgaaaaatttagtagagagtttatatattatatttagttaaatagaagagagaattagtgaatttaaagataggttatttgaaattatatggttagaggaataaaatgaaaaagtataaagattataggatttgtgggatatttttaagttaacgaatgaatgtattatgttatttatagaaggagaagagaaagggaaaaggaaagaaagtttatttaaattaataatgtttgaaaatattttaaatttagggaaggaaatggatatttggatttatgaggattaaaaggattataaagatatttaatttaaaaaggtttagattgagatatattataattaaatttttaaatgttaaagataaaaagataattttgaaagaacgagaaaagtaatttgttatatataaagaaaattttataaaattattagtggatttattttttaaatttttttttttttagaaatattgtaggttaggaaagagtgggataatatatttaaagtgttataacgaagaaataaaaaattttaaaattattgttaattaagaatattatatttagaaaaattattttttaaaaatgaaagagagataaagattttttttaataaattaaaataggaaatatattatttgttttataagaaatgataaaaggttttatttaagttgaaatgaaaagatgataaatagtaatattaaagttgtaggatataaaaataatatataaaaattagtggtgtttttatatattaataatgaattgttttagaaagaattttaagaaaattattttaggttaggtgtagtagtttatgtttattttttagtgttttgagaggttatggtgggaggattttttgaggttaggagtttgagattagtttgggtaatatagtaaggttttattattataaaaaataaaattagttggtatggtagtgtatatttttggttatggttatttgagaggttggggtaggagggtagtttgagtataggaggcgaagattgtagtgggttataatttgttattgtatttttatttgggtaatagtgtaaaattttgtttttaataaaataaaataattttatttataatagtagttaaaagaataaagtatttagaaataaatttaattaataaggtgaaaaatttatattttgaagattgtaaaatattgatgaaagaaattaaagtaggtataaagaaatggtaagataatttatatttttttattgaaagaattaatattgttaaatgtttatattattataaataatttatagatttgatataatttttattaaaattgtaaaggtatttttttatagaaatagaaaatataattttaaaatttatatggaattttaaaagatataaaatagttaaaataattttttgagtaagaagaataaagttagaggtattttattttttgattttaaaaaatattataaagttgtagtaattaaaataatatggtatttttataaaaatagatatatagatttatggaataaagtagaaagtttagagataaaattatgtatagatagttaattgttttttaataagggagttaagaatatataatgggtgaagaatagtttttttaataagtggtaatgggaaaattggaaatttatatgtaaaaattgaaattggatttttatattattttatatatataaattaatttaaaatggattaaagatttatatatatatttgaaattataaaatttttagaataaaatataagtgataagttttttgatattagttttggtaataatattttgattatgacgataaaagtataggtaataaaagtaaaaatagataagtgggattattttaagttaaaaattttttgtatagtaaaatgaaaagataatatatataatggaagaaatatttgtaaattatatatttggtaagaagttaatatttatttaaaatatatagggaatttttataaattaaaagttaagaattaaatagtttattttaaaaagtggataaaggagttgaatagatatttttttaaataagatatgtaaatggttaataggtatttgaaaaggtgtttaatattattaattattagggaaatttaaattaaaattatatattagttaggatggttattgttaaaataattaaaggtaataaatgtagttgaggatatgtagaaagggaaatttttttatagttgtggaagaattgataaagaaaatgtggtatatatatgtaatgaaatattatttggttttaaaaaagaaggaaattttgttatttgtgataatatggatgaatttagaggatattaatttaagtgaaataaggtagggataggaggataaatattatataatataatttatattaggaatttaagatagttaaatttatggaattagagagtgggatggtggttgttaaggattgggtgagggggaaatagggaagtgttagttaaaggttaagatgtataatttttagagatttatgttatagaatagtgtttattgtttataatattgtattgtatatttaaaaatttgttaagagtataatttttttgttaagagttgttatatgtatatataaaataataaataaagagagtgagaggaaatttttagaagtggtgaatacgtttatggtatatgttgtgatatttttatagatatatattaatttttaaatttaaatttattaagttatgtatattaaatatgtagagtttattatatgttaattataatttaataaagtgttttttttttttaaaaaagattattaagtttttgtttagtgagtttaaagtttgtggtttttttggaatagattatgtttattttttttgtaaatggtttatatttttttatatttttgtatgtattataatttttggttgaaaatttttggttgatattttgatttttatagtaatttttgaaattagatttttttttttgtttggggtttgttttggttgtttggggtttgttttggttgtttggtgtttgtttgatgatttttttaaattatttttggtaagtttattttttattatatgtggtttttgaagtttgtttttttgatttatatttagttagtatttagatagagattttttttaatgtaagaggagggagagagagagagagaagaaaaagaaatttagaaaaataaattaaaattttaaaattttttttagtttttgtagattggttttgttttgggtatttatttatttaggttatttgtaattttattttagtttttattttatatttgtattgaatttagataattattagaggtgtaggtttagagttttttgaggtttttttgagtatgtattttgttttgagtatgtatggggttttttaaattttttaatatatataggtatttttgaatgttttaattttttataggattttagtttttttttatgttttggtgttttgttgtgtgtttttattgtaattttttgttttagatagttgagattgtttattaattttgtaatgtttgtgttttgtaatattaatgtttttttgttttgagttttgagttaggtgaaattaagataagtgtttggggtttgttttataggaaggttttaggatagaaaagataaatatattatttttgaataaggttttttttgttttttttagtgttagggaatcgggtttttttttgagtgagaaacgtatatggttagtgtttgttgtattagagttaggagaattttttttatattagatagatagatttatatatttttttatggaagattaagaaattgaaatttaagatatatgaagaaattgtaagtggaaaggttatttagtggttggtttataatagtattataagtgatagggtgatagaagtgtggtaagtgattaggataatattttgtatagtaagagaaatagtttgtatttttagaagaaaattgttttaatatttgtaaattaaggtaatgagaatatagtgaattttaaaatgtttttttaatgataatgtgtgaatttgttttaataaattaaaatttgttgttattgtgttaaggttattttatgtatttagatattttttaagattattgttaaattagggagggtatggggtaaggatataaaggatagatatataaaatgttattaagtttttatattatttttagttgtttgtttttgtatttaatatttttttaggtgttataaatttttgattgttttttagagttttaaataaagttggttttgatagtttttttttggtttttgtagaaatggatttttggtttttggttttggtggatttgtttattttgttattttcgttgttattatttgtattgtatatttttttgtgtgttatttttgtttttaggatgttgttattttgtttaatattattttagttttttttttttaaaatgttatttatatgtgtttgagtttgtaataaaattttagggtaaaataaaatttagggtattagttggtgattacgttatagtataattatggtaggtaattatgttgattgaaatatttggtttttttggttttttttttttttttttttttttttgagataggattttgttgtgttatttaggttggaatatagtggtatgattagagtttttcgtagttttaaatttttgggtttaagtaatttttttgttttagttttttaaagtattgggattatatgcgtgaatttttatatttagttagtttttttgttgttgaatattttttggttattttttttattagaaggttttagtagttatttttattgtgttatgggttttttttttattttttttgaattttttagtttttttgtttgagtaggtttagtaaaatcgaaaatagaaaatagaattattagtaattttattagttaatgatagtaattattaattgtttgatatatatattgtaagattttttagttatatatataagtaggtataagtatgtatttatatatatgtatataaatatatatatatatgtgtgtgtgtgtttttttttaataaaaataaaattgtagtaaggattttttatttagataaatatgttattttaatggttatgtaatagtttaattttggatatataataatttaattagtgttttattaataagtatttagttatttttatttattttttattataaatattgtaatgatggtaattattttagaagttataagaattttaaagtgtgtttttttaagtagttttttttaaatatttttttttataagttggtattaagataagatagttttggattgttattaaagttggtaattattaataagtatttaaaatattttaaatattttttattttaatagatgatattttaattttaataaaatatgttattttagtttcgagtttttttgtagtttataaagtttttattttgattaaatggatttatttatttggaggggtttagtgtattgttgtttttttatggtagtatttgttgttttttttggttaaagaagttggaaattattttttttttttattattgattatatgtaatatagaattaaacgtttagtttaaattttatttgatttataatttttttatgattttttagtatgaagtgatttgtttttttattgaagttttttattatatatttgtattatttttgataattaaatatatattgttttgtaatttgtatttttgtgtttttagatgttttaaatttgtttattattttttttttttataattatagagcgtattaagaggttgttgaaggaagagattagttttattgttttcgtagtattgtattttatatataggaggagtttggtaaatatttttgatttattataattatagtaaattatagttttgtattagtaaaatttttgtttagtttaatgtttttgtatatataagtatataaaaagaattatttttaaaaaattatttttattaagatattaatataaaatatttgttgttgattatagagtggtattgttgtaattgaattatgtaatatttaaattaaaattatatatttaagattattttttatgtttttataatttttaaattattaattaaaattgtttgtataaaggttgaattatttattttgtaaaattttaagtggaagtatagaaataataggaaaatatgaagaagttttatgttggaggtgttcggggtttttgtttttgttgagaatttttttttattttaggtatttttttgaaatttaatttttaatttttgaaaaaatgttttaaaagaataaattttttaaagagttttgtatttttgaattttgaaagaatttggttgaaatttagagagatttatcgtaattgaaattaaaaaatggtttttttattaaagagttgagggaggtgattaataggaatttgtttttattagaagagattgatttttttttattttgttaattgtaatgatttaattttgtattttagggaagatagaaattatattggaagtaattttttggttttttttttgtatagtaaaaatataattttttaaatttaaggttgaagattaggagatagtaagaataaaagtagattatatagtgaaggttgtaaaatatatttaaaattttagaaattagtttttttattatgtatttgttgtgttgtgattaaattgtatttttggagtataagaaattttaaaaataagtatttttgtgttagtattaattattatgtagggtttatttatttatgaaataaatttgtgatagtagaaatgttgatatagttgggtttattagaagtagatttgagatagtgagtgtggggtataagtgtttgttagggatcgatatttatataaggaagggaggggaagtaggggtgaatagaggtagaagttgaattggagtgagtgtgatttgttatagtgtttttgattttagtataaatggttgggttattatattttgttttgtttggttttttattatatattgtttaggaagggtatatatttaggtgagatagttttttgtagttaaggtagatatagaaggatttgatagttatgtgttattaggaggaggtattttttgattatattttttatagttaggtagtaagattttttttgataagggttttgggaaatttatttttgtgttttttagagtatatatttgtattttttagatttatgttttatatatattttaggagtggttttttaaatattttagtgggtttttatttttgagagaaaatttagaagaggaagttaatgggaaaaattatagtttttatttttgtagttgattttggggttgtagttgaaatttatttttggttttttttttatttattttagattttttttattttgattttttatttttgttggtttcggtgatttattggatgatatgttttatatttttttttaggagtggtttgagtttttggttattttttgttttttaggtaaaagttgttatttttatttttattgttataagaggtaggttggatatggtggtttatttttgtaattttagtattttgggaggttaaggtaggaggattgtttgaggttaggagtttgagatgagtttgggtaatatagggagaggttgaggttgtagttagttatgattgtattattgtattttagtttaagtgataaagagagatttttttttaaaaaagaaattaaaaaaagtaaaaaataagaggtattttagtaggttatgtgggttttatatatttttttttttgtttatattatagtaatagtagttttattttttcggaatgattagggttaattatttttgtggattttgatttttttttgttagtttttagatataaagagtttagcgtattttaggtaatagttttggtttataattttatgggatttttgtttgtttttggtgaaagtatagttttttggagattaagataacgaattttgtagagtttataattgtggagataagatgtataaagtttttagttggttaatggtggtgatggtaagtgtggtaatttttgtttttattttttggtttttagatttaggtattttttttattgggaatataatgttatatgaaagtttttgattgaatgtatatattgttttttggaggatagtattttatttttataaagttttgtatttaattggtattttagttttgtttttagtagtttattataatattttgtaagtttattagtttttgagtggtgtggtatgtgatatgattaggggattgtatgattataggtttatttttgggtttgttttgttgtaaagtgggtatttttgtttggtaggatgtgatttttgttagataattaagtattttataattttttggattatggtgttaatggaggttttgtaggtaagaaaggtatatttatattttaaatatgtttatttttgtaagaatagattattgattttttaaagagtgaaagaattagatgtaattaatttgttattaagtgattagttggtttttttgaggaattgtgttattttgtggggatagtattagtgttagttgttgttaggttgggtatttgttaatgatgggagttagataagtttcggggtttgtgttattggttttatgggtggtttttatttttgttattacggttattttatttttgtgtttatcgtgttagtagtggggtggttgatgattgagatttagttattttggtttaatcgttttgttgagttaaattggttgagttattttgttggttatttagtgttttttttttggtggatgttttttagtaggtattaatatgtgatataaagattttttttttttttttttttttttttgttttttttttttttttttttttgagatagtgtttcgttttgttatttaggttagagtgtagtggcgtgatttcggtttattgtaagtttcgattttcgggtttatgttatttttttgttttagttttttgagtagttgggattataggcgttcgttacgacgttcggttaatgttttgtatttttagtagagatgaggttttattgtgttagttaggatggttttgattttttgattttgtgatttatttgtttcggttttttaaagtgttggggttataggcgtgagttatcgtgtttggttatgatataaagatttgtatattttatgtttagttttgtatgtatatatatttattttagattttttttatttcgattttttatttttgttgattttagtgacgtatttgatgatatgatttacggttttttttaggagtggtttgaatttttggttattatttattttttaggttaaagttgttgtttgttttttagaattttttgtttttgatttttgaatattttttattttaggaataaaagatgattaggaaattattattgtttgtgattttatataagtttagttttaggttatttttttttttatacgaagtggatgattaggtgtattttttgtagttttgttttttgggaggatttttttttattattgttttttaaaattattttaaagtgtggttgtaaagttgtttttgtttatttttaatttgtttatatattaagttaatttatttgtaaataaaatgtgattttttttttttttttttagttggttatattaaattttttagggagttataggtgtgagttgaggaagggttatgagtgtaattgtttggatgttggggataggggtagtttgggttatttgttatttgtttatgtatattgtttatatttttggttttgtttgtgtttggttttggatgttatatttttattttataatatattttttttaggtttgtttgtttttatattttgcgggtttatttggatttagattataatgggtagttttggtcgtatggtgatgtagtgttttgtgatttattattttatatttattaggaattagtaatatataaattggtttttaaaagatatataattttttgttgtagatggtatggttttgttttagaattttgaggttttatattgtggtttttttataggattttttttaaatattatatagtatttttttttttattattgagatttttgatgttatagagtttgttggattattgtagaagttatttttgttttggtagttggagtagtattttttattgtagaatatttgtttttagagtttaaaaagttttattagattttgtgtttttttttttgttaaagaaagtataagatataataatttgttttttatattaaagaggatgtgttagtacgtttttgaatattggttttttaaaaattttatcgatgtgttaggttttattttttattttttggagtatatttgttttattaaagtatttagtatgttatttttttattttttttgattaagataatgttattaatggaaaaataatggtgttttatgggaaatttagatgttttagatttttgtatattatattatattagaaggtggtagataaggtttgggaaaattttaagtgtatatgttgtttattttatgtgaatgagaattgtttttgattttttcggattaaaatgtttttttttttttgtttttattttagttatgtaatgtacgtgtttttcgtttgttttttgttatgattgtaagttttttgaggtttttttagaatcggagtagatgttagtattatgttttttgtatagtttgtggaattacgaattaattaaattttttttttttataaattatttagttttaggtatttttttatagtagtgtaagaatggattaatatagtagttaataaaaagaaaatgtaaagtgtttatgaggattgaaattttatttagtttaagtttttttttttttatgattttaatgaaaataaatataaaaataaaagtaattttattgtattattgaaaaatgaagaaggatttattaataggatataaatagtgaggaattattagaatatatataatagataggaaaagattaattgtaaaatttaaaggagtttaagaagtgttaaatttatataggtgataacgagatatttaaaataagaaagattatagaataaatagaaatagtagaatttgagataagtgatagattaagtaattaataaataaagggaag

SEQ ID NO: 951 - DNA, 6963 bp, Artificial Sequence
  chemically treated genomic DNA (Homo sapiens)
ttatgttaatgggagtgtttagttagaggagtggggtggttgtattgttggtgtaagtatgggattttattttttgggaaataggaggtggaaattttattagtaggagattgttttttttattatgtggtaattgtagtgtgttggaagtttaggtgattgtggtatgatgtaagtttttaaataaagagtttcggattttttgttttttttttagatttaaggtagtagggataaaattgttgttgtggtagtggtagaggtaggttggttttgggagtttttttttagggaaattttagttaattattagtggatatgtttagttatgggtagggtgattgttttgtagttatgcgttgggggttttgatttttgaagaatagggatggggatttttagggaagaggggttggatttttttttgtatagtggttatgatgtgttggaggtgagagtgtagtgaataggttttttgttttttttttagtcggagggatgttggggttgttttattgtaacggttatgatggatggattgtgggttgattgtgggattttttttttggagaaatgttggattgtttgattgaggagatgaggtaggggaagggtgtttatgttggagtttttggttaggtggttttgtttatagaggagaggtgataattaggaattgcgtggagaatagtgtggttatttttttgtgaggtagttgttttgttttggggatttggagtagtcgttattttttatagattttttagagtttggagatagtaagggtaagagttgtgagaaagtaaagatggtaatttattatttttattgggagttttgttttagggaattgtagagttgttgttggtttaatagttttaggtggtagttgtagatttaggtttggtagatttttttagtgaggagagaggggattagggatttatataatatatagtttggttatttttttatagggttgttgtaatatgttgggggtttaatttagattatagttattttatattttttagtatttgaagatattaatagtgaaggttatgaaatagtgaagatggggatttgtttttttttttgggagttttgttttagagaggtataatttgttgttttttgtaatatatatgtaggaggtggttggagatttcggtggcgatattttatttattgaggagaagtagtattagggaattaggtgaagaaatagtttggttattttttggtagagtagttgtgttgtgttgggggtttgttattatttttagtataaaagagtggtatttgtaagaatggttaaggttgttaaatagtaataatggtaatttatttttttttttggaagcgttattttagggatattcgaaattgttgtttgtagaaaatagcggtggaggtgattggagattttagtggggagattttatttagtgaaaagaagtaggatttgggatcgatatgaataaagtatttgattgttttttcgtagagttgttgggttgggttgggtggttgttttagtttttagttgtttgaatttattagaatttaaaggttttaatagttaagattgtgaaatagtaaagatggtagtttatttattgtcggttgggagttttatgttagggaggtatgaggttgttattagtgtttggttggatttttaagttagtgggttttattttgagataggtaatggaaggtgggtttgttatttgttattgtttagcgttttggatgaaattttttttttacgggtatgtataggcgtgtagcgttttgtttggttggagttatagttttttttgtggggaggtttgggtatttaaggttttagggtatttatgtatgcgagagcggttgttttgttggaattttacgtagttttggatgttagattaaacgttttggtagagtgggtttattaggagattttttgatttgaggattgtaaagatttgtgggagaagcgtgggtttttagggttgtttatttatttattatttttttgggtaggagaggtttttttggttttgtgttatttttgggggggtagttgttttgttttattttgttttattttttatgggttaagttgtttttttgagttttaatgtgtgtacgtggttgttttagttgaaggtgttgtatttatttgttttttttatttttttttatgagagtggtatatattagtaggttttagtcggttattttggttaattttgaaaattatttgtttttagttataagttatgtatataaaaagaatgttttgagagaatttggagtgcggggtttatttcgattttagtttagttaggttagtagtattttcgttttttaatggttttattgtttgttttattggtggttttgttgttttgttattgtggttttgttggatttttgggttttgatttgttttagaatcgtggtttatttagtaggaatattttggtatttttgggttaaatgtgtagaatttttatttttttgtgttttaaggatagaagagattttaggttttttttggagatgtggatggtagttagttgtagaaggtttaggttttgtttgttttttatgagatgttttagtagatttttagttttttttttatagagcgtttttttgttgtttggaatatgatttttttggattagttttatattggattttattagtagttcgaatgtttggagttttgtttagggtaggtaataggagaggaagaatttgtgggggtgtttggggttttatattggttttgaggaggtatttttagggaatttatgggaatttagagaatttatttgaaagagaagaaatatagtgattgtgtttgggaggttgttagagtggaattatgaaatttttttttttattaatagatttgtaaggattgagaagtaaggatgaagatttggggtttgttttagttttttttattttttttttttttttagttgtgtgtttatttttttttttttagttttttaatttgtaaagttagtttattggtttgaggtttttttttttttttaatataagtttttatagtttttaattttttttttagttttgtttttattgtattatatacgttttggtatgttgtgtttttatttttattttttttaagatattttttaagtttttttttggttattttttttttttttgtattatattttaagttttaggttaaatgtgtttaacgtgtaagtttgttatataggtatatatgtgttatgttggtttgttgtatttattaatttgttatttatattaggtatttttttttttatatgtttattatatttagatatatatttgttttttttttgtttttataaattaagatgaaaattagattatttttattttttaggaaaagttaagtgagaaatataaatatatttgttgttgtgaatgttatatagaattattgtatagtttatttaaaaatgagaataaatgagaaattagtaaaaattttatttattaaatagttgatttgttaaagtagattttattttatttaaggatttagtatttatagggtttatttatataaaaaaaaattttttatataaaaaaaaaaaaaaaaaagttagagttagagtttaggattatgttgaaagttatttttttgtataataatatttaatatttataaatttatgaatttagaataaagatggttttttttatttgataagaattgatttggataggaatttttgaaaatttttagggaatatgaattttaatgtaaaatgttaaaaatgatttaaattatattattttttaagttatatatgtttattggattgatattttttttaagggtataaaaattagttttcgtagtgtaaatgaatttaatatattataatagtttttgattttttaataattttatttaataaaattttattgtttaatatatatattttttattgggtttttttgtgtatgatatgagaagtattggtattgagtttatgaagataaataaaatatttgtaagattaatgttataaatttatagtaaatagatgattgtgattggaggattttttgtttattttttgttggattttaaagttttattatagtatgtggttttaatttgtatatttttgggttgttattgattattttatagttattagttatgtttgatttttagttttttaggatgtttggtagattttgagaatttaatttaaatagtttatattatatgttttatttttattaaagttatttaatatattagtatttgtgttaagtgttgaaaagaaaaaagttttggtaatatttggatgaatattgtagttggtgaatttataaattatttttttatataaagtaaaatttaaagttttatatattaagagaaaaattttaaaaaattattgatttatatttttaggagttttgaatgattaggtaggtaattatatttatattattaatgtgtattatatagatttttattttgtatatgtattttgatataaaatttgtatgaataaattatattaaaagttattttataaatatatttattaaattaaaataaatgttaatagtttttaaatttagattttagtttaatttttttgtaatttttaattttattttgaataaaaagagtaaattttgtagtttttatttgtgaagtagaggtatacgtaatatatataaatagatatgttaaatttgtgttattaaaattttatgaagattttaattaaaaaaaaattataaaaggttttgagtgtaggtgaaaaataggtaatgatgaaaaaaaatgaaaaattttttaaatatatggagagagtatataaagaaagtaaaaatagagatagaaagtaaaattagggtatttagaaaatggaaattagtatgtttattatttaagatttatgtatagagtaaagtttttagaaaatttagaggtcgaagtttaaggttatttattttaagtagtttagtaatatttgtaatattttaatggttttgtttttttttttatttatggtcgtgttggtgtttagttataaatttatttgttttttaggttgtgatttgttttagatttatagtttgggtaataggagggttttgatatttttgggataaatgggaagaatttttttttttttttgtttgaaggatagatatgattttcgaattttttaggaggagtttgatggtaattagttttagaaggtttaagttatttttgttttttatgagatgatttagtagatttttaatttttttagtatagaggatttatttgttgtttgggaatagagttttttagaaaaattttttattgaattttattagtaattgaatgatttggaagtatgtgtgatataggaggttggggtggaagagatttttttgatgaatgaggattttattttggttgtgaggaaatatttttaaagaattattttttatttaatagagaggaaatatagtttttgtgtttgggaggttgttagagtagaaattatgagatttttttcgtttttaataaatttgtaaaaaagattaaggaggaaggattgaaaattggtttaatatggtaatgattttgattgattaatatattattttatatttttatgagtttttttattttaaagatttatttttataattacgacgcgttgaattaaaatttttaaatgtttttagtagtgtaaagaagtgtcgtgtatatttgtgtaggtattagttttttatagatgattattttgatgtttttgtttattttttgtttaaatatttatttaattatttttaaaatttatgtaatattatgagtcgttttatattgtggttaatgtaataatatatgttttttatatttagttaatatattaatttttttttttattaaatttttattatataaaattttttgtgtttgtttattttttaagataaaatgttaaggttgattttataatttgatttaaaaatagatgatttaattatgttatttattataattttatttaagttataaaaatatatttttttttgtatttggttatatgttgtttttaggatataaacgtgaatataaaatatatagtttttgtttttttgtatttttgatttttttaggaaagaaatttaaaaataataataatgttgaattaatattagtgatgttaattgttataatgtgaggaagtaaaaaaataatgaattttttttagtagaatgtagattgagatatatttggaaataaaagtagagatattttttgtaaattgattttaatatgtaattgaaaatgtatattgtaagttagatatgtgaatttgtagtttttaaggaatacgatatttggaagtttataattggtaatggaaaggacgtaaatgaaggttgttatatggggagtaagtggagagggaaaaaaagatttaaattggattttgaggattttttattattaaagtgtgggaatagaagagatataaaggaaatagaggtggaatattttaatattagaaggataagagggaatggtgataaaagtgtatttagaaaataaatgtgtttagaaaaggaattaataaatttatggaaaatgtgaattaaaattgagtattatagtaagaaaatagatggtaatgtagagtttattgagagttggatttatagaattaattagtagaagttatattggggtagatagaagagtgatttagaaaagagaaattaagataatatatatagaaaatgtgagaaaattgtttttgtaatggtggtaagtaataagtttggatttttaaaaatgtggattattttttatttgtatagtgttttttttttgaaaatatatgttattgaataaattttataattgtgatgtattggtgaattatattaatatattta

SEQ ID NO: 952 - DNA, 6963 bp, Artificial Sequence
  chemically treated genomic DNA (Homo sapiens)
taaatgtattaatatgatttattaatgtattataattatgaaatttatttagtgatatatatttttaaaaaggaaatattatgtagataaaagataatttatatttttgggggtttaaatttattatttgttattattgtaaaggtagtttttttatattttttgtatgtgttattttgattttttttttttgagttatttttttgtttattttagtatggtttttgttgattaattttatgaatttagtttttagtaagttttgtattgttatttatttttttgttgtagtgtttagttttaatttatattttttataagtttattgattttttttttaagtatatttattttttaaatatatttttattattatttttttttgtttttttaatgttaaggtattttatttttgttttttttgtgttttttttgtttttatattttaatggtggaagatttttagaatttagtttaagtttttttttttttttttatttgttttttatatgatagtttttatttgcgttttttttattgttagttatgaatttttagatatcgtattttttggaaattgtaaatttatatatttgatttgtaatgtatatttttaattatatgttgaagttagtttatagagaatatttttgtttttatttttagatatgttttaatttatattttgttaagaggaatttattgtttttttatttttttatattatagtagttagtattattgatattaatttagtattattattgtttttagattttttttttgaaaaaattaaagatataagagaatagggattgtatattttatgtttacgtttatattttgaaggtaatatataattaggtatagaaaaaaatatatttttataatttgaataaaattatgataggtaatataattaaattatttatttttaagttaggttgtaaagttagttttggtattttattttaaagaataaataaatataagaaattttgtatagtaaaaatttaatgaaaaaggaaattaatatattggttaaatatgaagaatatatattgttatattaattataatgtaaagcgatttatgatattatataaattttaaaaataattaaataaatatttaaataaaagatgaatagagatattagaatggttatttgtaaaggattagtgtttgtataggtatatacgatatttttttatattgttgaaaatatttgaaaattttgatttaacgcgtcgtggttatagaagtgagtttttgaaatggaagaatttatgaaagtgtgagataatgtattagttaattaggattattgttatgttgaattagtttttaattttttttttttaattttttttgtaagtttgttgaaaacgagagggattttatgatttttgttttgataattttttaggtataagggttgtattttttttttattagataaagagtgattttttggaagtatttttttatagttaggatggagtttttatttattaggggagttttttttattttaattttttgtattatatatgtttttaggttatttagttgttggtaaagtttagtggaaaatttttttaggaggttttgtttttaagtagtagatgagttttttgtgttgaagagattgaaggtttgttggattattttatggaggatagagatggtttgagttttttggaattggttgttattaaattttttttgggggattcggaaattatgtttgttttttaggtaggagaaaggagagattttttttatttgttttaggagtattaaggtttttttattatttaggttgtgggtttgaggtagattatagtttagagaatagatggatttgtagttgagtattagtacggttataagtaaagaaaaggatagggttattgggatgttgtaaatattgttaggttatttgagatggataattttgaatttcggtttttaggttttttgaagattttgttttgtgtataggttttaaatagtgaatatattaatttttattttttaaatgttttagttttattttttatttttgtttttgttttttttatgtattttttttatgtgtttaaaaagttttttatttttttttattattgtttattttttatttgtatttaaagttttttatggtttttttttaattgaaatttttatgaaattttagtaatatagatttggtatatttatttatgtatattacgtatatttttattttatagataaaaattataaagtttgttttttttatttaaagtaaagttaagaattatagaaaagttaaattaaaatttaagtttaaaagttattgatatttattttaatttgataagtatatttgtggaataatttttagtataatttgtttatgtaaattttgtattaaagtatatatgtaaaataaaaatttatataatatatattaataatatgaatgtagttatttatttaattatttaaaatttttaaaaatatgaattaataattttttaaaattttttttttagtgtatgaagttttgaattttgttttatatgagaaaataatttgtaaatttattagttgtagtatttatttagatattgttaaaatttttttttttttagtatttgatataagtattgatgtattgaataattttagtagaaataaaatatataatgtaagttatttggattgaatttttaaagtttattaaatattttgaagaattgaggattaaatataattaataattataagatagttaatggtagtttaaagatatgtaggttaaagttatatattgtgataagattttaagatttagtaaaaaatggataaaaagttttttaattatagttatttatttgttataggtttgtaatattggttttataaatattttgtttatttttatgaatttaatattagtgttttttatattatatataaaaaaatttaatgagaaatatgtatattaagtaataaaattttgttggatagagttgttggaaagttagaaattattgtaatatgttagatttatttatattacgagaattaatttttgtatttttaaaagaagtattaatttaataaatatatatgatttagaaaatagtatgatttaaattatttttggtattttatattgaagtttatattttttaaaggtttttagaagtttttatttaagttaatttttattaaataaaaaagattatttttgttttaaatttataaatttataaatattgaatattattatgtaaagaaataatttttagtatgattttgaattttggttttaatttttttttttttttttttgtgtaagaagtttttttttgtataagtaggttttatagatattgagtttttaaatggaatgaggtttgttttagtaaattagttatttagtaagtggagtttttattaattttttatttatttttatttttaaatggattatataatggttttatatggtatttataatagtaaatatatttatattttttatttaattttttttagaaggtaaaagtggtttgatttttattttaatttatgggaataaaaagaaaataaatgtatgtttaaatgtgataaatatgtaagaggagaaatatttaatgtaaatgataagttaatgggtgtagtaaattaatatggtatatgtatatttatgtaataaatttgtacgttgagtatatttaatttggaatttaaagtatagtataaaaaaaaaaaagatgattagaggggaatttagaaaatattttgagagaggtgaaaatgaaaatataatatattaagacgtatgtgatgtagtgaaaatagagttaaaggggaaattgaaagttgtaaaagtttatattaaaaaagaagaaagattttaaattaatgaattaattttataagttaaggaattagaaaagaagaaataaatatatagttaggaagaggaagaaaataagaaagattaaagtagattttaggtttttatttttattttttagtttttgtaagtttgttgatgaagagaaggattttatgattttattttgataattttttaagtatagttattgtatttttttttttttaggtagattttttggatttttatggattttttggaagtatttttttaaggttagtgtagggttttaaatatttttatagatttttttttttttgttgtttgttttaagtaagattttaggtattcgagttgttgatgaaatttagtgtggagttggtttaggagggttatgttttaggtagtagaggagcgttttgtggggaagaggttgaagatttgttgaagtattttatggaggatagatagggtttgggttttttgtaattggttgttatttatatttttagggggaatttgaagttttttttgtttttgagatataagaaagtggagattttgtatatttggtttagaagtgttaaggtgtttttgttaagtaggttacggttttgaggtaggttaaagtttagagatttaatagggttatagtggtaaagtagtagggttattagtagaataagtagtaggattattgggaaacgagggtgttgttggtttagttgagttggggtcgggatgaatttcgtattttaggtttttttaaggtattttttttatatgtatggtttatagttggaaataaatagtttttaggattggttaagatggtcgattggaatttgttagtgtgtgttatttttatggagagaaatggaaggggtaagtaaatatagtatttttaattgaaataattacgtatatatattgagatttaagaaaataatttgatttatggagaatagagtaaagtaaggtaggataattgtttttttaggagtgatatagagttaggggagttttttttgtttagggaagtggtgagtaagtgagtagttttggggatttacgttttttttatagatttttgtaatttttaggttaggagattttttagtgaatttattttattagggcgtttagtttgatatttagggttacgtagggttttagtagagtagtcgttttcgtatgtatgggtattttggagttttagatatttaggtttttttataaaagaagttataattttaattaagtaggacgttatacgtttgtatatattcgtaggaaaggggttttatttagggcgttgggtagtgataagtggtaggtttattttttattgtttgttttagggtaagatttattggtttgggaatttagttagatattggtagtagttttatatttttttgatatggagtttttagtcggtagtgggtgggttgttatttttgttattttatagttttagttattggagtttttgggttttagtgagtttaagtagttagggattggagtagttatttagtttagtttagtagttttacggagaagtagttagatgttttatttatgtcgattttaaattttgtttttttttattgggtggaatttttttattggggtttttagttatttttatcgttgttttttgtagatagtagtttcgaatatttttgggatggcgtttttaaagggaagggtgggttgttattgttgttgtttagtagttttagttatttttgtaaatgttatttttttgtgttgggggtggtagtagatttttagtatagtatagttgttttattaaaaggtggttagattgtttttttatttgattttttgatgttgtttttttttagtgggtgggatatcgttatcggggtttttagttattttttgtatgtatgttgtaggaggtaataggttgtatttttttggaatagagtttttagggggaggggtaggtttttatttttattgttttatagtttttattgttgatatttttaggtattgaaaaatgtgaggtgattatggtttggattggatttttagtatattgtagtagttttatggaaaagtggttagattgtgtgttatgtgggtttttgattttttttttttttattgggagggtttgttaggtttgggtttgtagttattatttggggttattgagttaatagtagttttgtaattttttggaatagagtttttagtgaaaatggtgggttgttatttttgtttttttatagtttttgtttttgttgtttttaggttttgggaagtttgtaaggaatagcggttgttttagatttttaaaatagagtaattgttttatagaagagtggttatattgttttttacgtagtttttggttgttattttttttttgtgggtagagttatttgattagagattttagtataggtattttttttttgttttatttttttaattaggtagtttagtatttttttaagaaagaaattttatagttagtttataatttatttattatgatcgttgtagtgggatagttttagtattttttcggttggggaaggaataaagggtttatttattatatttttatttttagtatattatagttattatataaagaggagtttagttttttttttttgagaatttttatttttattttttaggagttaggatttttagcgtatgattgtaaaatagttattttatttatggttgagtatatttattggtagttgattagagtttttttggggagaggtttttagagttagtttatttttgttattgttatagtagtagttttatttttgttgttttgggtttggggaggagataaagagttcgaagttttttgtttaaaagtttatattatgttatagttatttgaatttttagtatattgtagttattatatggtgaggagaatagttttttgttggtaagatttttattttttgttttttaagaagtgaagttttatatttatattagtagtgtagttattttatttttttggttaaatatttttattaatatgg

SEQ ID NO: 953 - DNA, 6876 bp, Artificial Sequence
  chemically treated genomic DNA (Homo sapiens)
aatgtaagaattaatgtatttattatgatagttttgatatttgttgtaatatttttaaataaagttttttttattgttatattaagtgttagaataaatttttttttattagatttttaaattaaggtagtataattaatattgtagtatattttggtgatttataatataaaaggtatgaattagttggtaagttaggtgatttagggttttttgttattttagtttttattttttaatgttatggattttttttatttttttagaagtgtttttatttttatatttttaataatttttttattttagttaatttttttaggtgtgttttttttgagttttgagttttagtttattggtttagttttgatttagtttatgtttgtagtttgataatgatttgtttttttttaaatttgtgttatataggtggaaatttaaagtatggtgtatatttgattaaaagaatagtattatgtagaattttaaatggatagaaatatatagggtttatgaatatatttattggggtaaataatatgttttataaatatatttatgtttatgatagtgtatttttaagaagataaaattagaatataacgtatatatttttttataaggagtataagtaaagcggggtttaattttattgtaatgttgttatgagtaaatggggtattatagtgaaggagataaatggaaattgaagagaaagattttgttattatataggtaggattttattaggaaaggattgattggtttataaattagttttggtttttatggttcgaaatatttttagagagtatgtaagagttaagattttagagttgaattttttgtatttaaattgtagttttaaaatttaatagttttttgtgtttttattgttttttttgtaaatggggataatagtaaaatttgttattgtgtgttttggttagtgatatttttagtgaataaatggggttagggatatggtagatgtttagtaaatacgaaaaataaaagtattttttattggttaagtgagtatcgattatgtaagtgttaaaaatagtgtttgattgaaaataaagattgtttagagtttagatattttattttttttattaatattatttttattatataattttattaagttggggaagtgttttttgaaattattaagttttttgttttttattagaaatataataagaaaaaaattgatttttggagtgtatttatttattagtggagagtttggtgtaatgaatatttaattattttttagagagaatattgtattttttaaagtttgttttttttgtgtataaatgtttgtagttggtgtgtttgtaagatgggttttagtaaatttgaaaatattttgtggattaggagtaattattttttttttagtttatatttatttgttatttttgatttatattttttttattattttgtttttgtttttttttattttttaatttttattatggttgggttgaatgtagttaaggtatattttgttattgtttttttttagtgggatattatttttatttatattttaattatatttagatatatttttgttttatttttgtttttatttattagggtgtaaaaagtgataatttttgttttttatgaaaagagaaagaaagatattatgtttggtatgttatggaaaataattgtataagttatttatgttataatatttatattttattatgaatatttaggataaagatggttttttttagttggattagaattaataaagaatttttgaagtttttttggaaatttgaatttttatgtaaaaaagtgtttttaattaaattgaggatatttttttaattgtgtatttttattgagtatgatgttatttttaagggtgtaaaagtgtagtttttgagagtgggaataaattttatagatttaaatgatttgtggttttttaaagtttaattttatttaataaagttttattttttagttttttgttttttttttattgggtttttttgtgtattatatgagaagtattgatattaagtttatggaagatatataaaatgtatataagtttagtgttataaatttatggaaaatgagtggttgtgattgtagtattttttaaggtttattagattttatagttatattaagagatgtgttttttgtatatatatgttttgttattggttattttatagttgttgtttatttttgatttttagtatttttaattgtgttgtgggttttgaggataatttatattttattaattttataaaaattgtttagtatattaataattaggttaagtatcgaagaaaaaagttttgataatatttaggtgattagtagttagtgaagttaaaaaattttatatatgtaataaaattaaaagttaagtataattttgttatagaggtcgggagaggcgattggttttttgttggtttgtgagaaattaaatttttaatatgataagtaggaagtttgcggttaagggagttagcgtgttataaatataagtatttggggttttttaagagtattatattttttttagtttttggagttatttgtttttttaattggttgtgggaaatggtttgaggttttagatgttgttattgtgttgttgttttttattttttttaagtagagcgtaagtttagttatttttgaaagatatttattttttggtttggggatgtataagtttagagttttgtagggagtaattatgggttatggttttatgaaaatgttttatttattagtgtttttttcgtagatgtggatgtggaggtatgagggagggtaattattggattattaaggtgttgttaagagtagaggaggaaatttttatttttagttatatgtttggtgtgatattttattaatttatttaagtgtataggtttttaaatatttatttaatgagtatgatggtttgggtattttatatttaaaattattggttttatgttaattgaagtttgattggttagtgttttaaagttatagatgatgatttgattttttaggaatagatggtgttttagttttgtgggagtgattgttaaggtatggagtatttaggtggtttttgaaatttgttaggttttatatttttgttttgagtgaaaagtttattatttatagtagtgaggaatgtgtttatatttgttggggttgatttgttgaaattttatgtgtagataatggaaatatttaggagtatttttgtttttatgtagttttttaataattgatgtttttgaagttttgtgtttttagggatagtttttttgatttttggattgtattagtttttatgatgttaaatttaatttgtaaaattttgagtattaatttttatgaaaataagattttgtttttttttatttaaatgtttttttttttttttgtttaatattttgagtaggatttttagtattgtgttgaaagaagtagtgagagtgggtatttttattttataataaattttagaaaaaagattttaatattttattattgattatagtgttagttaatggtttattttatagttaataaggaatgtgtttttttattttgaggtatattttttatatatttaatttgttataaattgtattagagatggattttaaattttgttaaaataattttaggtatgtataaaaatagttatgatttttaattttttattgtgtaaataaggagtatggtatttattgattttaatatattaaaatatttttgtattttaggaataaattaagtttgattataataaatgatttttttatagtgtttttgaattttatttgtaattattttgtggatgattttgtatttgtgtttattaggaatattggttgtaattttttttttttttgtaatgtttatttttggtttaggtattaaggtaatgttggttttataaaatgagtttgggagtatttttttttaatttttttaaagatttggttttgtttaaatgtttggtgaaatttaggagtaattagatttaaaaaaacgtaagaatattaaaaataaatgataaaaatattttaaagttttaagtgtttattatttttaaataatttttaagtatttattatttagaaaatgtttatttataaatattagaaaatgtttataatttgttaatttgtttatgtaatttgatatattataatttatttgtttgtttgttttttgaaatagagttttattttgatatttaggttggagtgtagtggtataatttcggtttattgtaatttttattttatgagtttaaggaattttttgtttcggttttttgagtagttgggattataggtgtatataattatgtttagttaattttttttttgttttttttttgtttttttcgttgagatggggttttatcgttttggttaggttggttttgaatttttgatttcgtgatttatttatttcggatttttaaagtgttgggattataggcgtgagttatttcgttaggtttatagtataatttatattagtaaataaattacgttgaagtttataagtaaatttagttataaagttaagaaaaatttgaatagattttaaatttaatttttagtttaaattttttatttggttatttttaaatttgtattgaatataaagattaaattttgtattttttgattatagagatatatatatagtatataaatagatatatattgtatttgtgttattaaatttttacggtgggtttaattaggaaaaagatatttaaaaagtttttgggaataagatggggaagataataatgaaaaataaaatatttgagaaatacggttttaaatttatgtaaagagtgtatgaaggaaagtaaaaatagaaatggaaagtggtttagaagtattaagaaagtggaaattagtatgttttttatttaaggtatttgtaggaagtaaggtttttagagaatttagagtttaaggtttagagttatttattttagtaagtttagaagtatttgtaatatttacgatggtttcgttttttgttttattgatggttttggtggtgtttagttgtaagttaagttgttttttgggttgtgatttttttgagatttatagtttggataataggaggattttgatgtttttggtataaatgagtagaatttttttttttttttgtttgatggatagatatgattttggatttttttaggaggagtttgatggtaattagttttagaaggttttagttatttttgttttttatgagttgatttagtagatttttaatttttttattataaaagatttatttgttgtttgggatgaggattttttagataaattttgtatcgaattttattagtagttgaatgatttggaagtttgtgtgatgtaggaggagagggtgggagaaatttttttgatgaatgcggattttattttggttgtgaagaaatattttcgaagaattattttttatttgatagagaagaaatatagtttttgtgtttgggaggttgttagagtagaaattatgagatttttttttttattaataaatttgtaagaaagattaaggaggaaggaataatatttggtttaatatgaaaataatttttattgatttatatattaggttacgtttttatgaattttgttattttaaagatttttatttttgttataattatgattatgttgataaattgatttatttatttaaatatttatttaattatttataagatttaaattatttttgtttatataacgttatgtgtatttttatattgtggttagtgtaataaaatatgttttttatatttatttaatttattattttgtgttgtttattaaatttttattataggaattttttgtatgtgtttattttttaatatgaaatttttagtttgattgtgtaatttgattagagaataaagggtatattttatttgtttattattattatatgtaagatgtaagtaaaaatgatttttttttaaattaggttgtatgttgtatttaagatataaagttgaatataataaatttattttttatttttttgtatatttggtttttgtatggaataaaattaaagatggtaattatatttaatattagttattttaaatattatgagaagaaggagtaattaatgattttttttagtagcgggtaaattgagataggtgaggaaataaaaataaatagatatttttaaaagttgattggtaaatatttagtagaaaatgtttattgttagttggatatatgagtttgtaatttataaggaatgtagttgttgggggtttatatatggtaagtaaaattttagaaatggaagtgtttatgtgtggagagagtgtagatagagaaaaggatttaagtaggattttgaggattttttatttttaaagtgagggaagagaagagatatagaggaattagaggtggtgttttttatattagattaataataagagagattggtgattaatatggtttggatttgtgtttttgtttaaattttatgtggaattgtaatttttagtgttggaggtagggtttggtgcggggtgattgggttatggttattttttatggtttaatattattttttttggtgttgttatggtgatagtgagtttttttgagatttagttgtttaaaagtgtgtggtatttatttttatttttttttttgttttcgttttatttttttttttgaagtttttttagaagtagatgttgttatgttttttgtatagtttgtagaattgtgaggtaattaaatttttttttttataatttatttagttttagtt

SEQ ID NO: 954 - DNA, 6876 bp, Artificial Sequence
  chemically treated genomic DNA (Homo sapiens)
agttgagattgggtaaattataagaaaagaggtttaattgttttataattttgtaggttatataggaagtatggtagtatttgtttttggggaggttttagagaggaaggtaaagcgagagtaagaggaagggtaggggtaggtgttatatatttttaaataattagattttaggagggtttattattattatgatagtattaaaggggatggtgttaaattatgagaaatagttatgatttagttatttcgtattaggttttatttttaatattggggattgtaattttatatgagatttgggtagggatatagatttaaattatattaattattaattttttttgttgttagtttaatataagggatattatttttggtttttttgtgttttttttttttttttattttaaaggtggaaggtttttaaaattttgtttaagtttttttttttgtttatattttttttatatatgagtatttttatttttgggattttgtttgttatgtatgaatttttagtaattgtattttttgtaagttgtaaatttatatatttaattggtaatagatattttttattagatgtttattagttaatttttgaggatatttgtttatttttatttttttatttgttttagtttattcgttgttgagagaaattattagttgttttttttttttatagtatttaggataattgatattaagtatgattattatttttagttttattttatataaaaattaaatatgtaagagagtaggaagtagatttattgtatttagttttatattttgagtataatatataatttggtttagagaaaggttatttttatttatattttatatataataatgataagtaaataaaatatattttttattttttaattaggttgtatagttaggttaggaattttatattaaagaatgaatatatataggaagtttttatagtaaaagtttaatgaataatataaaataatggattgagtaaatataaggaatatgttttattatattaattatagtgtaaaggtgtatatgacgttatatgaataaaaataatttaaattttatgaatagttaaataaatatttaaatagataaattagtttattagtatggttatagttatagtaggggtgagagtttttgaaatgatagaatttatgaaagcgtgatttggtgtatgagttaataagaattgtttttatgttggattagatgttatttttttttttttaattttttttgtaagtttgttgataaagagagggattttatgatttttgttttgataattttttaggtataagggttgtattttttttttgttagatagagagtgatttttcggaagtatttttttatagttaagatggagttcgtatttattaggggagttttttttattttttttttttgtattatataggtttttaagttatttagttgttggtagagttcggtgtagaatttgtttaggaggtttttattttaagtagtagatgaattttttgtggtaaagaggttgaagatttgttggattagtttatggaggatagagatggttggagttttttggaattggttgttattaaattttttttggggaaatttaaagttatgtttgtttattagataggaggaaggagagattttgtttatttgtgttaggagtattaaggtttttttgttatttaggttgtgggttttagggagattatagtttagagagtagtttgatttgtagttgagtattattaggattattagtaaagtaaagggcgaggttatcgtagatattgtagatatttttgggtttgttgagatgggtgattttgaattttgggttttaggttttttgaaggttttgttttttgtaaatgttttaaatagggaatatattgatttttatttttttaatgtttttgggttattttttatttttgtttttgtttttttttatgtattttttatatgagtttagagtcgtgttttttaaatgttttgttttttattattgttttttttattttgtttttagagattttttagatattttttttttaattgaatttatcgtgaaaatttaataatatagatataatatgtatttatttatatattatatgtatatttttataattaaaaagtataaagtttaatttttgtatttaatgtaggtttaaaaataattaaatgaaaaatttaagttaaaagttaaatttaaaatttatttaaattttttttaattttataattaaatttgtttatggattttaacgtaatttatttattgatataaattgtattgtaggtttggcgaggtggtttacgtttgtaattttagtattttgggagttcgaggtgggtggattacgaggttaggagtttaagattagtttggttaagacggtgaaattttattttaacgaaaaaaataaaaaaaaaataaaaaaaaaattagttaggtatggttgtgtgtatttgtaattttagttatttaggaggtcgaggtagggaattttttgaatttatgaggtggaggttgtagtgagtcgagattgtgttattgtattttagtttgggtgttagagtgagattttgttttaaaaaataaataaataaataaattgtagtgtattaaattatataagtaaattaataaattataaatattttttaatgtttatagataaatattttttaagtaatgaatatttaaaaattatttgaaagtgataaatatttaaaattttaaaatatttttattatttatttttagtgtttttacgtttttttagatttgattatttttgaattttattaaatatttaaatagaattaaatttttgaaaaaattaaggaggaatatttttaaatttattttatgaagttagtattattttgatatttaagttagagatggatattataagaaaaaaaaaaattatagttaatatttttgatgaatatagatgtaaaattatttataaagtagttgtaaatgaaatttaaaagtattataaaaggattatttattatgattaagtttgatttatttttgggatgtaagaatattttaatatgttggaattaataaatgttatattttttatttatataataaaagattaaaaattataattatttttatgtatgtttaaaattattttgataaaatttaaaatttatttttaatataatttataataaattaggtatataaagaatatattttagaataaagagatatattttttattagttataagataagttattagttaatattatagttagtggtgaaatgttggaattttttttttgagatttattataagataaggatgtttatttttattattttttttaatatagtattggaaattttatttagaatattagataagaaaaaaaaggggtatttaaatgagaaagaataaggttttatttttatggagattaatgtttagagttttatagattagatttaatattatgaaagttggtataatttaggaattagaggaattgtttttgaggatataggattttagggatattaattattaagaggttatatgaaagtagaaatgtttttggatgtttttattgtttatatataaagttttaatagattagttttagtaagtataggtatattttttattattgtgggtgatgagttttttatttaaagtagagatgtgaaatttgataggttttaaagattatttaagtgttttatattttgatagttatttttataaagttgaaatattatttgtttttgagggattaggttattatttgtgattttgagatattggttagttaggttttagttgatatgaggttagtgattttaagtgtaaaatgtttaaattattatatttattaggtagatatttggaggtttgtgtatttaaatgggttagtgaaatgttatattagatatatgattgggaataggggtttttttttttgtttttagtagtattttggtaatttaataattatttttttttatgtttttatatttatatttgcgaaaaaggtattggtgagtaggatatttttatgaagttataatttatggttattttttgtaaagttttgaatttgtgtatttttaggttagggggtgggtgttttttaaaggtggttgaatttgcgttttgtttggagagagtggaaggtagtagtatagtggtagtatttgggattttaggttattttttatagttagttaggaaagtaggtggttttaggggttggaggaggtatgatgtttttggaagattttaggtgtttgtatttgtgatacgttgatttttttaatcgtaggttttttgtttgttatgttggaagtttgattttttatagattaataaagggttagtcgtttttttcggtttttgtggtagggttgtatttaatttttaattttgttgtatgtgtgaaattttttaattttattagttgttagttatttaaatattgttaagattttttttttcgatgtttgatttaattattgatgtgttgaataatttttgtagaattaataaaatataaattatttttaaagtttataatatagttagaaatgttaaggattaaaaataagtaataattataagatggttagtgataaaatatatgtatgtagaggatatattttttgatatgattgtgagatttagtaagttttggaaagtattgtaattatagttatttattttttataggtttgtaatattgaatttatatatattttgtgtattttttatgaatttaatgttaatgttttttatgtgatatataagaaaatttaatggggagaaaataaaaaattaaggaataagattttgttagatagggttgaattttgaagggttataaattatttaaatttgtaagatttgtttttatttttaagaattatatttttatatttttgggagtagtattatatttaatgagaatatataattgaaaaaatatttttaatttgattaaaaatatttttttgtatgaaaatttaaatttttaaagaaattttagaggttttttgttgattttgatttaattaaaggaaattatttttgttttaaatgtttataatgagatgtaaatgttataatataaatgatttgtatagttgttttttatagtatgttagatatgatatttttttttttttttttataaaaagtaaaaattgttattttttgtattttaatgaatggggataaaaataaaataaaaatatatttaaatgtgattaaaatgtaaatggaagtaatattttattaagaaaaaataatgataaaatgtattttagttgtatttagtttagttatgatggaggttaaggggtgggaaagaatagaagtaaaatggtagaagggatataggttaaaggtagtaaataagtatgggttggaagaaaagtaattatttttggtttatagggtgtttttagatttattgaagtttattttgtaaatatattaattgtaagtatttatatataagaaaggtaaattttagagagtgtaatattttttttggaaaatagttaagtgtttattgtattaagttttttattagtggataagtatattttaaagattaattttttttttgttatatttttaataagaaataagagatttgataattttaaaggatatttttttaatttaatagagttatataataaagataatgttaataagaggaatgagatatttaaattttagatagtttttatttttagttagatattgtttttagtatttgtataatcgatgtttatttagttaataaagaatatttttgtttttcgtatttattgaatatttattatgtttttaattttatttatttattggagatattattgattaaggtatatagtgatagattttattattgtttttatttataaaagaaataatgaaagtataggaagttattaagttttggagttatagtttggatgtagaaaatttaattttgaagttttagtttttatatgttttttgggaatatttcgggttataagaattagagttgatttatagattagttaatttttttttagtagagttttgtttatgtaatgatagagtttttttttttagtttttatttgttttttttattgtaatgttttatttgtttatggtaatattataatgaaattgggtttcgttttatttatgttttttgtaaaggagtatatacgttatattttagttttgtttttttgaggatatattattataaatatgagtgtatttgtaaaatatgttgtttgttttagtaaatgtatttataaattttatatatttttatttatttaaaattttatatagtattatttttttaattaaatatgtattatattttagatttttatttgtgtagtataaatttaagaaagaataagttattgttaggttatagatatgaattaaattagagttaaattaatgaattaaggtttagagtttagggagagtatatttggaaaggttaattaaagtaaaggaattattaaaggtgtggaaatggaaatatttttggagaaatgaggagagtttatggtattagaggatgaggattgagatgataaaagattttgagttatttgatttgttagttggtttatgttttttatgttgtaggttattagagtatgttgtagtgttgattgtattgttttaatttaaggatttggtaaagaaaaatttattttgatatttggtataatagtaaggaaggttttatttaaaagtattgtaataggtgttaaaattattatgataggtgtattagtttttgtatt

SEQ ID NO: 955 - DNA, 7143 bp, Artificial Sequence
  chemically treated genomic DNA (Homo sapiens)
tagtttttattacgttgaaataatttttttttatttttagttgagtgtttttattatgaaaggattttgaatgttgtaaaatgtttttttagtattaattgagattattatagttttttttttttcgttttgttaatgaagtatatgatatttattgggtttttttaaaaaaatgttgaattatttttgtatattaggagtaaattttaattagttataatgtataatttttttaatgtgttattaaatttgagttttaagttttttgttaagaatttttgtattaatattagtagggatgttggtttttagtagtttttgtgttatgtttttgtttggttttgatatgaggataatgttagatttataaaattagtttgaaagagtattttttttattaatattatgaaagggttgagaaagattagtgtaaatttttttttaaatgtttagtagaattttttagtgaaattatgtgtttttgggtttttttttgtttagaagtttttatttattgatttagtttttttattagttataggtttgtttagatttttttgtttttttacgatttagttttagtagattttatgtatatgtttttagaaatttatttattttttgtataatattaaatttgttgatatttaattgttttaattgttttttattttttttatttttatagtattagttttaatgtttttttttttgtttttgatttttgttttttgagttttttttttttttttttaattaatttagttaggggtttgataatttttaaaaatttattaaaaaattaattattattttgttaatttttaaattattttttttttattttgtttatttttgttttaatttttataattttttgttttgtgttagttttgggtttagtttgtatttttttttttagttatataagatataaaattgggtagtttatttgagtttttttttttttttttttagtgtaagtttttataggtgtaaattttttatttagtattgtttttgtaatgttgtttttttatttttatttattttaagatgttttttaattttttttgattttttttttaaatttttattttatgtagatatatatttttggttttatgtattgggatgtaaaattagattaatttattttgtataaaaagaaaaatgagaaagaaatatatttggttttgtgagtattatatggaaatattttatattttatttgttttattatatttatatatttttttattaatataaagttgaaggtgaataaaaaaattagggttagttaaataaatttttatggttaaatattatataaaaagtaaatatatttaagtttttagtaaaatttgaattgaacgtagataaaatgtttattttttagtgtttgatagatttaatagtttgagttaataaaaatgtattgattagataaattattaaaagttgttaatttttgtaatgtatatttttgaaaagaaagtttatttattatagaaatttttgtgtttatttaagaattttgagtattttaattgtttaataatatagtttaattgtattatgaaaataattaataatataatttatttggtttatttaaaaaaattgattttttttgttttttttatatatagattgattttatattaatgttgtttaaagattattaaattgtttgaagtttaggtttttgagggatggaaaatgatgttataattatttatagtttatatatatattttggggatttaatatattttttataagtgtaggaaaggtggaagattgatgatttgggggaattagagttattatattttagagggtggtatggtatgttgtttgttgtgagttgtgtgaattagagagtttgaatttagatatatatttagaaagaggaaaagatgaattaattaaaaataataattataatgattttttaagatatagataatatagttaagatataaatggaaataaaaaaagttaaaagtggggagatgaagtttgattttttggtttttttttttttttgtttttttgtttgtttatgtaattagtgttattagtttaaaataatgggttataagatattatatgtaagttttatggtaatttttaatttaaaatatataataaatatatataaaataaaaaggagaaattaaaatatattattagagaaaattatttatattaaaagaaagataaataggaagaaaataagaaagagaaggttattaaataattagaaaatgaataataaaatgataggaataagtttttataaataataatattgaatgtaaatggattaagttttttaatgaaaagatagggagtggttgaatgtattttaaaaaaaatattatatcgagttgtgcgtggtgttttatatttataattttagtattttgggagattgagtcgggtggattatttgagtttaggagttcgagattagtttggttaatatggtaaaattttgtttttattaaaaatataaaaaattagttgaatatggtggtatatgtttgtggttttagttattagagaggttgaggtagaagaattgtttgaatttgggaggtggaggttgtagtgagttaagattgatggagttattgtattttagtttaggtgatagaataagattttgttttaaaaaaaaaaagtaaaataaaataaaataaaaaatttttagatttaatgatttattgtttataagaagtatgttttatttttaaagatatatatagattgaaggtaaagggatggaaaaatattttatgtttatggaaataaataaaaagaagtagaagttatatttatattagataaaatagattgtaagataaaaattatgaaaagagagaaagaaggttattatatagtgataaaggggtttatttagtaagagtatttaataattttaaatatatatttatttaatattggagtatttaggtatataaagtaaatattattagagttaaagagagagatagatagatttttatataataataattggagattttaatattttatttttagtattggatagattatttagatagaaaattaataaatattaaattttatttgtattataggttaaatggatttagtagatatttatagaatatttgatttaatagttgtagaatatatatttttttttttagtatatggataatttttaaggatatattaaatgttaggttataaaataaattttaaaatttagaaaaaaagtgaaataatattaaacgtttttttttattatagattaagaaaaaaagaagttttaaataaatataatttgagataaaaaaggagatatgataattaatattataaaaaattaaaggattattagaagatattatgaaattatatgttaataaattggaaaatttgaataaaatagataatttttagaaatatataatatattggtttgtttaggttttgtatttttttatagtattatgaagaaatataagaattgtttttagaattatttttgtatttttttatggtttttgtatttttttatggaattatgaagaaatataaaatgtgaataggttaataataagtaatgagatagaagttatattaaaaagtattttagaaaagaatttaggatttgatggttttattgatgaattttgttaaatatttaaaaaattaatattaatttaatttaaattattaaaaaaatagaggtggatagaatttttttaaatgtattttatgaggttagtgttttttttgattgaattttttattatattttaattatatataaaattagagaaagatatattaaaaagaaagaaaattgtaggttaatatttttgatgaatattgatgtagaaatttttaataataaattagtaaattgaatttaagaatatattaaaataattatttattatgattaagtggaatttgttttagagatttaagtgtggttaggtatgtgtagattaatgggtttaatgttgtttaatgaatataatgttttttagttttatttatgtttttgtaaatgataggattttatttttttttatggttaagtagtattttattgtgtataagtgttatattttttttatttatttatttgttagatatttaagttgtttttaaattttagttattgtgaatagtgttgtaataaatatgggagtgtaaatattttgttgatatattgattttattttttttggataaatatttagtagtgggattgttggattatatgggggaaaatggagatggttaacgggtataaaaatatagttagaaaaaatgaatatgatttagtattcgatagtataataggatgattattgttaatgataatttattatatattataaaataattaaaatagtataaatgggatgtatgtagtagagagaaatgataaatgtttgaagtattggatattttatttattttgttgtgattattatgaattgtttgtttatataaaaatattttatttattttataaatatagacgttttttatgtatttataaaaatttatttttaaaaaagttgttttaagaatatagttattaagttaagtaaaatgttaatagttttttaatttaatttttaattgttttattattttttgtaataataaaatattaattttatattttttaatttaatgtatagaatagagatatatataggatatgtaaatagatatatagtgtatatgtgattaaaatataatgggagatttaattagaaaaaagtttttaaaaaggttttggggtaaaagaggaaggaaataataatgaaaaaaatgtggtgagaaaaatagttgaaaatttatgtaaagagtgtataaagaaagtaaaaagagaagtagaaagtaatataggggtatttggaaaatgtaaacgagtatgttttttatttaaggttaggtataaagtaaggtttttagagaatttggagtttaaggtttaggtttatttattttaattagtttagtagtatttgtaatatttataatggttttgatttttgttttattggtggtttttttggtgtttagttgtaagttaagttgttttgtgggttgtgatttgttttaaatttatagtttgggtagtaggaggattttgatgtttttggtatagatgaggagaatttttttttttttttgtttgaaggatagatatgattttggatttttttaggaggagtttggtaattagttttaaaaggttgaaattatttttgttttttatgagatgatttagtagatttttaatttttttagtataaaggatttatttgttgtttgggatgagatttttttagataaattttatattgaattttattagtagttgaatgatttggaagtttgtgtgatatagggggtgggggtgatagagatttttttgatgaaggaggattttattttggttgtgaggaaatatttttaaagaattattttttatttgaaagagaagaaatatagtttttgtgtttgggaggttgttagagtagaaattatgagatttttttttttgttaataaatttgtaagaaagtttaagaagtaaggaatgaaaattggtttaatatggaaatgatttttattgattcgtatgttagtttatttttttatgatttgttattttaaagatttatgtttttgttatgattatgatacgatttaaatttttttaaatgtttttaggagtattaattaatattgtatttagtttttaaggtattagttttttatagaggattatgttgattgatttattatttatttaaatatttttaaaatattatttatttaattatttataaaataatttatttttgtttatattatgttatgtgtatttttgtatagtggttaatgtaataaaatatgttttttgtatttggtaaatttattttgtgttgtttattgaatttttgttatggaaatttttgtatttgtttattttttaaaatgaaattttaagtttaattgtgtaatttgattatagaataattggtatattttatttatttattaatattatatttaagatataagtaaaaataaattttttgtaaattaggttgtatgttgtatttaagataataaggtgaatttaataaatataattttgtttttttgtgtatttgatttttgtatgaaaaaaattaaaaatggtaattatatttaattattagttatggtaaatggtatgaagagaagaaggaataatcgatgatttttttttgtagaaggtagattgaggtatgtgaggaaataaaaataagatagagatattttttttaaattgattagtatatatttattagaaaatgtttattgttagttagatatataagtttgtaatttgtaaggaatgcgattgttgggggtttatatgtgataagagaaagttaagaaatgaaggttatggtgttgggagagagtgtagagagagaaaaagttttaaatatgattttgaggatttttcgtttttaaagggaggggagagaaaagtcgtaaaggaaatatttatagttataaaggaatggttgtatattagaaggtaatagtagagaaagataatgaaagtgtatttaggaagataaatgttttagtttaggagtttaaggttgtagtgagttatgattataatattgtattcgagtttgggagatagagggagagtgattttattttaaaataataaataaataaaaggaaataaatgtgtcgagaagaggatttagtcgatttgtttaaggtgtggtttgaaattgtttattaattgggaaatagatggtattggtatttttagtgagaattgattgggtaaagttaatatatagaagttatattggaggaagtttaaataagataagttagtgaattgaagtggagaaagaaataaaatgggattaggaaaggatgtgggttatgttttttgggtatagtttttttttttttgtaatgtatattttttttaatagattttatgtaattgaggtattggtaaatgatattaatatattttatatatttattttaagttacggtatatttaattataatagtaatttat

SEQ ID NO: 956 - DNA, 7143 bp, Artificial Sequence
  chemically treated genomic DNA (Homo sapiens)
ataaattattattgtaattaaatatgtcgtgatttaaaataaatatatgaaatatattaatgttatttgttagtattttaattatatgaaatttattgagaaaaatatatattgtaaaaaaggaaaaattatgtttagaaaatataatttatatttttttttaattttattttatttttttttttattttagtttattaatttattttatttaaattttttttaatatggtttttgtgtattaattttatttaattagtttttattaagggtgttaatgttatttattttttaattagtaggtagttttaagttatattttgggtaaatcgattgaatttttttttcggtatatttatttttttttgtttgtttgttattttgagatggggttattttttttttgttttttaggttcgagtatagtattgtgattatggtttattgtagttttgaatttttgggttgaagtatttatttttttaaatatatttttattatttttttttgttgttgttttttaatgtatagttatttttttgtggttgtggatgttttttttgcggttttttttttttttttttttaaaagcgaaaggtttttagaattatgtttaaaattttttttttttttatatttttttttaatattatgatttttattttttggtttttttttattatatataaatttttagtaatcgtattttttgtaaattgtaaatttatatatttaattggtaatggatattttttaatagatgtatattagttaatttaaagagaatgtttttgttttatttttatttttttatatgttttaatttattttttgtagagagaaattatcggttgtttttttttttttttatattatttattataattgataattaagtatgattattatttttagttttttttatataaaaattaaatatataagagagtagaattgtatttgttaggtttattttgttattttgagtataatatataatttggtttatagaaagtttatttttatttatattttgaatataatattgatggataaatgaagtgtattagttattttgtaattaggttgtataattaggtttggaattttattttaaagaataaataagtataaaagtttttatagtaaaagtttaatgaataatataaaataaatttattaaatataaagaatatattttattatattaattattgtgtaaaggtgtatatgatataatatgaataaaaataagttgttttataaatagttaaataaataatattttaaaaatatttaaatagataatggattagttagtatggttttttgtaagggattagtgttttaagagttgaatataatgttgattaatatttttaaaaatatttgaaaagatttaaatcgtgttatggttatagtagaaatatgagtttttgaaatggtagattataaaaaggtgagttggtatacgaattaatgaaaattatttttatgttgaattagtttttattttttattttttaaatttttttgtaagtttgttgataaagaaaaagattttatgatttttgttttgataattttttaggtataagggttgtatttttttttttttagatagagagtgattttttggaagtatttttttatagttagaatggagtttttttttattaggggagtttttgttatttttattttttgtattatataggtttttaggttatttagttgttggtagagtttagtgtagaatttgtttaggagggttttattttaagtagtagatgagttttttgtgttgaagagattgaagatttgttggattattttatggaggatagggatggttttagttttttggaattggttgttaaattttttttggggaaatttaaagttatgtttgttttttaagtaggagaaaagagagattttttttatttgtgttaggagtattaaggtttttttgttatttaggttgtgggtttgaggtagattatagtttatagagtagtttgatttgtagttgagtattaggagggttattagtaaagtaaaggttaaggttattgtagatgttgtagatgttgttagattggttgaaatgggtgagtttaaattttaggttttaggttttttgaagattttgttttgtgtttagttttaaatagggaatatattcgtttatattttttaaatgtttttgtgttattttttatttttttttttgttttttttatgtattttttatatgggtttttagttgttttttttattatattttttttattattgtttttttttttttttattttagagtttttttagaaatttttttttgattgaattttttattatattttaattatatatatattgtgtatttatttatatattttatgtatatttttattttatatattaaattaaaaagtataaagttaatgttttattattgtaaagaatgataaaataattaaaaattaaattaaaaggttattgatattttatttaatttgataattatatttttagagtaatttttttgaaaatagatttttgtgggtatataagaggcgtttgtgtttatggaataagtgaaatatttttatataggtagataatttataataattatagtagggtgaatggagtatttaatgttttaaatatttattatttttttttgttatatatattttatttatattattttagttattttataatatataataaattattattaatagtagttattttattgtgttatcgaatattaaattatatttattttttttaattatatttttgtgttcgttagttatttttatttttttttatatgatttagtaattttattattgggtatttatttaaaggaaatgaaattagtatgttaataaaatatttatatttttatgtttattgtagtattatttataatagttaagatttggaagtaatttaggtgtttaatagatgaatggataaagaaaatatggtatttatatataatggagtattatttagttataaaaaagaatgagattttgttatttgtaagaatatggatggagttggaggatattatgtttattggataatattaaatttattgatttgtatatatttaattatatttgaatttttaggataaattttatttggttatgatgaatgattgttttaatgtgtttttgaatttagtttgttaatttgttgttgaggatttttgtattaatgtttattagagatattggtttatagttttttttttttttaatgtgtttttttttggttttatatgtgattaaaatataatgggagatttaattagaaaaaatattggttttatagaatatatttggaaagattttgtttatttttatttttttaataatttgagttggattggtattagttttttaaatatttggtaaaatttattagtgaagttattagattttgagtttttttttgggatattttttagtatggtttttgttttattatttgttattggtttgtttatattttgtatttttttatggttttatgaagaaatataaaaattatgaagaaatataagaatggttttagaaataatttttgtatttttttatggtattatgaaaaaatataaaatttgaatagattagtatgttgtatgtttttaggaattatttattttgtttaggttttttaatttattagtatatagttttatagtattttttaatgattttttaattttttgtggtattggttgttatgtttttttttttattttagattgtatttatttgggattttttttttttttagtttgtggtgagagaaaacgtttgatattattttattttttttttaaattttaagatttgttttgtgatttagtatttggtatatttttgagaattatttatgtgttgaggagaagaatgtgtattttatagttgttggattaaatgttttgtaaatatttattaggtttatttggtttatggtgtagatgaaatttgatgtttgttaattttttgtttggatgatttgtttaatgttgaaagtggggtgttgaagtttttagttattattgtatgggggtttgtttatttttttttttggttttaataatatttgttttatatatttgagtattttagtattgggtgaatatatatttagaattgttaaatgtttttgttaaatggatttttttattattatataatgattttttttttttttttttatagtttttgttttgtagtttattttgtttgatataaatgtagtttttgtttttttttgtttgtttttataggtatagaatatttttttatttttttatttttagtttatatgtgtttttaaaggtgaagtatattttttgtaggtaatgaattattgggtttaagggttttttgttttgttttgttttgttttttttttttgaggtagagttttattttgttatttaggttggggtgtagtggttttattaattttagtttattgtaatttttattttttaagtttaagtaatttttttgttttagtttttttagtagttggaattataggtatgtgttattatgtttagttaattttttgtatttttagtagagatagggttttgttatgttggttaggttggtttcgaatttttgggtttaagtgatttattcggtttagttttttaaaatgttgggattataggtgtgagatattacgtatagttcggtgtaatattttttttaaaatatatttagttattttttgtttttttattggagagtttagtttatttatatttaatgttattatttatgaggatttatttttgttattttgttatttattttttgattatttgatggtttttttttttttattttttttttatttgttttttttttaatgtaggtgattttttttggtggtgtgttttaattttttttttttattttgtgtgtatttgttgtatgttttagattggaggttattatgaggtttgtatatagtgttttataatttattattttaaattggtaatattgattatataaataaataaaaaagtaaaaaaaaaaaaaaattaaaaaattagattttatttttttatttttaattttttttgtttttatttatattttaattgtattgtttatattttgaaaagttattatagttattatttttgattggtttatttttttttttttttaaatatatgtttaaatttaaattttttgatttatatagtttataatagataatatattatattattttttggggtgtggtagttttaatttttttaaattattaattttttattttttttgtatttgtaaaggatgtattaaatttttagaatgtgtgtgtgaattgtaaatagttgtgatattattttttattttttagaaatttaggttttaaataatttggtgatttttaggtaatattagtataaaattagtttatatatagagagagtagaaagaattagtttttttaaataaattaaataaattgtattattgattatttttatgatgtaattaaattatattattaaataattaaaatgtttaaagtttttaaatgggtataggaatttttataatagataaattttttttttagaaatatatattgtaaaaattaataatttttagtagtttatttagttagtatatttttattggtttaaattgttaagtttgttaaatattgagaaatgagtattttgtttacgtttaatttagattttgttgggaatttaagtatatttattttttatgtggtatttgattatgaaaatttgtttggttaattttgatttttttatttatttttagttttatgttagtaaagggatatatgaatatgatgaaataaatggaatataaagtatttttatatagtgtttataagattaaatatattttttttttatttttttttttgtataaagtaaattagtttggttttgtattttaatgtatagggttaaaaatgtatgtttatatgaggtaagaatttaagaaggaagttaagagaaattagaaaatattttgagataaatgaaaataaaaagataatattataaaagtagtattaagtggaaaatttatatttataaaagtttatattaaaaaagaggaagaaagagtttaaataaattatttaattttatattttatgtagttagaagaaggagtgtaaattaaatttaaagttggtataaggtaggaaattataaaaattggagtaaagataaataaaatagagaaaaagtaatttaaaaattagtaaagtaatagttggttttttgataagtttttaaaaattgttaaatttttaattagattgattaagaaaaaagagagaagatttaaagaataaaaattagaaataaaagaggagatattagagttgatgttatagaaataaaaaagataagagataattagaataattaaatgttaataaatttaatattgtataggaaatggataaatttttagaaatatatatataaaatttgttaaggttgaatcgtgaagaaataaaaaaatttaagtagatttataattggtaaggagattaaattaataagtaaaaatttttgaataaagaaaaatttagggatatatggttttattggagaattttgttgaatatttaaagaaaaatttatattagttttttttagtttttttataatattgatgaggaaggtatttttttaaattaattttatgagtttagtattatttttatattaaagttagataaggatatgatataaaaattattaaagattaatatttttattgatattgatgtaaaagtttttaataaaaaatttggaatttagatttaatagtatattaaaaggattatgtattatgattaattgggatttatttttggtatataaagatggtttaatatttttttaaaaaaatttagtgaatgttatatattttattaatagaacgaagggagagaaattgtaatagttttaattgatgttgaaaaagtattttataatatttaaaatttttttatgataaaaatatttaattagaaatagaaggaaattattttaacgtgataaagatta

SEQ ID NO: 957 - DNA, 6465 bp, Artificial Sequence
  chemically treated genomic DNA (Homo sapiens)
tataatatatatgttaatgtgtgtatttttttttgattaataataagtttttttaacgatatgaattatttggagaggatgtatatggagaaaaggtggggaatatggatatttattttatttatttagtaataagaataggaattaattttagtttttaatgtggtgatatatgtttttatcggattgttttattgttaatttttttgtaatttttaaagttatggatatttagtaggtatttaatttaataagtatatattaattaattgaaattgggatataaattaatatttttataatagaattttttatttttttttggaaattttatattaatcgaagtatttggtatttggtgtattaaaattttttgtggaataaaaatataatttttaaagtaggattatgaatttttggattattaatatataattttatttgatataaaattaagaatattgtaatttgatgattgtattgtgtaagtagtatattttttatattttttgaattattttttaaaaatggttagaaggtataaaagaaaaggggggatttagaaaaatttttttttaatttacgggattttatgagttaaattgcggggaaaatttgatttcgtgtggatttttattttgtatgttatgtttttttcgtaggtttggtttgtatgatgttaggagtttcggaagttaaaatagcgtgggggtatggatttaatattgatttatattgagtggaagaaatttacgttaaagtttggatgagataatttggttgtgagtgttaggatgtgattgttgatgatagaggaaaagggaaattaaggtgtaagttttggtttattgattatttatttagttaagattgaggatagtatgagatatgattgaaatgttgttgatgtgttatgtataattatagttagtttttagaaaaaaagtttagttgaaaagaaaaaagaaagtttttagtttttttgttttagtaatatggttatattttggtttttgatggttttgtaaaatttttaaagtatattttgatggtgatttattttgtagttttagaattggttaaattaataaagtgtgaaatttttagtttgtatgtgtaataaaaggtgttttataggtagaaaagagagagaaatttttttgtttgtaaagttgataagataggaaaagattataaacgtatatatttattgtagtgataatgttttgaataaaagaattatatgttgaaagatgaaaatttaatagtagatgttttattgttagtttggaatgtaggattagttgtataatttgtggaaataagtgtaaaacgaaaatgtgtgttttttgtttgaagagttattagaaattttaaggaagtgataatagagtattaaattaagtgtgggttgttttaagtttagggttttgttagattgtataggttgtatgtttatgaagttaggttggttgggatgtttaggtaaaaattttaaaaatatattttagaaataattttaaattatatttgtagttttattatgttttaaggaattaaagtgtgattattattttataaattttatagaagaaaaaattttagaaattaaagtttgatagggtgtagttatttgaatttatatatttaacgtagaggtatatgtaattattttaatggatattgatagattgggggatggattgattaagggttttattttttttgggaagattttggatttagatttagttttgtattagttagttgaatgaatttaagtatattatttgtttttttgggtttggatttataaatttaaaaggtaaggggttgattatagataatttataattttataattttgtgtttggttatgttattaagagttattagagtttggattttagtcgtgtaattattttttgtaaatagttgttatattgtaaatatatttttaatataatttgttattttgaataggtatttttaatttataagtggttaggtagtatattatttttttttatggattttattatttttaattttttaattttagtattatattttagtggagtaattaaggattaggtagaattaatttttatttatttttagatagttgggaatattttttttagtgatttagaggttgggtattggaaggtattgagaatttgtaaagtgttttaggttttgatttaaatttttgtgttatttgtaagtacgttttttggacgtaattttttttgagtagagtaatagtagagttttgtatgtaataatgtaatttttatattttttatttgtttaatatgaggtttggttttatataaatgttttgattttatttattttttgggaagatcgttttttaaagagttttttggttttttttttttatataaaagaatatacgaaattgtcgtagttagtaagtgttggttaaagagatatagtattatgtttttaatattaattataaatattatttaattaaaaattagttttttataggttaggtttgataatatcggaattagaatttgagggtaaataatttaaaagagagttttaggtaagtattcgaatttatatttatttagtgttttttatgagtaaatttttatgttaaaatattttagggaagagaaagttattataaaagtaatgaaataatttttgatttttagaaatttaatttaatatggtagaagatacgcgaatagttatttttaattaagattgaggaattagaatttttagaaaagtataaattaagatttgtatagagaatttaagattaattttaaggaggataattttggaaaaatttagggagatggtaatttttaagtcgggtttggatggatggttattatttttaggggtataaatgaggggaaaaagaatttaagattaaagaaatagtatgagtaaaggtttagggtattttttttttttttttttaaagaaatgattaggtcgggtgcggtggtttacgtttgtaattttagtattttgggaggttaaggcgggcggattacgaggttaggagatcgagattattttgattaatatagtgaaatttcgtttgtattaaaaatagtataaaaaaaaaaaaaaaaaaaaaattagtcgggcgtggcgagtgtttgtagttttagttattcgggaggttgaggcgggagaatggcgtgaattcgggaggtagagtttgtagtgagtcgagattgcgttattgtattttagtttgggtgatagagtaagatttcgttttaaaaaaaaaaaaaaaaaaaaagaaatgattagttatttaatgtgttaaaataataataaatttttattagtgattattatatgttaggaaaaatttttagtattttatgaggattatttgatttaatttttaattgaagtatggaagaagatattattattaagttagttttataggtaaggagattgagttatagaagatttaagaagttaatttataattatatagttagatagtagaggagttaggaattaagtttgttttataattgtaatattgttatgtatatagtataggtagaaatgtaaagtgggtttgaattaaagagtggagggttttttgtgttattttaaagtgttgtattttataaataaattataaaggaggagaaagaattttatttttttttgtatttgaaagataaagaaataaaaagttaaaaagattttttgttagtattgattatttggaataataaattgtttagagttatgttgtttaatatagtagtatttagtagtatgtgtttattaagcgtttgaaatacgattagattaaattgagatgtatcgtaggtttaaaatatatattgtatttttttttttttttttttttttttttttttttttttgagacggaattttattttgttatttaggttggagtgtagtggcgcgatttcggtttattgtaatttttattttttgggtttaagttatttttttgttttagtttttttagtagttgagattataggtatatattattatgtttggttaatttttttgtatttttagtagagatggggttttattatattggttaggttggttttaaatttttgattttgtgatttattcgttttaattttttaaagtgttgggattataggtgtgagttattgcgtttggaattttttttgggaatattttttatattgtattttaaggatttaatatgataaaaagaatgttaaatattttattaataatgtagtatattgatgtatattgaagtattatttgggatatattggtttaaatataatatattttaaaattatatttattttttaaaaaaatttttattaatgaggttattagattatttaaatttatttgtgtggtttgtattgtatttttattgggtagtgttgatttagagtaatttgaaatttgtggtagatattttattaattaattttgatgaaggatttttttattaaattgtttttttaatcgtattttttttttgttttttggttatttgtaagaaaaattttaaaaggttgtttttttgtaaaggtttgagaggttttagaatttcgttttttatttgtttttaattataagtaaatgattaatgtgttttgtgaatgaagagttaatattttattagggcgaagtggggaggtataaaaaaatttttagtttttgaatggtgtgaagtaaaagtgtttttaaagaattttattagaatggtataggtgggtataatgggtttgttttatcgttaaaggatttaaggagtttaaaggaaattttaattataatatttaaatgttataaaattttagttattaatataaattattatttttgtttatttgttattattttattttaaaaaatttgtgaaaatacgtaatttttaggagattttaattaggtataaatattagtagttagaggaggtgtagtatattgttttgattatttgaagattagttattagaagagaaagattagttaagttttttggatttgattagtttgatataagaattattgattttaatttttttggtttaattttttcggaaacgatgaaatatataagttatattttggttttttagttttgtatcgttttgggtttttttggttgttattgttaggatttatatgtaaaagaagtagaaaattttaagaaatattttgtaagtatgattttttaatagtatttgtttgtggttgaaaatgattgaatatcgatttgttgtagtatttttgataggttgttattttttgtaggtagttattttgagatttggtgttattttgttaattattgattagatgagttttttgattaaataatttagatattgttttaattttttgtttagtttgtatagagatttaaaagggatttatgaattttttaaaagatgggtataatatgggtatgaagtataatgatgttaataattttgtggtgggaatttatttagttgtgatagttaaggagtatgtagattgaaaaaaatgattggttattagtttttgattttttagattttaaggttaagattagtattaaaaaggtaataggaaatgtttataaattaaagttaaaaaggtttttaaagttttggtttaaaaaaataattgataggtgattttttttaaaaagtgattttaatattttgtttttttatttatattatttgtgaagtatttcggaatttcgttgtttattgggattttggaagaattatgattttggttaaggaatgtttaaaaattttaagtgaattttttgagttttttttaaaattttattgatggttaatgaaaagtttttatattttaaatattttattatttgtttaaaatttagttgttataattatagttgttataataatatttagatatttataattgattttatttttataatataaaattaaattatatatatatatatatatatatatatattcgtatatgtttggaattattttttaaagttcgtataataatattttataggaaggtatagtagatgtaatagaaatttgtattattggggggtagtattttatagtggggtggttttgttgttttttgtttttgtattttttagtttagtttgaaaatattttttttagtttattatagtttttgggatttttggagtattagttttgttgagtttatttgtgatattgtaatttaatggttatattgggaaataaaaaagttaaaagaatataatagtttttgtttatattttatataagttttttgggaatatttattgttagaattaagtagaagagttgaaaaggaaattagtgaatattgttatatttgagtttaatgaaatttgaaatatatttttaaggtaatttatgggttaattgtaaattaattttttttttttttttttttaga

SEQ ID NO: 958 - DNA, 6465 bp, Artificial Sequence
  chemically treated genomic DNA (Homo sapiens)
tttaaaaaaaaaaaaagaaaaaattggtttataattagtttataaattgttttaaaaatatattttaagttttattgaatttagatgtgataatatttattgattttttttttaatttttttgtttagttttaataataagtatttttaaaaggtttatgtgagatatagataaagattattatgtttttttagtttttttattttttaatataattattaaattgtaatgttataaatgagtttaataaagttgatattttaaaggttttaaaaattatagtaagttaaagaaagtatttttaagttaggttaaaaaatataaaaataaaaaatagtaaagttattttattataaaatattgttttttaatggtataggtttttattatatttattgtgtttttttgtagggtattattatacgagttttaaaagatagttttaaatatgtgcgagtgtgtgtgtgtgtgtgtgtgtgtgtgtgatttgattttgtgttgtaagaataaaattaattgtgaatgtttgaatattattatgatagttataattataatagttaagttttaaataaataatgaaatatttaaaatgtaaaaattttttattaattattaataaaattttaaaagaaatttaaaaaatttatttaaaatttttaaatattttttagttagaattataatttttttaaaattttagtgagtaacgaagtttcggaatattttataagtaatatagatagagaagtagaatgttgaaattattttttggagaaaattatttattagttatttttttaagttaaagttttaaggatttttttgattttaatttgtaaatattttttattatttttttaatgttaattttgattttagagtttgagaagttaaaaattaataattaattattttttttaatttgtatattttttgattattataattgaatgagtttttattataaaattattaatattattatgttttatatttatattatgtttattttttggaaaatttataaattttttttaagtttttatataaattgagtagaaggttaaaataatatttagattatttagttaaggaatttatttagttaataattaataaaataatattaaattttaaaatgattgtttataagagatgatagtttattagagatgttatagtaagtcgatatttagttatttttaattataaataagtattattaaaaagttatatttataaaatattttttaaggttttttgttttttttatatatgggttttggtagtaatagttaagagaatttaaaacgatgtagagttgaaaagttaagatataatttgtatattttatcgttttcgagagaattaagttaaagaagttgaaattagtagtttttgtattaagttgattaggtttaaaggatttaattgattttttttttttaatagttgatttttagatgattagaataatgtgttgtattttttttggttgttggtatttatatttaattgaagttttttgaggattacgtatttttataagttttttaagatgagatggtgatagataggtagggatgatagtttgtattaataattaaggttttgtggtatttgggtgttgtagttagagttttttttagattttttgggttttttgacgatgagatagatttattatgtttatttgtgttattttggtgggattttttgaaggtatttttattttatattatttaaggattggaaatttttttgtatttttttatttcgttttggtaaaatgttgattttttatttataaagtatattgattatttgtttgtggttgggaataagtgaaaaacgaaattttagggttttttaaatttttataaaggggtagttttttaaaattttttttgtaaatgattagaaagtaaggaaagaatgcggttaaaagaataatttggtgaggaagttttttattagagttggttagtaaaatatttattataagttttaaattgttttagattagtattgtttagtagaaatataatataagttatataggtaaatttaaatgatttagtagttttattaataaaagtttttttaaaaggtaaatataattttaaaatatattgtatttaaattaatatattttaaatagtattttagtatgtattaatatattatattgttaataaggtatttgatattttttttgttatattaaatttttgaaatatagtgtagagaatatttttagggggagttttagacgtagtggtttatatttgtaattttagtattttgggaggttgaggcgggtggattataaggttaggagtttgagattagtttagttaatatggtgaaattttatttttattaaaaatataaaaaaattagttaggtatggtggtgtatgtttgtaattttagttattagggaggttgaggtaggagaatggtttgaatttagaaggtggaggttgtagtgagtcgagatcgcgttattatattttagtttaggtgatagagtaagatttcgttttaaaaaaaaaaaaagaaaaaaagaaaaaaggaaagaaatatagtgtatattttaagtttacggtgtattttaatttggtttagtcgtattttaaacgtttaatgggtatatattgttaggtgttattatattgaatagtatagttttaaataatttattgttttaaataattagtattaatagagaatttttttaattttttatttttttgttttttagatataaaaaaaaataggattttttttttttttttgtaatttatttatgaagtataatattttgggatggtataaaaagttttttattttttggtttaaatttattttgtatttttatttgtattgtgtatataatagtattgtagttatggggtaaatttgatttttgatttttttattatttagttatatgattgtgagttagttttttaaattttttatgatttagtttttttatttgtaaaattggtttgataatagtatttttttttatgttttagttgaaaattaaattaggtaatttttataaagtgttaggaattttttttggtatatagtaattattaataaaagtttattattattttggtatattggatgattagttatttttttttttttttttttttttttgagacggagttttgttttgttatttaggttggagtgtagtggcgtaatttcggtttattgtaagttttgtttttcggatttacgttattttttcgttttagtttttcgagtagttgggattataggtattcgttacgttcggttaattttttttttttttttttttttgtgttatttttagtatagacggggttttattgtgttaattaggatggtttcgattttttgatttcgtgattcgttcgttttggttttttaaagtgttgggattataggcgtgagttatcgtattcggtttagttatttttttaaaaaaaaaaaaaaaaagtattttggatttttgtttatgttgtttttttggttttgagttttttttttttttatttgtgtttttgagagtagtagttatttatttaagttcggtttaaaaattattatttttttgagtttttttaaaattattttttttaaaattaattttagattttttatataagttttggtttatatttttttaagagttttgattttttaattttgattgaagatagttattcgcgtgttttttgttatgttagattgagtttttgaaaattagaaattgttttattgtttttatgatggtttttttttttttaaaatattttagtatggagatttgtttataaagagtattgaataaatgtaaattcgaatgtttgtttaaggtttttttttgagttatttgtttttaaattttaatttcgatgttattaggtttaatttgtaagaaattagtttttaattaaataatatttatgattaatgttagaaatatgatgttgtgtttttttagttaatatttgttgattgcgataatttcgtgtatttttttatgtgggaaaaaaaagttagaaagttttttgaggggcgatttttttaaagaataaataagattaaaatatttatgtggaattaaattttatgttaagtaagtgaagaatgtaaaaattatattgttgtatataaagttttattgttgttttgtttaagaaaaattacgtttagagaacgtgtttgtaggtggtatagggatttgggttagagtttgagatattttgtaggtttttaatattttttaatgtttaatttttgagttattggaaggaatgtttttaattgtttggaaataagtaaaaattagttttgtttggtttttgattgttttattggaatgtagtattaggattgaggagttaagaatagtgggatttataagagggaatgatatattgtttagttatttgtaaattgagaatgtttatttaaaataatagattatattaagaatatgtttatagtgtggtaattgtttataaagagtaattatacggttaaaatttaagttttaataatttttgatggtatggttaagtatagaattatggaattatagattatttatggttaattttttattttttagatttgtaaatttagatttagaaagataagtgatgtgtttaaatttatttaattggttaatgtagaattgagtttaaatttaagatttttttaaagaggatggaatttttagttaatttattttttaatttattaatatttattgagatgattgtatgtatttttacgttagatatgtgaatttaaataattatattttattaggttttagtttttgagatttttttttttgtagaatttgtgagatagtaattatattttaattttttaaaatatagtaagattgtaagtataatttgaaattgtttttgaaatatatttttgaaatttttgtttagatattttagttaatttgattttatggatatgtaatttgtgtagtttgataggattttgaatttagaatagtttatatttggtttaatgttttgttgttatttttttgaaatttttaataattttttaaataaaggatatatattttcgttttgtatttgtttttataaattatgtagttggttttgtattttagattggtagtgaaatatttgttattagatttttattttttaatatatgatttttttgtttagaatattattattataataagtatatacgtttgtgatttttttttgttttgttaattttgtaaataaagaaattttttttttttttttgtttgtaaaatattttttgttgtatatgtaaattagaggttttatattttgttggtttggttagttttgagattgtagaataagttattattaagatatattttaaaagttttgtaaagttattaggagttaaggtgtgattatattattaaaatagaggggttgaaaatttttttttttttttttaattagattttttttttgaaaattggttatggttatatatgatatattagtaatattttaattatattttatgttatttttagttttaattgagtaggtagttagtaagttaaaatttatattttggtttttttttttttttgttattagtagttatattttagtatttataattaaattattttatttagattttggcgtagattttttttatttaatatgagttaatattggatttatgtttttacgttattttgattttcggaatttttgatattatgtaagttaaatttacggaagaagtatgatatatagaatagaagtttatacggagttagatttttttcgtaatttgatttataaaatttcgtaagttagaggaagatttttttgaattttttttttttttttgtgttttttggttatttttgaggagtggtttaaagaatatagaaggtatgttatttatatagtataattattagattataatatttttaattttatattagatgggattgtgtattgataatttagagatttatggttttgttttgaaggttgtatttttgttttataaggaattttaatgtattaagtgttaaatatttcgattgatatggggtttttaaagaaggatgaaaagttttattgtgaaaatgttggtttatattttaattttaattaattaatatgtgtttattgaattgaatgtttattagatatttatagttttaggggttataaagaagttagtagtgagataattcggtaggagtatatgttattatattggaagttaggattgatttttgtttttgttgttgaataggtagaataggtatttatattttttattttttttttatgtatattttttttaggtggtttatatcgttaagaggatttattattggttagagggaaatatatatattgatatatgtattgtg

SEQ ID NO: 959 - DNA, 17294 bp, Artificial Sequence
  chemically treated genomic DNA (Homo sapiens)
ttttttttaataagtgattttttttgtttattattttagttttttatattttgtatttgagtttgttgtttttttttttttttttttttttttttatttagttatttttttttttattatggtttatattttaattttttgaaagttaatttatttaggttggtttgatattgagtaaaaaaaaaaaaaaaaaaaaaaaaaatttgtacgattaatagaaaatcgaattgatggtgatttaaattaataggggtttattttttttttttataggttaaaggtaggtggttatagatattagtttagaaatttaatgttgacgatgatttaggttttttaattttttgtttttttattggtagttgttgattttttatttttaattttgttgttttatggttgtaaattgttaagatttgttgtagatttaggcgttattggatttatatttaaggtaagaagattggaaaagggttaaggttagtaaatttttttattgtatttgttttttttatgagaaaggaaaagtttttatagaatgttttttaatttttttttttattatatatttgatgattattatatatatatatgttttatagatttttgtttgtgtttcgttgattaaaattatattatatatttatatttagttgttaaaaaggttgggaaagtgagtaatgagtttgtttagtttttgtagtagggaggtagtaagatagaaggggatcgaaaagagttgttagtagttagttaatgagtagtatttgttatagttattacgtagtatgtggtatttattttaggtagtgttttaagataagttaattattagaatatttgattgtttatggataaatatttttaagttaggggttggtttgatataatcggatgttagtatgagagttaagaggagggttgagtgtaaggtaagaggatagtgttttgttgagtattagtatgatatttaaatatttttttaaatttttattagtgatttaattatagtttagttagttataaatttaattatatttgttttagttttatatttttttataagtttgttttgtttattatatatttatttaataagtggttatagatattggtttagttgtttaatgttgatagtgatgatttaggattatatataattgatgatttaggattattaatattttataaatattaatggagtaataggtatttggttaggtgttcggggtttgatagtgaagaaaataaatttattttttagaggaagagggagattattgaaataaaattttttacgtgtgtatatatatattttatgtatgtatatatatacggatgtattttattaaattttagattaagtttttgtttacgtatttataatcgtgttgttttttttggtaataattattataattttagtaattatttgtgaaatatatatatatataaaatgtatatatttaatatatataatttatttatatttaatttaaatttaatagatatattaaatttttagtagaatttttagatagtagtaagtattatggaataaataaagttaaataagggttagtgtaaaggtatgggtagagtgtgagagggtaagagtattggttataatttatagattaattagcggaatttaaattatatgttttagttataaatttttacgttgttttttttaaagggaagttggtagatatttttgttttggagaaaagaggaaggaaatgtattgtgtttagagttaaaatgtatagtttgttttatatatataggttttgtttttattggattatatttttagttttttaaattgttttatttggtttattaatttgaaaggtaggtgagtatggtttttaaaatgtagttttgtttttgagtagtagtattttagtatatatttggttttggaatgatttacgttttattttaatttgttttttttattttaaaaattaatttgaggttttagtggggattaacgtatatttggatattttttagttattaggtattggaaatttattaaggaaagttggtatcgtttatttgtttttgtgttagttgtatgagatttttatatgggattttaaaatatagtttattgtttttttttttattttttttattagtcggtggttatttttattttttaattttatttaggttaattttattttattttttaggttataatataatggtaatttttttaaaaaagaatttttttaaatttagatatagtggtttatatttgtaattttagtattttgggagtttgaggtaggagaattatttgagtttaggagtttgagattagtttgagtaatatagtaagattttagttttataaaaaatttaaaaattagtcgggtataaggttaggcgaggtggtttatttttgtaattttagtattttgggaggttaaggtgggcggattgtttgagtttaggagtttgagattagtttgggtaatatggtgaaattttatttttataaaagatataaaaaaatgtttgtggttttagttatttgggaggttgaggtggaaggatggtttgcgttcgggaggtggaggttgtagttagttgagattgtgttattgtattttagttaggtgatatagttagattttgttttaaaaaaaaaaaaaaaaattagttaggtatggtggtgtatatttgtagttttagttatttgggaggttggggtaagaggattatttgggtttaggagtttgaggttgtagtaagttatgattatgtttttgtattgtagtttagacgatagagtgagattttgttttaaaagaaagaaaaaagaaaagaaagattttttttaaaatgtagattaagttaaatttttgtttatatttttttaatttttttttattgttttttttgggaatgatgattacgattttagtatttgtgtaattttttgtttaatagttattttttttagtagatagtaagtttcgtgagggtaggggttatgtttgttttgtttaggtttttatttttgtgtttggttatgttagttatagatagtattatttgataatatttatttaattaataaatatatttagtttttaaatgattaattagtaaagtttttagaaggatacgtagggtggtgggtgttgtgattgtgaaatttgtttagattttttttaggaatagaagattgggttttgttttttttttgatgttaggagggttgttagtagatatttttaatcgttagcgtttttttggggaatgtttttatgaaagaaatggatagttttaaaattatgatagttggtatttaatgattaattagtgttgggttttaagatttagttttttatattaatttaagatatttttataaggttattttaattttagagcgttttttgggagtttttattgggatggtattatagattaattttttttttcgttttgttttttttattttttttttatagacgtttattttaagagtattttttaattaattaatgttttatattttaatttcgattttagagtttattgttagggtaatttagtttgtgataagtattataaaaatgtttataaattggatattatattttgttttattttatagacgtttaaacggtaaagattagttatttatttttgtatttttataacgattagaaggtgttttttatatagtggatattagaaatatattaaaggaaatattttttttaaatttagtttagattgagttaaatttttttgatttaaagtgtggttttgttgaaaggggtattagtattttttgtgtattttgttcgaaatataaaattttaagatttaatttgaattagaattattgaatttaaatttgtattttattaagatttttagatggtttatatgtatgttgaagtttgagaagtattgagttaagagatttattaatataagtaaaatgatttggttgataatatttttagtttatatagtgtttttataaggattttttttttttaaaaattttttttaatattagtaattatgtagttttttatttaataaatattaattgagtgttaagtaaagatgttagttttacggagtttatattttagaaggagaagaaaataaatattaaggtgtatattatagtgtatagtaaggtgaaaagtgttatgaaaaaatagtagggcggggtaaggaggaggagaaggtgtgttgtaatttaaaatttttaataaaagtttatgatatttagagaattgaaataggtgagattattagatattcgtatgtttgagtataagcgttgaaggatttagtaatgtggttgtagtggaataggagagatgtaaaataatagataaatttagagaggtaagagagtagatttttttatgagaggttgtttgataaattgatttgatattgaattgttgagaaggtaatgtaaatagtttttttttttaagaataaagtagtttttggttaagtcgatttgatttgggttgtgggaatttgtataaattattttattagttaagttttaggttttttaaatgaaaaagtagggattggaaatggtttttgaagttttatttttttttaaaaatgttaggttttaagataattaggtgaagtttaagagttagtaaaataaggattgtggttcggttgtggtttaatgtaaatttgtataattttaggaaatcgaaaaaaattggaagaagaattgtagaatggggtgttaggttgaaagattttaatttttgtatttaaattttttttatatttagaagtttaggtttcgatcgtacgacgtcgtgtttattgttgggtgttgcgtttgagttcgttttttgcggtttttcggatttgatttcgtttacgttttggtttcgttttttgtcgacgtcggtatagatttcggtgacggaagtgacgtaaggtcggggttggagggtagtgttgggttggtttcgtaggcgttcggggttggagttagcgatcgtcggtagtagtatggttttttttttttttttattttttgttatgtagggtgtgagtagggttgagatgggtatcgcggatttggggtcgtttttaggtatcgtcgttcgcggtagggttgcggtcgggtcgggacgagagggagggagggattcgttttagtcgggaagtttcgtttcgttttttcgaggtcgttttagttcgggatttttgcgtcgggttttgagcgggcgacggggacgcgaggtggggtcgcgagattggggtttcgtggtttgaattcgtcggttgttttttttttgttttttttttggttgtcgttataataaattacgtcgtttgttttttcgatttttgtaatttatttttaaatacgattatgcgttgtagaaggacgttgttggttaatgtgggatagcgtggttttaaagattataatatcgtttttttattgtatttttttttatggttagatacgtagatatttattagtatgttacggttgtttgtagtgtttagtgtagtgataggttgtataggtttatgatttaagagtagtaggttgtgttatttgggtttgtttgggtttttattgttcgaagaaattgtttaaggggatatttttttattttttagaacggatttttatcgttaagtgacgtatgattgtgagtgttttgattagtatgtggtatcgtggttttagttcgtggtttaaatattttttttttagcgggggtggggggggggatttaaagtgtttagggtaggaaagtatgtattatgtcgttagttgagaagtaagtggtagttgagaagtaagtggtagttcgttttaggttttagtttggaagtggtggattgtcggtatttattagtagatttggtagtaggttttttcgtacgggtttgtttttcggagtattttatttttatttgtttattgatattttttagaaaataaatgttgagggtggtttttttgaagtgtagagtaattgtgattacgagttttagagaaaatagtaaatttttttaatttagtttttttttttttattatgatttatgatttatagggattttgaaaggtttacgttttggttttgtgtttataataattttttggagtaggcgttatttgtttttttttttatggacgagaaattgagttacggagaggtttgtttaattggtagagaggttatagttatttagtggggagttgtttaatttggttttagagtttaagtttttaattgtttttttaggttttagttagttatttatatgggtagttgtagtattttgcggtaagagtttgtatttaggtatagattagtggaaagtaaggcggggtgtttgttttttttagggaagttagtgaagattttataaaggtgattttagtgttggaattagaggtgtagagattgaggtgtagaggtgtgatagtatgttgaattcgtggaatattaagcgttttattgtaaagtgtgtgtgagagtttataaggggaggagataggttaggtggagaagtaggaattaaataatgaattgttatattatgtgtattagtaagaaatttagttttattaatttaagtaaaaagaggaatttattgttttagaaaaattagagttaaatagaaaattatagatgttagttgggttttaagaggttagaattaggaatttaaattgttaggattttttattttttatttttgtttgggtattgatagttttttatatttggtaggaattatggatgttgatagtttttgagttttgatattttgtagttttttttattttaataaaatgttagggaaaggttttgatttgtttagttaggtttaggtgttagtttgtatgggaaggatattttcgtagagggttgggttgggttattagaagaagcggaatggcgtgtttgaagtataggtgttgagttaataaaataatatatttattatgttttgttgaagttagttattatttattaatgttgatattattggattattaattataaagggaaatgattttatgtaggattagatatgttatttagaaagattagttattttataaaatagtttgagggtaaatataaggtttattaggaggttgttgtttaagttggagtcgataagtagtttaagtggagaagaggatagttagtagaatatttagaaggaagagttagtaggtttttgattggatgttagtagagaaagaggataacgttagcgtaggtatagcgttaaagtaagtgttaggtttttttttttgaatacggggttttatgagtgtatcgtgtgatttttgtgagtgtataatttgtacgtttttgtagtttgttttgggaggaggattgtttgtttgtttttcgtgggaagattaattgtagttttttatattttgtagaaatttttgaatttgtttttgtatttttcgttttaaaattggggttatttttgtgaagttttttttgatttttttagaagagataagtatttcggttttgttttttattagttttagtgagttttttttttaaagtgtatttttaatatatttttttagattttttagtgtatttttttagattttgttgtgttttttgtttttttaaagttaatttaaaatataaaatttttaaagtaggaagaaattaataatgttttggtttttgtttagttttttagttttatttttattgttgttgggtttgattttatagttgaagtttattttagatgagaggatttggtaagaatagggaagtagataagtgaatatggtgatatagttagtttttaggaaatttaggtgtttaggaatgtattgtgttatatttatgggtttttattaatattttttaagtgaaaataaaatttgtgtgtgttatttaattagtagtattttattttttatgtatttttatatataaaagtagtatatatttttaagtgaattagggtgtgttattggttttttttatttagatgagtgttttattttgagtaatagttgaagagttaggttggattttatattaattggaaggttttttattgattttgtatagtttattagttatgttttttattaattatttgattttaggataaagttttgagtattgtttaaattttttattatttttttggattttatagttattttagagatttaaaatatataggataatattttttaattatatttattgaatagggtattaaatttttttttttattttattttgatttataatttatatagattttgaaaggattatattttggttttatttaaaagaaaatttaggttgggggtagtggtttatgtttgtaattttagtatatcggcggaaggattattggagtttagaagtttaagattagtttgggtaatatggtaaaatttatttttataaaaaaatataaaaattaattttgtgtggtggtatgtgtttgtagttttagttattggggaggttgaggtaggaggattatttgagtttaggaggtttaggttgtagtgagttatgattgtattattgtattttagtttgggtaatagagtaagattttgtttttcgtgtttgtgtgtgtgtttgtgtgtgtgtgtgtgtttgtgtatgaaaatttaaagaaaagtaataaatagttattttataaaatttggtagtatattagtagtgaagttgttttataaattagatgagtaattaatggtttaattttgattgaataaagaattagaatgaggtttgaattagaatgaagtgaatttttaatagaaaggaatttatttgtaatttttttattaaaggggtgtttttattttagattattttaatgtatagtaattagaatattaggtatttgtttaggttttgtgtatttttaagaaattatttattttaatgtattgtttaatttttgtagtggttataatataattgtgataatgtaataaaattaggaaatattatttgaagtagatgtttttgaagttattagaaaatagttttttttaattttaatttaaatatggaggtaatttattttttattttattaaacgattataaagatgttggaagtattttttttaatgaaaattaataaaattttgtatattgttaagttacgtaatttttttaagtttttgtttttttattggtaaaatatgtatggtaatattgttttttttacgggatggatgtgatgagtatttgaggtaatgtattaaaaaggtaagtatattgtgtgttttgtagtaaatatttaatatgttagggattatttaataatgtgtattattattttaataaatatatttttaaatattaaatttttttagttatatgtgagaaattgtgttggtttttaaaaaaataaatttaattagattagtatgagaaatttaaaataggtttagtagttaatttatttttttattttttttaatagataaaaaagtttggttttttagtagattggaaaggtttgtattgtttttttatttttttaattgttttttaatttagaatgagttagtttaaaagagaattagtgttgagaaatgattttttttagggattagattggtttggtttagttagaattaatgttagattaaatttaattagatgaaattggataaataggagtaagaataaagttttggattttaagttagaaaagtggttgagtagatatttattggataagttttaatttggtggtggtgcgagggaaaaatataggggaggttagttatttataagtttattgtaggttattatgtgttatgtttggttttttaaaaagaaaaattttaattagaagattttaatgaatatttgaaatattatttgtaagaattattaaaatgtttgtatttagtttaaatttgggggatgcggttttttgttacggtgaaagttggaaagtattaagaaaaatagttattttattattattggaagttattcgggagggagattgtaattaaatatgttttgataaaaatataaaggttttgatttggtattttttatttatttagtgtggattttttatgttggttttgtttgttgtgtagatgaaatttttgtgatagtttttatttttgtttttgtatttttaatatggggaaggtgttagattttttttgagagttgtttttaaggaaaagatttagatgttttaatttgaaatatttgtttttgagttgtagtgttagatgatttagaatttagaataatagtttattttatttttatttttttatgttttttagcgtgttttttttatgaagaggttggtgagtaggttgttagatgatttttgtagagtttatagttttgttttattatagatgtataaattttttatatagtttttttatattagtgtgttaagatgggtgatgaatttttcgggttgtttttttttaaagagatatagatgtttttggtggttataggatggatttaggtagtagttttggtttttgttatttagttatgtagaggaaatggttagtgtttttagattatattttgtaggtatttgtagtttgttatttattttatatttattaatatttattgtagagttattacgattgttattttttggttttttgtgatattgttatggtttcgtcgatagtattgttttgtattatttgttgatttttattggttttttgtgttgtttttttttttttatattttgttttttttggtttattagttttttgaggaaatagttggttttaattagggtttttttttttttttttgtattgtaattaaagtgttaggaaaaataaattttttttttttgtgtttagtttttttaaattattagttgtgagttgtaggggagttttgggaattagattttaaaatagttaaagtttatttcggatagtatgtagatgtaatatattaaataattttgagtttatttttaaaagtaatatgagttatataaaattattttggtatttttaagagatgggaaaatttgtaagattattttattttatgaaattattttggtaagatttttttttaagttttagagataataatatttttttgttgtttttatatatatttttatttatatagtgtaaatgtattagaagttaattgtaagttttaattaatttaatttgaatatataataatttaaattttatattataaaattttgaagtttaagaaaattgtttatgtttgttatattattttggtaaataatatttggtaaaaaataatatttggtaaaataaaggtagatgtttaataattatatagttttttttttggtagtattaaaaattatagattatattttttggtgtaaatttataagttttttttttaatttagtagtaatttttttttgttataaattattgaaatattttttttttattatttgtttgttttgttttgaaagttatgatttaagtttttgttttagtttaattatattaggtttttatttaaattataggaaatatattttgatttacgttaaaaattaatttaatgttgtataagtttatttttgtttgtagttttttattgtgtgatttagtagtttttttttaagtataaatgtattttgtttgatattttagtatgtagattgatttttatatgttttttttttataggaattttaggttgagcgtatattattataaagttatttttattgggtataattaaaaagagagttttaggttgggttcggtggtttatatttgtaattttagtattttgggaggtttaggtgggcgatttatgaggttgggagtttgagattagtttgattaatatggtgaaattttatttttattaaaaatataaaaattagttatgtttggtggtgtaaatttgtaattttagttattcgggaggttgaggtaggagaatcgtttgaatttaggaggtagaggttgtagtgagtagagattatgttattgtattttaatttgggtaatagagtaagattttgttttaaaaggaggggagtggagtttaaaaggaagtaaaggatttttagttttggaaatttagaggaaggggggtttttgttatgtagtggtagaaagttgagtgatattgtagtttttagtgatattaaaagtagagaatgtttgaggagttgtgtgatttagtttaggaggtttttaattagagtgttgaaagtgttatttggtttttttttgcgttttatagtaataggtgagattttgtttaattatgggaagaattgttaaaaagaaattaggattatttggtttgaaaatttttagtttttcgagaggtaaaaaaatgttaaaatgaagaaatggttttcgaaggaaggtttagatttagtatgagtttttttagtattaagtatttttgtttttcggttgaaaaagtatatttatatgtgtgattgttatttgatattaatgttgattgaatttaggtgaagaggaatgatttttatttttatttaaaatatggattgtgaagtatttgagttgttttaggaggttgagatgtaaacgtgtgatagaaaaaagatttttttaaggaagttttagtattttttgttatgaatggttatgggaattttataaaaaataaagagttaaggttattttggtaagaatagtgttttagggattatttataaggaagttgtttagagaattagagatggtaggtattaagagtttttagttgcgtttttggaagtagaaggagaaaatttaggtgtttggttattggttataaaaaggttaagttagtagtatgaagtatttgaatttttagattttttttagtttgataattttaattttttggtttaaattattatattattttggtaaataatatagaagttagattttttggtaataattaaatttatttatttgtttgaggggagttatgaaatatataggtttattgtaaagtattttgtttttaagttagtttttttttaattttttttttaaagaatatttaaattgtaaatataaagtagggttttttaattttggtattgttggtatttggggttatattattttttgttgtggaggttgtttgatgtattgtaggatatttagtagtatttttggtttttgttttttagatgttagtagtattttttttatatattttttttttaggttgtgagagttaaaaatgtttatagatattgattgtttaatgttttttggtaataaaattattttttatagagaattattgtaataaaggaaaaaataattagaaaaggaaaataataatggtgatagtatttaattgtttattagtgtttattatttatttaaaaaatttttaatttatgttttgttttgaaaatatatgtgttaaataattgtaaattaaggtaatatattagtttggttttgaatattggaatttttgtttggggaaaatatagattttttttttagtagtaagtaaatattttagggatatgaaagtaatattttatgatagattaggaaatttgaagtatttagtagtgtggttaagaaagaatttaaatttattaatgtttgatttagggagtattttttttatttaagtagtttgtttgatataaatataaattattattattattatttaaggtattttggaaaaatagaaatttttgttttttttataatttttgaggatgattataagttatgtttggaagttattgtttttatttatatggatatttatttatttgttttagttatataagtaaattatgtttaatagagtgttttagggaggtgagattgaataattataaatttggggttatatcgttaattgtgtatatttatgtttatttgtaaagaagtgaagggagaaaggagaagtgtgtgtgtttagttttttaaggggtgttggataataattttttatattaaatagtggggaaaaatgatttttttttttttttttttaagagaattgaatgtagtggtatagttatagtttattgtagttttgattttttgggtttaagtaattttttttagtttttcgagtagttgaaattataggtataggtttttttatttggttaattttttaattatttgcggagatagggtttttaatttttgagtttaatagatttttttattttagttttttaaaatgttgggattataggtgtgggttatcgtatttggtttatgattatttttaataattagattttggtagtgtttgattagatgttaaaatgatttttgtttgtttttttacgtgatttaagttttattaatagatgttttttgaaagagtgaaggtaagaagaaatgttgggtatgttttgtaaaaagttttgtatattttagagagtagagtgttgatgaaattggaatgtgtggttttattgtttaatttttaggtatttatttttgtattatagaaaaagtgtggaaggtataaatagtagtatgtgtagagttgagaggttgatggtattttagagtgaaattggttatttttattgtagttagtttttttgtagatatttgtattagtttgttttcgtgttgttgataaagatatatttaaggttgggaagaaaaagatgtttgattggatttatagttttatatggttggggaggttttagaattatagtaagggcgaaaggtattttttatatggtggcggtaagagaaaaatgaggaagaagtaaaagtagaaatttttgataaatttattagatttcgtgagatttatttattattacgagattagtatgggaaagattagttttcgtgatttaattattttttttaggttttttttataatacgtgggaattttaagagatataatttaagttgagatttcggtggggatatataattaaattatattatgttatttttggtttttttaaattttatgtttttatattttaaaattaattatgttttttaaatagttttttaaagttttaatttattttagtattaatttaaaagtttatattttaaagttttatttgagataaggtaagttttttttgtttgtgagtttgtaaaattaaaagtaagttagttattttttagatatagtgtgggtataggtattgggtaaatatagttattttaaatgggagaaattggttaaaataaaggagttatagagtttatgtaagtttataatttagtggggtagttaaattttaaagtttcgaaatgattttttttgattttaggttttatatttaggttatgcggatgtaagaggtggttttttatggttttgagtagttttgtttttgtggttttgtagggtataggtttttttttagttgtttttataggttgttattaaatgtttgtagtttttttagaagttgttagtagatttattattttggagtttggaggatggtggttttttttttatagttttattaggtagtgttttagtagggatttgtgtgagggtttcgattttatattttttttttatattggtttagtagaggttttttatgagggttttgtttttgtagtaaatttttgtttgggtatttaggtatttttatatattttttgaaatttaagtagaggtttttaaattttaatttttgatttttgtatatttataggtttaatattatgtggaagttgttaaggtttgtgatttttatttttcgaagttatagtttgagttatatgttggttttttttagttatagttggagtagttgggacgtaaggtattaagtttttaggttgtatatagtacggggattttgggtttggttataaaattattttttttttttaggttttcgggtttgtgatgggaagcgttggcgtgaatgtttttgatatggtttggagatattttttcgatggttttggggattaatattaggttttttgttatttatgtatatttttgtagttagtttgaatttttttttagaaaatgggttttttttttttgttttatagttaggttgtaaattttttaaatttttatgttttgttttttttataaaattgaatgtttttaatagtacgtaagttattttttgaatgttatgttatttagtaattttttttattagatattttaaattattttttttaagtttagagttttataaatttttggggtaggggtaaaatgtcgttagtttttttgttaaaatatagtaagagttatttttgttttagtttttagtaagttttttatttttattgagattattttagtttggattttattgtttatattgttattagtattttgggtaaagttatttaataagttttttaagtaaagttttaaatatttttttattttttttgagttttttaaattgttttagtttttgtttgttattttgttttaaagttgtttttatatttttttgtatttttttagtaatgttttattttgttggtattaatttattgtattagtttttttttatgttgttgataaagatatgtttaagattgggaagaaaaagatgtttaattgaatttatagttttatatggttggagaggttttagaattatggcgggggagaaaggtattttttatatggtggtagtaagagaaaatgaggacgaagtaaaaagtagaagttttaataaatttattatattttatgagatttatttattattacgaaaatagtataggaaagattggtttttatgatttaattatttttttttgggtttaagttataatatatgggaattttgggagatatagtttaagttgagatttgggtggggatatagttaaattttattaatattgaatataatttgtagtattaaatattgaaaattttagtgatgaaatgaggattattaatttaataattagtgtatttgattataaaatttttattatattaagggaatttattgttttatgttgtatttgtgttttttttatattgtaatgatgtttttataatttaaaacgaattagaatttttttatagattttttaataaaattaatttttagatgtttattttttatttaaataattttggtattttggtgaattttatttttttttaaatatatatatttgggtaatgtggtattttataataaggttttttaatattaatgttagttttttataattgttttttttatttttttatttttttatagt

SEQ ID NO: 960 - DNA, 17294 bp, Artificial Sequence
  chemically treated genomic DNA (Homo sapiens)
attgtaagaaaataaaaaagtaaaagggataattgtaagaaattaatattaatattggaaagttttattgtaagatgttatattgtttagatatgtatatttgaagaaaagtagaatttattaggatattaaaattatttaaatgaagagtagatatttagaaattaattttattgaaaaatttatagaagagttttgattcgttttaaattatggaaatattattgtaatataaaggaaatataaatatagtatgaagtaataaatttttttaatatgatagaagttttataattaaatgtattgattattgaattaataatttttattttattattagaatttttaatatttgatattatagattgtatttaatgttgatagggtttggttgtgtttttatttaaattttaatttgaattgtattttttagaatttttatgtgttgtggtttggatttagggagaggtaattgaattatgggggttagttttttttgtgttattttcgtgatagtgaataagttttatgagatatgatgggtttattggggtttttgttttttgtttcgtttttatttttttttgttgttattatgtaagaagtgtttttttttttcgttatgattttgaggtttttttaattatgtggaattgtaagtttaattaaatatttttttttttttagttttgggtatgtttttattagtagtatgaaaaaggattaatatagtaaattggtattagtagagtggggtattgttgaaaagatataagaaaatgtggaagtaattttggaatagggtaataggtagagattggaatagtttggagggtttagaagaaataggaaaatgtttggaattttatttaagagatttgttgaatggttttgtttaaaatgttgatagtaatatggataataaaatttaggttgaggtggttttagtggaggtgaggaatttgttgggaattggagtaaaggtgatttttgttatgttttagtaaagagattggcggtattttgtttttgttttagagatttgtggaattttgaatttgagagagatgatttagggtatttggtggaagaaattattaagtggtatagtatttaagaagtgatttgcgtgttgttaaaggtatttagttttataagggaagtagagtataaaagtttggaaaatttgtagtttgattatgagatagaaaagaaaaatttattttttggggagaaatttaagttggttgtagaaatgtgtataagtagtaagaagtttaatgttaatttttaaggttatcgagaaaatgtttttaggttatgttagagatatttacgttagcgttttttattataggttcggaggtttaggaggaaaaagtggttttgtggttaggtttagggttttcgtgttgtgtgtagtttagggatttggtgttttgcgttttagttgttttagttgtgattgaaagaggttaatatatagtttaggttgtggtttcggagggtggaagttataagttttggtagtttttatatggtgttgagtttatgggtgtgtagaagttaagaattgagatttgggaatttttgtttagattttagaagatgtatggaaatgtttggatgtttaggtaaaagtttgttgtaggggtagggtttttatggagaatttttgttaggttagtgtggaaggaaaatgtgaggtcggagtttttatataagtttttattggggtattgtttggtagagttgtgagaagagggttattattttttagattttagaatggtagatttgttgataatttttggaaaagttgtagatatttgatggtagtttgtgaaagtagttgagagggagtttgtattttgtaaagttataggggtagagttgtttaagattatgggaagttattttttatattcgtatgatttggatgtgagatttggagttaaaggagattatttcggagttttaagatttgattgttttattggattatggatttgtatgggttttataatttttttgttttggttaattttttttatttggaatggttgtatttatttaatatttgtatttatattgtatttaggaagtaattagtttgtttttgattttataggtttataggtagaaaggatttgttttgttttagatgggattttggaatgtggatttttgggttaatgttgaaatgagttaagattttgggagattgtttggaaggtatgattggttttgaaatgtaaggatatgagatttggaggggttaggggtagtataatatggtttggttgtgtgtttttatcgaaattttaatttgaattgtattttttggaatttttacgtgttatgagagggatttgggggaagtaattgaattacgggggttggttttttttatgttagtttcgtgatagtgagtaagttttacgagatttgatgggtttattaggggtttttgtttttgttttttttttattttttttttgtcgttattatgtaagaagtgtttttcgtttttgttgtgattttgaggtttttttagttatgtggaattgtaagtttaattaaatatttttttttttttagttttgggtatgtttttattagtagtacgaaaatagattaatataaatgtttatagaggaattggttataatgaggatggttaattttattttaaaatattattaattttttaattttatatatattattatttatgttttttatattttttttatagtataggaatagatatttaaagattgaataatggagttatatattttagttttattaatattttgttttttggggtgtgtagggttttttataaaatatatttaatatttttttttgtttttatttttttagaaaatatttgttgataagatttgagttacgtaagagaatagatagaagttattttaatatttaattagatattattaaaatttagttattaaaagtagttatgggttaggtgcggtggtttatatttgtaattttagtattttgggaggttgaggtgggaggatttgttgagtttaggagttggagattttgttttcgtaaataattaaaaaattagttaggtgaagaggtttgtgtttgtagttttagttattcgggaggttgaggaagattgtttgagtttaggaggttaaggttgtagtgagttgtgattgtgttattgtatttagtttttttagaaaaaaaaaaaaaggagttatttttttttattgtttggtgtaaaaggttgttatttaatattttttggaaaattgaatatatatattttttttttttttttttatttttttatagataaatatgaatgtatatagttagcgatgtgattttaaatttatggttatttaattttatttttttggaatattttattaaatatgatttatttatataattaaaataaataaatgaatgtttatgtggataggaatagtggtttttaaatataatttataattatttttaaaaattgtgagagggatagaagtttttatttttttaaagtgttttggatgataatgatgatgatttatatttatattaagtagattgtttaaataagaaaaatattttttaggttaaatattaataaatttgggtttttttttggttatattgttaaatattttagattttttgatttgttatgaggtgttatttttatatttttaagatatttgtttattgttgaagggaaaatttatattttttttaaataaaaattttaatatttaagattaaattggtatattgttttaatttataattatttaatatatatatttttaaagtagaatatggattaagagttttttaggtaaataataggtattaatggataattaaatgttattattattattattttttttttttgattatttttttttttattgtagtggttttttgtgggaagtgattttgttgttaggagatattaggtaattaatgtttgtagatatttttggtttttataatttggagaagaagtgtgtgggggaggtattgttggtatttagagggtagagattaagggtgttgttaaatattttataatgtattagatagtttttataataaaaaataatatagttttaaatgttagtagtgttaaggttgagaaattttgttttatgtttataatttaagtgttttttaaaaaaaaagttgaggaaaaattaatttaaaaatagaatgttttatagtaaatttgtatattttatggttttttttaaataaatgaatagatttggttattgttaaaagatttaatttttatattatttattaaaatggtgtaataatttgggttaaaaggttgagattattaagttggggagggtttgaagatttaaatattttatattattaatttgatttttttgtggttagtgattagatatttaggttttttttttttgtttttagaggcgtagttgaaggtttttggtatttgttatttttggttttttaagtaatttttttgtaggtgatttttaaggtattgtttttgttagagtagttttggttttttgttttttgtagagtttttatggttatttatagtaggggatattgaggtttttttaagagggttttttttttattatacgtttgtattttaattttttgaaataatttaaatattttataatttatattttaggtagaaataaaagttatttttttttatttgggtttaattaatattaatattaaataataattatatatataaatatatttttttaatcggaaaatagaggtatttgatgttaagaaaatttatattaaatttgagttttttttcggagattatttttttattttggtatttttttgtttttcgagaggttgagaatttttaaattaggtggttttggtttttttttaatagttttttttatgattgagtaaagttttatttgttattataagacgtaagaagaaattaggtggtatttttagtattttggttagaaattttttgagttagattatatagttttttagatattttttatttttggtgttattgaaggttatagtgttatttagttttttgttattatatagtaaggatttttttttttttaggtttttaagattggaaattttttgtttttttttaagttttatttttttttttttgagatagagttttgttttgttgtttaggttggagtgtaatggtatgatttttgtttattgtaatttttgttttttgggtttaaacgatttttttgttttagtttttcgagtagttgagattataggtttgtattattagatatggttaatttttgtatttttagtagagatggggttttattatgttggttaggttggttttaaatttttaattttatgaatcgtttatttgggttttttaaagtgttgagattataggtgtgagttatcgggtttagtttaaggttttttttttaattatatttagtaggaatggttttataatggtatacgtttaatttgaaatttttgtgagaaaaaggtatatagaagttaatttgtatattagaatattaaataaagtgtatttgtatttaggaaggggttattgaattatataatggaaaattataaataggagtaggtttgtgtagtattagattagtttttaacgtgaattaaagtatgttttttataatttaagtaaaagtttgatatggttagattaggataaggatttaaattatagtttttaaagtaagatagataggtggtaggaggaaaatattttaatggtttatagtaaaaagaaattattattaggttaaaagaaaaatttataaatttatattaaaagatgtaatttgtggtttttaatgttattagaggagaaattgtgtggttattagatatttgtttttgttttgttaaatattattttttgttaaatattatttgttaaaataatatgatagatataagtagtttttttaagttttagaattttgtaatgtgaggtttaaattgttatatatttagattaaattaattaaggtttataattaatttttaatatatttatattatgtaaataaaaatatatgtagaaatagtaaaagagtattattatttttggggtttaagaaaagattttattagagtgattttatgaaataagataattttatagatttttttattttttgaaaatgttaagatagttttgtgtaatttatgttgtttttggaaatggatttagaattatttagtgtattatatttgtatattattcggagtaaattttagttattttaagatttaatttttagaatttttttataatttatagttgataatttaagaaaattaaatataggagagaagaatttgttttttttaatattttaattataatgtagaaaaaaaaaggagggttttggttaaagttaattgtttttttagaaagttgataagttagaagagataggatatgaaaaaagagagataatataaaagattagtgaagattagtaggtgatatagagtagtgttatcgacgggattataataatgttataaaggattaaaaaatagtagtcgtgatagttttgtaataaatgttggtgaatgtagggtggatggtaaattatagatatttgtagagtatagtttgaagatattggttattttttttgtatagttgggtgataggaattagggttgttatttgagtttattttgtaattattaaaagtatttgtgtttttttaaaaaaggatagttcgaggagtttattatttattttaatatattagtgtaaaaagattgtataaaaggtttgtatatttatggtggaatagggttatggattttgtagaaattatttgataatttgtttattaatttttttatgggaagagtacgttgagaagtataaggaagtgaggatgaagtaaattgttgttttggattttaagttatttgatattataatttaaaaataaatgttttaaattaaagtatttggattttttttttaagaataatttttagagaagatttaatattttttttatgttaaagatatagggataggaatggggattgttataaaggttttatttgtatagtaaatagaattagtataagaaatttatattgaataaatgaaaagtattaaattaaggtttttgtatttttgttagaatatatttgattataatttttttttcgaatggtttttagtggtgataaaatgattattttttttaatgttttttaatttttatcgtagtaaggagtcgtattttttaggtttaagttgagtatagatattttgataatttttgtaggtgatgttttaagtgtttattgaaattttttaattgaaatttttttttttaaagagttaggtataatatatagtggtttgtagtgaatttgtaagtaattaattttttttatatttttttttcgtattattattaagttggggtttatttaataaatatttgtttagttatttttttgatttgaaatttagggttttatttttatttttatttatttaattttatttagttgggtttggtttggtattagttttgattggattagattaatttagtttttgagagaagttattttttaatattaatttttttttggattaatttattttgaattgaaaaatagttgaggaaatgaaaaaataatgtaggtttttttagtttattaaaaaattaaatttttttgtttgttggaagagatggaagaatgagttagttgttgagtttgttttaagttttttatattgatttggttaagtttgtttttttaaaagttaatataattttttatatatgattaagggaatttaatatttaaagatatatttgttaaaataataatgtatattattgaataatttttaatatattaagtatttattataagatatatagtgtgtttatttttttaatgtattattttagatatttattatatttatttcgtgagggagataatgttattatatatattttattaatgagaaaataaaggtttagagaagttacgtaatttgataatatgtaaagttttgttggtttttattaagaaaaatgtttttaatatttttgtgatcgtttaataaaataaggggtaaattatttttatatttaaattggaattggagaagattattttttggtgattttaaaagtatttgttttaggtaatgttttttgattttattatattattataattatattatggttattgtaaaagttgaataatgtattaaaatgaataattttttaaaaatatataagatttaaatagatatttagtattttgattattatgtattaggataatttaaaataaaggtatttttttaataagaaaattataagtaaatttttttttgttaggaatttattttattttggtttaaattttattttgattttttgtttaattaaaattgaattattaattatttatttggtttgtaaagtaattttattattggtatgttgttaaattttgtaagatagttgtttattatttttttttaggtttttatatataaatatatatatatatataaatatatatataaatacgagagatagagttttgttttgttgtttaagttggagtgtagtggtataattatggtttattgtagtttagattttttgggtttaagtgatttttttattttagtttttttagtagttaggattataggtatatgttattatatagggttaatttttgtatttttttgtagagatgggttttgttatgttgtttaggttggttttgaatttttgggttttagtgattttttcgtcgatgtgttgggattataggtatgagttattgtttttagtttaggtttttttttagatagaattaaaatatggtttttttaaagtttgtgtgaattatgaattagaataaaatgaaaaagaaaatttaatattttatttaataaatataattaaaaagtattattttgtgtattttgaatttttgaaataattatagaatttaaagaaatagtgaaaaatttaaatagtatttagagttttattttaaagttagataattagtaggaagtatagttgataaattgtataaggttagtgaagagttttttagttggtgtgaagtttagtttagttttttagttattatttagagtgggatatttatttggatgaagaaagttagtggtatattttgatttatttaaaaatatatattatttttatgtgtaaaagtgtatgaagagtgaaatattattgattaagtggtatatatagattttatttttatttaagaagtattaatgaaagtttatgaatgtaatataatatatttttaaatatttggattttttggagattgattatattattatatttatttgtttgtttttttgtttttattaggtttttttatttaagatgaattttaattatagagttaagtttagtaatagtaagaataaggttgggaagttaagtaagagttagagtattgttggtttttttttattttggagattttgtgttttaaattaattttaaaagaatagggaatataataaaatttagagaaatgtattgaaaaatttagagaaatgtgttagaaatgtattttaaaaagagggtttattgaaattaatgaaaagtaaggtcggggtgtttgttttttttaggggagttaggaaaggttttataaaagtgattttagttttagaacgagaggtatagagataaatttaaaagtttttgtagaatatagaaggttgtagttgatttttttacgggaggtagataggtaattttttttttagagtaagttataaggacgtgtaaattgtgtatttataggggttatacggtgtatttatagggtttcgtatttagaaggaagggtttggtatttgttttaacgttatgtttgcgttagcgttattttttttttttgttgatatttagttagaggtttattaatttttttttttaaatgttttgttaattgtttttttttttatttaaattatttatcgattttaatttaagtagtagttttttaatgggttttgtgtttatttttaaattattttataagatgattggtttttttaaatggtatgtttgattttgtataaaattatttttttttgtaattgataatttaatgatgttagtattagtaaataatgattgattttagtaaggtatagtgggtgtattattttgttggtttaatatttgtattttaggtacgttatttcgttttttttggtaatttaatttaattttttacgagaatgttttttttatgtaagttggtatttgaatttagttgggtaaattagagtttttttttggtattttgttagaatggaggaggttgtaagatgttaaaatttagaagttgttagtatttatgatttttgttaagtgtggaaagttgttaatatttagatagaaataagaaatggagagttttagtagtttgggtttttggttttagttttttgagatttagttggtatttataattttttgtttaattttggtttttttgagataataaatttttttttttgtttaagttaataaagttaggttttttgttggtatatataatatggtaatttattatttggtttttatttttttatttaatttattttttttttttgtaagtttttatatatattttataatagaacgtttaatattttacgaatttaatatgttattatatttttgtattttagtttttgtatttttggttttaatattggggttatttttgtgaagtttttattgatttttttaaaagagataagtatttcgttttgttttttattagtttgtgtttaagtgtaagtttttatcgtaaagtattgtaattgtttatgtggatgattgattagagtttagaagagtagttaagaatttggattttggagttaaattgagtagttttttattgagtggttatgatttttttgttagttgggtaggttttttcgtaatttaatttttcgtttataaagagagagataaataacgtttattttagaagattgttgtgaatatagaattaaaacgtggattttttaaagtttttatgaattataaattataataaaaaaaagaaaattgaattgaaaaggtttattgttttttttggagttcgtaattataattattttgtattttagaaaagttatttttaatatttgttttttaggaaatgttaataagtaggtggaaataaaatgtttcgaagaataaattcgtacgaagagatttattgttaaatttgttagtgagtgtcggtaatttattatttttagattgagatttaagacggattgttatttattttttagttgttatttattttttagttggcgatataatgtatatttttttattttaagtattttgagtttttttttttattttcgttaagaaagaagtatttaagttacgaattgagattacgatgttatatgttgattaggatatttatagttatgcgttatttaacgatggagattcgttttgagaaatggagaaatgtttttttaggtaattttttcgggtagtagaaatttagataaatttagatgatatagtttattgtttttaggttatgaatttgtatagtttgttattgtattgaatattgtaggtaatcgtagtatattagtgagtatttgcgtatttaattataaaaaaaggtatagtaagaagacgatattataatttttgagattacgttgttttatattgattagtaacgtttttttgtagcgtataatcgtatttaaaagtggattataagagtcggaaaaataagcggcgtgatttgttgtggcggtaattagggaagaggtaggagaaaggtaatcgacgagtttaaattacggagttttagtttcgcgattttatttcgcgttttcgtcgttcgtttagggttcgacgtaggggtttcgggttagggcgatttcggagaagcggggcggggtttttcggttggggcggatttttttttttttttcgtttcgattcggtcgtagttttgtcgcgaacgacggtatttgaggacggttttagattcgcggtgtttattttagttttgtttatattttgtatgataaggggtaggagaaagaggagagttatgttgttatcgacggtcgttggttttaatttcgagcgtttgcgggattagtttagtattgttttttagtttcggttttacgttattttcgttatcggggtttgtgtcggcgtcggtaggaggcgggattagggcgtgggcggggttaagttcgggaagtcgtaggaggcggatttaggcgtagtatttagtagtgagtacggcgtcgtgcggtcgggatttggatttttgggtgtgggaggaatttgagtgtaaaggttaaggttttttaatttggtattttattttgtaattttttttttagtttttttcggttttttggggttgtgtaagtttgtattaggttatagtcgagttataatttttattttattaatttttggattttatttggttgttttggagtttgatatttttagaagagaatgagattttaaaagttatttttagtttttgtttttttatttgaggaatttgagatttagttagtgaaatggtttgtgtagatttttatagtttaaattaaatcggtttgattaagaattattttgtttttggagaaaaaaattatttgtattatttttttagtaatttagtgttaaattagtttattaggtagttttttatgaagaggtttgtttttttatttttttgggtttgtttgttattttgtattttttttattttattgtagttatattgttaagttttttagcgtttgtgtttaaatatgcgaatgtttaatgattttatttgttttaattttttgagtattatgaatttttgttaaaaattttaaattgtaatatattttttttttttttttatttcgttttattgtttttttatggtattttttattttgttgtatattataatatatattttgatatttgtttttttttttttttaaaatgtaagtttcgtagagttgatatttttatttggtatttaattagtatttgttgagtgaaagattgtatgattattagtgttaaggaaaatttttaaagagggaaaatttttataaagatattatataaattagaggtattattagttagattattttatttgtattaataaattttttagtttagtattttttaaattttaatatatatgtgaattatttggggattttgataaaatgtagatttggatttagtagttttaatttaggttgggttttgagattttgtatttcggataaaatgtataggggatgttggtgttttttttaataggattatattttgaattagaagaatttagtttaatttagattaagtttagggagaatattttttttgatgtgtttttgatgtttattatatgaaagatattttttagtcgttgtaaggatgtaaggataaataattgatttttatcgtttaggcgtttatggagtaggataaaatatgatatttagtttgtaaatatttttgtggtatttgttataggttgggttattttggtagtaaattttgaggtcgagattaaggtataaggtattgattgattagggagtgtttttggaataaacgtttgtgaaggggaggtggaggaagtagagcggaggaagaagttgatttgtgatgttattttagtaaaggtttttaaggggcgttttggagttgggatggttttgtaaaggtgttttgagttggtatgaggggttgggttttaaagtttagtattgattagttattgaatattaattgttatgattttggggttgtttattttttttatggaggtattttttagaggaacgttgacggttgagggtgtttattggtagtttttttagtattaggaaggggatagaatttagttttttgtttttgagagggatttgggtaagttttataattatagtatttattattttacgtatttttttgaagattttgttagttagttatttggagattaaatatatttattaattgggtgaatattattaagtgatattgtttgtgattgatatgattaggtatagagataaagatttgagtaagatagatatggtttttgtttttacggagtttattgtttattgagggagatagttgttaaataaggaattatataagtattgaaatcgtgattattatttttaaggagagtaatgggaagagattaaaggagtataaataggaatttaatttagtttatattttaaagaaagttttttttttttttttttttttttttgagatagggttttattttgtcgtttaggttgtagtgtagaggtatgattatagtttattgtagttttaaatttttgggtttaaatgatttttttgttttagttttttaaatagttgggattataggtgtatattattatgtttggttaatttttttttttttttttgagatagggtttgattgtattatttagttgaggtatagtggtataattttagttgattgtaatttttatttttcgggcgtaagttatttttttattttagttttttaagtagttgggattataggtatttttttgtgttttttgtggagatggggttttattatgttgtttaggttgattttaaatttttgagtttaagtaattcgtttattttggttttttaaagtgttgggattataggagtgagttatttcgtttggttttatgttcggttagtttttaaattttttatagagttggggttttgttgtgttgtttaggttggttttaaatttttgggtttaaatgatttttttgttttaggtttttaaaatgttgggattataggtgtgagttattgtgtttggatttagggaaatttttttttaaggaagttattattatgttgtgatttgaaggataaggtaaaattagtttgaataaagttaaaagatgggggtggttatcggttaataagagaggtaggaagaagagtaataaattgtattttaaaattttatataaaaattttatatagttaatatagaaataaatgagcggtgttagttttttttgataaatttttaatgtttaatggttggggaatatttaagtatacgttggtttttattagagttttagattagtttttaaaatgaagaaaataaattggggtggagcgtagattattttaaagttaagtgtatattgaagtgttgttgtttaggagtaaggttatattttgaagattatatttatttgttttttaagttaataggttaaataaaataatttaagaagttagaaatatgatttaatgagaatagagtttgtgtgtgtggaataaattgtgtattttggttttgagtatagtgtatttttttttttttttttttaaagtagaaatgtttgttagtttttttttaaaggagatagcgtgaagatttgtaattgaagtatatagtttaaatttcgttgattagtttgtaaattatagttaatatttttgtttttttatattttatttatgtttttatattggtttttatttaattttgtttattttatagtatttattattatttggagattttattggaaatttaatatatttattaaatttgaattaaatatgaataaattgtatgtgttaaatatatgtattttatatatatatatattttataaataattattgaaattgtagtaattgttattaaggagagtaatacgattataggtgcgtaaatagggatttaatttgagatttaatgaaatgtattcgtgtgtgtgtgtatatataaaatatgtatatatatacgtagaaaattttgttttagtagtttttttttttttttaaaaaataaatttgttttttttattgttagatttcgagtatttagttaagtgtttattattttattaatatttatggaatattgatgattttgaattattaattgtatgtaattttgaattattattgttagtattgagtagttgaattaatgtttgtggttatttattaaataaatatatgatgaataaaataagtttgtaaagaggtgtgggattgaagtaggtatagttgaatttatggttggttaagttataattgggttattgataagaatttagagagatatttggatattatattggtatttaataaagtattatttttttgttttgtatttaattttttttttagtttttatgttgatattcgattgtattagattaatttttggtttgaagatgtttatttatagatagttaagtattttagtagttggtttgttttagagtattgtttagggtagatgttatatgttgcgtggtgattgtggtagatattatttattagttgattgttaatagtttttttcggtttttttttattttgttgtttttttattgtagaggttagataggtttattatttatttttttagtttttttggtagttaagtgtaggtatatgatgtagttttggttagcgaaatataagtagaagtttgtgaggtatgtgtgtgtgtggtggttattaggtgtataatggggaagaggattggaaagtattttgtgagaatttttttttttttatagaaggggtagatgtaatgggagagtttgttggttttggtttttttttaatttttttgttttgaatgtagatttagtgacgtttagatttgtagtagattttggtagtttgtaattatgaggtaataagattgaagatgaaaagttaatagttattagtggaagaataggaagttagaaagtttgaattatcgttagtattgagtttttgaattaatgtttatgattatttgtttttggtttatgggagaaaaaaataaatttttgttgatttaagttattattagttcgattttttgttaatcgtgtagattttttttttttttttttttttttttatttaatgttaggttaatttaaatagattggtttttagagagttggaatgtaaattatgatggagaagaggatgattgagtggaagggagaaaggagaaaagaagaaataataaatttaagtataggatgtagaagattagaatagtaagtaaagaagattatttgttgaggggag

SEQ ID NO: 961 - DNA, 16994 bp, Artificial Sequence
  chemically treated genomic DNA (Homo sapiens)
tggtgaaaggagggggttgtggtttatgataaatagtaagaaaaatttagtttattatcggagatttaagggaatttattttttcgttaatatgttaatttttttgattttgattttggaattttttgaaataagggggtattaagttatatattagggttttatttggtaatgattaaggtttattttgagttcggattttttatagttttgttgaatttagggaagatatttatttatttatttataggtgttagcggttttgtttttggttatgttaatttttacggatattaacgatgatataaaatggtagtaaatagtggaagatggtagttagagaaggtaatagagtttttaggaaatggagtttagaagttgtagaatttggattgtgggtatggtaggagtgggggttgggggaggcgttgtagatgaaggtagggagaggcgtaaataggtggggtgaatagtagaggaagaggtagataagtagggtatatgtgatttttacgaagtataattttaaagatttattgatggaatagtcgggttatggggagttgtggagcgtttgattgggtatagagttgggttttattacgagaaaattgaatagtatgatgagaagtttgttgtgaaatgtagggggttttggtattagataggtttggttaggagtttatattgttatttattggttgtgtgatttggggtatgtttagttagattttgatttaataagtaaaattattatgtgatgtgatgtgtgtgtgtgtgtgtgtgcgtgtgtgtgtgtgtgtgtgtgtgtgtgtgttgttatattatagagatttgattttatataaatatgagagatgtgtgtatagtttaggagagataatttttttttgttcggtgttggagtttgaagtttttagggtaggaggtcgggaagagaaggtggataagagatggaggaagtagggataagttgaaatttaaggtttagttgttattttttttattttgttttttatttttatatttttagtttatacgattatatgagatttacggggagttggaggagtttggagtttgtttgtatttttgttatttaggatattagtagagaagttataggtcgggagttgtaaagatggatgttttgtgttttgttttagttttttaagggtaaaggaatatggttgtatttttttttttattttttaagtttcgtatattgttagggtttgaatgtgtttttaaattttacgtgttggaaatttgatttttaatatggtagtatggaggaatgaggttttttagaggtgattggttatggtgattttgtttttatggatgggtggatttatttatggattaatgggtttatggattaatggttattatgggagtggggttggtggttttataaaagaggggatgggtatggtggtttatttttgtaattttaatattttgggaggtcgaggtaggtggattatttgaggttagtagtttaagattagggtaataggtgaaatattaattttattaaaaatataaaaattagtcgggtgtggtggtaggtgtttgtaattttagttatttgggaggttgaggtaggaaaattgtttgaatttaggaggtagaggttgtagtgagttaagattgtattattgtattttagtttaggtaatagagtgatattttattttaaaagaaaaaaaaaaaaaagaggaagataaattcgagtattttagtatttttagttttttttgttatgtgatgttttgattattttatgattttgtagagaatttttattagtaagaaggtttttattagatttagtttttagattttggattttttagttttttaaaatgtaagaaataaatgttttttttttattaattatttagttttagatattttgttataagtaatagaaaatggattaagatatatataaatatttttttttgtttatgttattttagaattttttagggaggggaattttaggaaatgtagttatagtttagtagatttattgtagtgtaaatttattataggttaagttattgaattttgttagtgtttttatgggatagttatcgtttgtttaattgggaggtttgagtgttataatatttagagaagtattattggttagtaaaaaatgttggtttttttttgttattttttatttatttttttgagggaggtgagaggagtttttttaggttattagaaatgttttaggaagattaattgattataaggtaaggaattaatggaaagggatggtgtagatttagggtttgtagggttgaagtgtatataatagatggagttttttttataaataaatatataatttattataaaattaggtataaaagtatttttttttttttttttttttttttttttttgagatggagttttattttgtatttaggttggagtgtagtggtgttgttttagtttattgtaatttttattttttaggtttaagtaattgttatgttttagttttttaagtagttgggattataggtatttgttattatgtttggttaatttttttatttttagtagagatggggttttattatgttggttaggttggttttgaatttttgattttaggtgatttatttatttcggttttttaaagtgttggaattataggtgtgagttattatatttggttaaaagtatttttttagaatgatatataggttataattttttttttttttttgagatagagttttgttttgtggtttaggttagagtgtagtagtatgattttagtttacggtaatttttattttttgggtttatgtgatttttttgttttagttttttaagtagtagggattataggtatatgttattacgtttggttaatttttgtatttttagtagagacgagttttattatgttggttaggttggttttgaatttttgattttaggtgatttatttggtttagttttttaaagcgttgggattagaggcgtgagttatcgtatttagttattaaagatgtaattttgaaataaattgtagaagtttttttttttagttttaaaatggattttatgttttttttttttttatcgtataaattttttttatatttatttaattgtatgttcgtgtttagttacgtgtttttttagaggttttagacgttaattttgagatagatagattaagtttggagatttttttgtaaaattttatatgtgattttaaggcgtttaattaagaatttagttattgttgagatgatgttagattataggttttttgtggattaggatttaagatagttatcggaataagataaatagatagtgtatttagtataatttttgtttgatttttatatcgttttttcgttttaaatttttgttttggtcgggcgcggtggtttacgtttgtaattttagtattttgggaggtcgaggtaggtagattacgaggttaggagatcgagattaatttggttaatacggtgaaaatttatttttataaaaaatataaaaaattagtcgggtgtggtggcgtgcgtttgtagttttagttattcgggaggttgaggtaggagaatggtgtgaatttagaaggcggagtttgtagtgagcggagattatattattgtattttagtttgggtgacggagattttgttttaaataaataaataaataaataaataaataaataaataaataaataaaataaataatttttgttttttttattttttatattttataatttaacgtgattgttttggggataggaatttaattatttttttttgttagttttggaaataaagttattttttttttattatattttgtttttgttagattttgtaagtagttagcgattgaattagtattcggttatattttttgaggcggatgatatttgtgtgattttgtaatcgattttttgttagaatgttggtattttttatttagtcgtttttttgtaattttatttatttgtttgaaaatagaattttttttgtaattttgttatttttagtgttttttttttttttttttttttttttttttttttttttttttgagacggagtttcggtttgttatttaggtcggggtgtagtggcgtaattttcgtttattataattttcgtttttcgggtttaagtgatttttttgttttagttttttaagtagttgggattataggcgtcggttattacgtttgattaatttttgtatttttagtagagacgggttttagttatattggttaggttggtttttaatttttggttttatgtgattcgtttatttcggttttttaaagtgttgagattataggcgtgagttatcgcgtttggtattagtgtatattttttgaagtgattttaagttatcgttcgtttttttcgtgtaatatataaatatatttttgtatttagaaatatttaatgtataatttaattgtttgcgaggtattttattacgtatttttacgagcgtggttaattttaaaatagttttataaagaggaaatgtaagaatgtgggaagagtaaaagaaaagttttatgttgtaaaatttatttttgttaacgtgtttagtgggttttcgggacgatttgtttttaaatttttggtttttttgtatcgcgttttttttttgttgcgttagttttatgacgtattttggaagaatagggtagatttaaaatttttttttaataggcgttaaacgatatggtgtaggttcgggttggggagcgggtttgcggttgtttagttgttaaaggattttttattcgtgtatcgtcgtcggttttagggtaaattttacgttatttagaaatgttggaagtttttgtttttttttttttttgttcggaggttattttttttatttttagagttttatttttttttttattgggttttttttaattttttttttttaaaattttttttaaaatggggttgattggaggcggaggttgtagtgagtcgagatcgttttattgtattttagtttggtgatttcgttttaaaaaaaaggggaggggggcgggggagagttgaaagtttaatatgtattttgggggttattaaagtaaatatttcgattaaaggggcgaattttcgaattgtgcgattaagtattcgagaggagagttggggggggttaggaggggtgggggttttagggaaagttcgggggtttgggtcggggtttcgcggggttttttcggaaggatcgcggttttcgaaggtgggcgtttcgcggggttttagtttttaggacgtttcgggaggtttcgcgttttgggaggtcggttgcgtggggttttcgcgttgtagtcgtagaggttttttagggtcgcggttttcggagcgggaaagtttcgcgcgggggcggtggtttcgggggcgggacggggcgggggcgggggcgcgggcggtcgagtcgaattttttttatcgggacgtttcgttgttgttcgggaagaggcgggttttgcgcgttttgcgttcgttatggcggtttgggcggcgacgtgagcggtttcgcggatttcgagcggggtttcggtcgcgatttgagtcgtcgtcgagcgttcggggttatgcgatcgacgttgttgtggtcgttgttgttgttgttcggagttttcgtcgtcgtcgtcgcggtttcgttaggtgagtcgggtttgggttttcgcggcgggacgcgggcgtagtcgtagtatgtgggggttgggggattttcggatcgtggggtggggggaatttgtcgggtgtttagagtgggtgggaatttgcggggtgtttttggtgggtgggatatgcggagtgtttagattaggtgggaatttgcgggtgttttaggtgggggttttgcggggtgtttagggttagaggggttcgttgggagttcgtagcggggttgggatgggcggttaggagttttagataggagttgggtagtagtaggaagacggggggtattttttttggcgttttggtcgtcgggatattttttttcgggagaggatattcggtgttttttcgtgaagtcggtaatttcggttgcgttattttttttattcgcgcgttcgcgtcgggaaagttagcgtggttttagttttcgaatttttcggaatgaataatagtaaattgaatttagggtttcggcgggggtcgtttttgttggttattggttttgtagtttggcgagattgcgtttagttttcgtttggagtgtttttcgaaggtttggttggaagttagatttagtttttttgtagtagtagcggtggagtagggattagcgttttggacgggtgatttagatttaatttcgattttggtcgagggtatgtttgatattgggtgtgaaatttagatagttttcgcggttatagagatggggtagtagtatttaggtagggtttagaattgttcgggttttattagtgttggggcggaagaggaagagtgttaattgagttaggtatttatttattttattgttgtttgagatagggtgtcgttttgtcgtttaggttggagtgtagtgggtagtattttagttattgtagttttcgtttttcgtgtttaagcgatttttttacgttagttttttaagaaggtggtattattggttacgtttggttaatttttgtattttttgtagagaggaggttttattgtgttgtttaggttgtttttgtatttttgagttttagtaatttattcgttttggtttttgaaagcgttgggattataggtttgaggtatcgtgtttagttgagttaggtttttaaaatcggttttgtttttatttagagagttttttatttggcggtttttttaatttttgatattagttgattacgtttatgagttaaatataaaaattaaaagaaatttaggtttggtggtttacgtttgtaattttagtattttgggaggttgaggtagtattatgaggttaggagttcgagattagtttgattaatatggtgaaattttcgtttgtgttaaaaatatatagttgggcgtggtagcgttcgtttgtaattttaattatttaggaggtcgaggcgggagaattatttgaattcgagagttgagattttattattgtattttcgtttgggcgatagagtaagattttgttttagaaaaaaaaaaaaaaaaaaaagaaaaagaggaaaagattttaatgataaatgtgtggttagaatatttttgtgtatgtatttgtttttgttttgttgggtttttttttttggggagagtgatattataggagtttcgagaatttagaagattttttttattcgaagttataattttgtgttgtgggtttgttttttttatcggtattttttgtaaaggtttataagtttcgtatttttttgatttggggtgttttgtatttgaggaaattattaattgtttttttatgggagttagatagatgggtttaaattttgattttgtttttatttggttttacgttttgagtaatttgtatatgttttttttttaggtttttttttaatgagagttgatgattgttttagtgtgggattagtaggcgagtgattttatgttagagaggagtgattagtggtgatttgtggattgtttgtgatttatttgtgatgagtttagaggttgaaagatgtatttagaaattatagtttgatattgttataatatttagttatttgtttattttgttaatgattaattttaattgtattttataaaagttttggtttatgtgatatgttgtaaaataaaaaaattttaaaaagtgaggttaggttcggtggtttatatttgtaattttagtattttgggaggttgaggcgggcggattatttgaggttaggagtttaagattaggttggttaataatgatgaaatttcgtttttattaaaaatataaaaattagggggcgtgatggtatatatttgtgttttagttatttaggaggttgaagtcgaagaattatttaaatttaggaggtagaggtgtagtaagttgagattatattattgtattttagtttgggcgataagagtaagattttattttaaaaaaataaaaataaataaataaaaaaattggttttattgattttttgaaaagtagtagtagttgggtacggtggtttatgtttgtaattttattattttgggaggtagaggtgagtagattatttgaggttagaagttttagagattagtgtggttaatatgttaaaaattttttttttattaaaattacgaaaattattcgggcgtggtggttggcgtttgtaattttagttatttgggaggttgaggtaggagaattatttgaatttgggaggggaggttgtagtgagtcgaaattatgtaattgtattttagtttgggtgatagagtaagattttgttttaaaaaaagaaaaaaaaagaaaagaaaagtagtgtagtgttttaaattaatttttattttgtaattatttgaatatttttatattaaatagtttaaaaataaatttaatggatatttttaaaagaaatatttttttagttaaaatataaagtgaaaatatttataatgattatatggtaaatgggtggtagaaaggtttttatatttttttataatttatcggtgtaattttgaaattgtttttatggttagagaaaaaaaaaagtgttggaaattttttttttttttttttgagatagtatttttttttatcgtttaggttgtagtgtagtggtatgattatagtttattgtagttttaattttttgggtttaagttatttatttattttagttttttgagtagttgggattatacgtgtacgttattatatttggttaatttttgtatttttttgtagagatgaggttttatcgtgttttttaggttggttttgaatttttggggttaagagatttattcgttttagttttttaaagtgttaggattatagatgtgaattatttagtttggtttcggaaatagattttttaaagggagatatagtatttattttttagagttttgtaagagtagaatatgtaaaatatgggatttgtggtaatttgtagttatgagttgttaagtagtggtcgtttgcgttagatagaaaaatgtaattaatagtataagtgtagtaaattaattgattagttagttatttgagtgttgaggaattaaggtttttatttgtaattgtagtaggtgttgttgatttttttaggggattggatatgtattgtgttatagaattttttattattatttgttgatttgaatagttagagttttttatatgtttagagattatcgagaaagatagtaagtttttagtaatttaaaaattattgtatgtgaatgtttattgggtaagtttttgagtgtttataattttagtaagtgaaaatattatgtagttggaatgtttttgttatttttataaacgattatgatagtaatatttattggttagacgagatgttaagtgttttatatatattattttttttaatttttttagttattttttcgaattaggttatatttttagtttattttttggaaagttaaattttttttgataggaagagttaaataatttaggttaataatttgatgtttagttgttgttgttgtttttgagacggagtttcgttttgatgtttaggtgggaatgtagtggcgttatttcggtttattgtaatttttattttttaggtttaagcgatttttttgttttagttttttaagtagttgggattataggtatttgttattatgttttgttaatttttatatttttagtagggacggggttttattacgttggttaggttggtttcgaatttttgattttaagtgatttttatcgtattttttttcgttaattttcgttagttttagttttttaaagtgttgggattataggtatgagttattatgtttggtttagtattttttgaagagaataattttttggttatggttgaggaattagaaaatgtttttttattttttatttgtaaggtgatggaggtgggattaatgatgtttatttaattgatttttattataatgttttcgtttttaatagaaagattttaaagggttagtttttaattattaagattaaatgattaatgttaattatattttattttattatttgtgtgtgataagtgttaattaaattatgttgttaagatttaggatatttttttattttttttgtttgtttgtttgatatggagttttgtttttgttgtttagttggagtgtagtggtatggttttgatttattgtaatttttatttttcgggtttaagtgatttttttgttttagttttttaagtaattgtgattatagtatgtattatcgtatttggttaatttttgtatttttagtagagatagggttttattacgttggttaggttggtttcgaatttttgattttaagtgatttgtttgttttaattttttaaagtgttgggattataggtatgagttatcgtatttagttttttttatttttaaatatgtataaagtttgaaatgtttggatttgggataggtagattaaaggtgttgggatgggttaggaaggtagagttgtttatttatttttttattggttgttaaatggttttagtgtttggttttgagtgtataaaaatgattaagataatgaatgtagagaatagtttatttagagattttgttagaatgtttgtattattatgtgtattataatagatatatatatattatgtgttatgattttttaaaagtgttagaatagaaatatttttaaatgttataggatattatttgttaggaagagttgaagaaagtttaatagaggaagaataaattgagttgggttttgaagtatggagttttagattaaagaaaagaagaaaaggttaggtgtggtggtttacgtttgtaattttagtattttgggaggtcgaggtaggtggattattaggttaggagttcgagattagtttggttaagatggtgaaacgttgtttttattaaaaatataaaaattagttgggtatagtggcgggtgtttgtaattttagttatttaggaggttgaggtaggagaatcgtttgaatttaggaagtggaggttatagtgagtttagatcgtgttattatattttagtttgggtgatagaataagattgttttaaaaaaaaaagaggtcgggtttagtggtttatatttgtaattttagtattgtgggaggttaaggtaggtagattaggaggttaggagattaagattattttggttaataatggtgaaatttcgttttttttaaaagtataaaaaaatagttaggcgtggtagtaggtgtttgtaattttagttattcgggaggttgaggtaggagaattgtttgaatttgggaggtggaggttgtagtaagtcgagattacgttattgcgatattgtattttagtttgggggatagagtgagattttgttttaaaagaaaaaaagaaaaagtaatatgtaaaattatgtaggtttaaaataaaataggatagagtttatggtattttagcgagtggtggtgattggtttgggataagattttgaaggatttttagtttatttaagtttgaattttattttttatgttaggaatcggtaaagtttttttgtaaagaattagatagtatgtatttagatggttatagaagtttgattaaatggttgatttttgaattaggtatggcgtttgagattttgtttagggagagtgtttaggttatgtttatatgtgaaaatgtgtcgttattttttttttttgtttttatatatgttttttggttttttaagtgaggttttgaaaatgaaattttgatagttgagttaaaatgttttttataagtacgtgtatttttttttttaaagaatttttttttaggaattttttttttaatgtattgtaagatttggggttcgattattaacgtattagtttagtttaataagttttatttttttttgttggtagtagggtttattttatgggcgaatatattagtaagttttttgttttcggggaagtttaagtttattaaaagtagttatagatatattatagatgtattatataggaggtttttaagaggtaagaaggtttagtaagtttattgttttaattataataattttttttttttttttttgagatagagtttttttttgttatttaagttggagtgtagtggtgtaatttcggtttattgtagtttttattttttaggtttaagtaaattttttggtttagttttttaagtagtttgaattataggtatttattattatgtttggttaatttttatatttttagtaaagatggggttttattattttggttaggttggttttgaatttttgattttatgatttatttattttggttttttaaagtgttgagattataggcgtgagttattgcggttagtttataataatttttttttttttgagatagagtttcgtttttgtcgtttaagttggagtgtagtggcgtgattttagtttattgtaatttttattgtcgggtttaaatgatttttgtgttttagttttttaagtagttggaaatgtaggtgtgtattattatgtttggttaattgttgtatttttagtagagacggggttttattatgttggttaggttggttttaaatttttaaatttaggtgattcgtttattttagtttttttaagtgttgggattataggcgtgagttattacgtttatttaattagaataattttttatatgttgtatttttaaaatttataatttataatttaaaatttatgtttagtatagttaattttggagatttattaagaatggtgtaatgatttagtagttatttatggtaagataagagtatttgggtgtaatttgtatgaaatttgtattttataattattgttttttttttttagttttttagttttggtgttttttatcgggggttatgtggtttggaatatagaggttgggttgtttaaggataggttttttggtttataaaaaggatagttttattatagatgtgtaatttttggtatttttttgtggcgtttgtagttttgagattgatttttttttataaatgtgaaaagataggggatgataggaaattcggatataaggtagaataatgttgtttgggttattttttatattttagtgaaacggaaaatgaaggaaatggaaggttggtatgggaatttcgatttatatagtgatgtttttttgttgttttacgcgtcgtttggggtggaagtttttttttgttttttcgttatttatttcggagttttttggtgttttttttttgaattgaatgtttagattggggaattagaggtgttcggaaagggaagtcgggaagaagagattatttttgttggtttttttttagagatgggagatggtgaataggcgtgtggagggcggaataatggtttttaaagatgtttacgtttttatttttagagttcgtgaatttgggaatgtgttgtttgacgtataaaagggatttcgtagatgtgagtaagttaagagttttgatgtggggagattgttttgtattgttgggttaagtggttttatattattatagggtttttaaaagatggagtagaggtagaaggtttagtattagggagataagaaggatgcggttaattttgttggaggaaggtgttttgagttaaagaatgggagtggtttttagaagttgggaaaggtaaggaaatggattttttttggaggttcgagaaggattttagttttgttgataatttgattttagttagtgagattgattttaaatttttgattagtagaattataagaaaataaatttagatgtgattttttaaaatttatttatttttagagatggggggatttcgttatgttggttaggttagagtgtaatgattatttataggtatgattatagtatatgtattatagtttcgaatttttgggttttagtgattttttcgttttagttttttgagtagttgggattataggtgcgtattattacgtttagttaaatttgggttgtgtggagttattaggttagtgataatgtgttatagtgataagaagaatttaatataggaaataaaaggagttgttagattttttgaatgtttaattttaagtagatatttattttgtttttggaaagagtcgggtttagttgcgtttttttatggtttaataataagaagtagataaattaggaagaaagagaatttattgttgtaataggaaggtcggagataattcgattagattaatttaaagtgtttgattttttttgtgtttatataggtttgggttatgtgtttatgtgtggtattgtattaagtttatgagtaattaattttgttttaattagaaagttagaggttaaaaatgtgttttttaagtttaattaagttgtgaggttttcgatatcgttaaggtttgttttttaaattttatttaatgaggattgtggtattagagtatttatttatttatttatttttgagacggagtgtcgttttgtcgtttaggttggagcgtagtggtgtaattttggtttgttgtaattttcgtttttcgggtttaagcgatttttttgttttagttttttaggtcgttgggattataggtgtgtgttattatgtttggttaatttttttatttttagtagagatagggttttattatgttggttaggttggtttcgaatttttgattttaggtgatttattattttagcgttttaaagtgttgggattttaggtatgagttattgtgttcggttaggagtttatttttattttgttttatttatagtttggttcggagagttgttttagattttttaataaatttatttaaatagttgtttttgttattttgatttgttttaggtttggaagaagtttgtgtaggatttgtgttttatttttggttttgatgtttgggcgttagtttttttggggttaattattagtttaatgtgaaggtagtattgtggaaatttttttgtatagttcggatgttatttagatttgtttgtgtgattgttatgtaggtttttttgtgtgattgtgagggagtattgatttgttattatttttttttggaagtatttagtttttaattggttttgggtattgttaggttatagtagttatagtatatttggtgggtttgttttttgttacgtagttttatttgtttgttttcggtttaggatgttatgaggtttgttgtgtgttaggagaagtgttgttagttggttgggtgaaggttatttagagtttataggtgtggaggggaggggtattttataattaaataaatggtcgtagatttggtaatttattttttagaagaagagttagtggttaggttgttagttgatttttttgaggttgagcgtatttatcgaaaatgtgtggtttgaattttttgttttgaattttggaatagtatgttttttaaattttttttttattttttgggtattttttattaatttttttggttaaaagttttattttgattatgttttttttttaagataaagggttttttgtgaagtatttgtttgggaaagggaggagttgtggtagttttttttaggttttcgaaggttttttgtgaagtatttgtttggggaagggagaggttgtggttgttttttttaggttattttaaagagagggattttgatattggtggtgttttcgggggagtatattttttttttgtttattgttttttaatttttttttttttttttttttttttggagatagagtttttttttgtcgtttagattggagtgtaatggtgcgattttagttttttgtaatttttgttttttgggtttaagcgatttttttgttttagttttttgagtagttgggattataggcgtttattatcgtatttggttaatttttatatttttagtagagatagagttttgttatgttggttatattggttttaaatttttgatttcgagtgatttgttttttttggttttttatagtgttgggattataggtgtgagttattgagttcgggtcgtgttgttttttaattttaatgtgtgtgagaagtagttggaaagtttgtttaaaatgtagattttttgggggttttaggatttgtattttaattagtatttttgtgattgcgatgttgggggtttttgagagacgataattttgatggtgtttagaagtcggcgttttttgtttttttttgtagtttgggttttgcgtatttgatttaggatgtttgtgtgtttttgcgtgtgtagtgtgtgtacgtgtgtacgtatttgcggatatttattagatatttttttggtattaaatttgaaagttaacgcgtgttatatgattattacgttaattttcgttatagttttgtgggtgtattattattgattttttatttttgaaaaagaaaatttaagtttagataggtgaagtgatttgtttcgagtttaatgtagttattaatggtagaattgggattttagttcggttagattttagggtttaggatttgttcgtaataattgggatttgtaggtggaaaggttgttttaggcgttttttttttttttgtgttgtttgtattagtagggttatttttgtagttaaaagtcgggggtgtggggttatgtttagggggatttggtaatgttatttttgtattttgataaaaattgagttgtatgaatgatttagataatggatattgaaatatttttgtaattatttttttttttttttttttttttttttttttttttttttttgttttttttaaga

SEQ ID NO: 962 - DNA, 16994 bp, Artificial Sequence
  chemically treated genomic DNA (Homo sapiens)
ttttgagggggatagagaaaaagaagagggaggaagggaggagagagagggaaataattataaaaatgttttaatgtttattatttaagttatttatataatttagtttttgttaaagtgtagaaatggtattattaggtttttttgggtatggttttatattttcgatttttggttataaagatggttttattggtataggtagtataaaaagaaaagaggcgtttggggtagtttttttatttgtaggttttagttgttacgaataggttttgggttttggagtttggtcggattggggttttagttttattattagtaattgtattaggttcggggtaggttattttatttgtttgagtttgagtttttttttttaggaataaggggttaataatgatatatttatagggttgtggcgaagattaacgtggtgattatgtgatacgcgttagtttttagatttagtattaaggaagtgtttggtaaatgttcgtaaatacgtgtatacgtgtatatattatatacgtaaaaatatataaatattttaaattaggtacgtaaagtttaagttgtaggggagggtaaggaacgtcgatttttgggtattattagagttgtcgttttttaaggatttttagtatcgtaattataggggtgttggttaaagtgtaggttttgaggtttttaggaaatttgtattttaaataagttttttagttgttttttatatatattaaagttagaggataatacggttcgagtttagtggtttatatttataattttagtattgtgggaggttaaggaaggtagattattcgaggttaggagtttgagattagtgtggttaatatggtaaaattttgtttttattaaaaatataaaagttagttaggtgcggtggtgagcgtttgtaattttagttatttaggaggttgaggtaggagaatcgtttgaatttaggaggtagaggttgtagggagttgagatcgtattattgtattttagtttgggcgatagagagagattttgtttttaaaaaaaaaaaaaaaaaaaaaaaggttagggggtaataaatagagaaagaatatattttttcggaaatattattaatattagaatttttttttttggggtgatttggaagaaataattataattttttttttttttaagtaggtattttatagggagttttcggggatttagaagaaattgttataattttttttttttttaagtaggtattttatagggagttttttgttttagaaagaaaatataattaagataaggtttttgattaaaaagattaataagaaatgtttagaaggtggaagaaaggtttgaaaaatatgttgttttaaaatttaaagtaggaaatttaagttatatattttcggtaaatgcgtttaattttaaagagattagttgatagtttgattattggttttttttttgaaagatgaattgttaagtttgcggttatttgtttagttataggatgttttttttttttatatttatgagttttgggtgatttttatttaattagttaataatattttttttgatatatagtaggttttatgatattttgggtcgaaggtagataggtaaagttgcgtggtaagaggtaggtttattaggtgtgttgtggttgttatgatttagtaatgtttaaagttagttggggattggatgtttttagaggggggtggtggtaggttaatgtttttttatagttatatagagaggtttgtatgatagttatatagatagatttgaatagtattcgaattatgtagagaaatttttataatgttgtttttatattaagttaataattaattttagggaaattgacgtttagatattaaagttagaaatgaaatatagattttatataggttttttttaaatttggagtaagttaagataatagaggtagttgtttgaatagatttattggagagtttaaggtagtttttcggattaaattgtaaatgagataagatagaaataaatttttggtcgggtatagtggtttatgtttgaaattttagtattttgggacgttgaggtggtggattatttgaggttaggagttcgaggttagtttggttaatatggtgaaattttgtttttattaaaaatagaaaaattagttaggtatggtggtatatatttgtagttttagcgatttgggaggttgaggtaggagaatcgtttgaattcgggaggcggaggttgtagtaagttaagattgtattattgcgttttagtttgggcgatagagcggtatttcgttttaaaaataaataaataaataaatgttttggtattatagtttttattaaatagaatttaggagataggttttgacggtatcggggattttatagtttgattagatttagaaagtatatttttggtttttgattttttagttgaaataaaattagttatttatagatttagtgtaatattatatataggtatataatttaaatttatgtaagtataaagaaaattaaatattttgagttggtttggtcggattattttcgatttttttgttatagtaataaattttttttttttttagtttgtttgttttttgttattgggttatgagaaaacgtagttggattcggttttttttaggaatagggtgagtgtttgtttagggttgggtatttaaagaatttgataattttttttattttttgtattaggttttttttattattgtaatatattattattaatttagtgattttatataatttagatttagttgggcgtggtggtgcgtatttgtagttttagttgtttaaggggttgaggcgggaggattattggagtttaggagttcgaggttgtagtgtatgtgttatgattatgtttgtgaataattattgtattttagtttggttaatatagcgagatttttttatttttaaaaataaataaattttaaaaaattatatttaaatttatttttttatagttttgttggttagaagtttaaagttagttttattgattaaagttaagttattagtagggttggggtttttttcgagtttttagggagaatttatttttttgttttttttagtttttagaggttatttttattttttggtttagggtatttttttttagtaaggttggtcgtattttttttgtttttttggtattgaattttttgtttttgttttattttttggggattttgtggtggtataaggttatttggtttaataatgtaagataatttttttatattagggtttttaatttatttatatttgcggagttttttttgtacgttaggtagtatatttttaggtttacggattttgaggatgagggcgtggatatttttggggattattatttcgttttttatacgtttgtttattattttttatttttggggaggaattaataggaatagtttttttttttcgattttttttttcgggtatttttagttttttagtttaagtatttagtttagaaaggaagtattaaggggtttcggggtgggtggcgaggggataaggaagggtttttattttaagcgacgcgtggaatagtaaaagggtattattgtataagtcggggtttttatgttagttttttattttttttatttttcgttttattgaggtgtaagagatggtttaagtaatattgttttgttttatattcgggttttttattattttttatttttttatatttatagaagaaaattagttttagaattgtagacgttatagggaagtgttaaggattgtatatttgtgataagattgttttttttgtaggttagggggtttgtttttgggtagtttagtttttgtgttttaggttatatggttttcgatgggaaatattagggttggaaggttggggagaaggagtagtggttgtgagatgtaggttttatataggttatatttagatatttttgttttattatgagtagttgttgaattattgtattatttttggtaggtttttaaagttagttgtgttgagtataaattttagattatgagttatgaattttaaaaatataatatgtaaaaagttattttaattggatgggcgtggtggtttacgtttgtaattttagtatttagggaggttgaggtgggcggattatttgagtttgggagtttgaaattagtttggttaatatggtgaaatttcgtttttattaaaaatataataattagttaggtatagtggtgtatatttgtatttttagttatttgggaggttgaagtataagaattatttgaattcggtagtggaggttgtaatgagttgagattacgttattgtattttagtttgggcgataagagcgagattttgttttaaaaaaaaaaaaattgttgtaggttggtcgtagtggtttacgtttgtaattttagtattttgggaggttaaggtgggtggattatgaggttaggagtttaagattagtttggttaagatggtgaaattttatttttattaaaaatataaaaattagttaggtatggtggtgggtgtttgtaatttaagttatttgggaggttgagttagagaatttatttgaatttgggaggtggaggttgtagtgagtcgagattgtattattgtattttagtttgggtgatagagagagattttgttttaaaaaaaaaaaaaaaaaattattgtaattaagataatgaatttgttgaatttttttgttttttgagaattttttgtataatatatttgtaatatatttgtaattgtttttaataaatttaaattttttcgaaggtaaggaatttattggtatgttcgtttataaaatggattttgttattaataaaaaaaaatgaagtttattgaattggattaatgcgttaatggtcgaattttaaattttataatatattagagagggaatttttgagagggaattttttaaagaaggaaatatacgtgtttatagagggtattttggtttaattgttaaaattttatttttaaaattttatttaggaaattaagggatatgtgtgagagtaagaggaaaaaataacgatatatttttatatataagtatgatttgagtattttttttaggtagagttttaagcgttatatttaatttagaaattagttatttaattaaatttttgtaattatttgagtgtatattgtttagttttttatagaaaaattttgtcgatttttggtatggagggtagagtttagatttgagtaagttgaaaattttttaagattttattttagattaattattattattcgttaaaatattataaattttattttattttattttggatttatataattttgtatattgtttttttttttttttttttgagatagagttttattttgttttttaggttggagtgtagtgtcgtagtggcgtgatttcggtttattgtaatttttattttttaggtttaagtaatttttttgttttagtttttcgagtagttgggattataggtatttgttattacgtttggttatttttttgtgtttttaggagagacgaggttttattattattagttaggatggttttgattttttgattttttgatttgtttgttttggttttttatagtgttgggattataggtgtgagttattgagttcggttttttttttttttgagatagttttgttttgttatttaggttagagtgtagtggtacgatttaggtttattgtaatttttattttttgggtttaagcgatttttttgttttagttttttgagtagttgggattataggtattcgttattgtgtttagttaatttttgtatttttagtagagatagcgttttattattttggttaggttggtttcgaatttttgatttagtgatttatttgtttcggttttttaaagtgttgggattataggcgtgagttattatatttggttttttttttttttttttaatttgaaattttatgttttaaaatttagtttagtttgttttttttttattggattttttttaattttttttggtaagtagtgttttataatatttaaaaatatttttattttagtatttttgaaaaattatggtatatagtgtatgtgtatttattatagtatatatggtaatatagatattttgataaggtttttaagtagattattttttatatttattgttttaattatttttatatatttagggttaaatattaggattatttaataattagtgaagaggtgaatgaataattttgtttttttgatttattttaatatttttgatttatttattttagatttaggtattttagattttatgtatatttaggaataggaggggttgggtgcggtggtttatgtttgtaattttagtattttgggaggttgaggtaggtagattatttaaggttaggagttcgagattagtttgattaacgtggtgaaattttgtttttattaaaaatataaaaattagttaggtgcggtggtgtatattgtaattatagttatttgggaggttgaggtaggagaattatttgaattcgggaggtggaggttgtagtgagttaagattatgttattgtattttagttgggtaataagagtaaaattttatattaaataaataaataaaaagaataggaggatattttgggttttaatagtatagtttgattaatatttattatatatagataataaaataaaatataattaatattaattatttaattttgataattaaggattgattttttaggatttttttattgggggcggggatattatgatgaaagttaattaggtgaatattattgattttatttttattattttgtagatgagaaataaaaaggtattttttgattttttagttataattaggaaattgttttttttaagaaatattaggttaggtatggtagtttatgtttgtaattttaatattttgggaggttgaggttggcgggggttggcgggggggggtgcggtggggattatttgaggttaggagttcgagattagtttagttaacgtggtgaaatttcgtttttattaaaaatataaaaattagtaaagtatggtggtaggtgtttatagttttagttatttgggaggttgagataggagaatcgtttgaatttgggagatagaggttgtagtgagtcgagatagcgttattgtatttttatttgggtattagggcgagatttcgttttaaaaataataataataattggatattaagttattgatttagattatttggttttttttattaagaaaggtttgattttttaggaagtaaattagagatataatttagttcgaaagaatggttgagaaaattaagagaggtaatgtatataaagtatttggtatttcgtttgattaataaatgttattattatgatcgtttataaaggtggtaaaagtattttagttatatgatatttttatttgttgagattatgaatatttaggagtttatttagtggatatttatatgtaatggtttttaagttgttggggatttattgtttttttcggtggtttttaagtatatgagaagttttggttgtttaagttagtaaataatgataaaaaattttgtggtatagtatatatttaattttttgaaaaagttagtagtatttgttataattataaatagaagttttaattttttaatatttaggtaattaattggttagttgatttattgtatttgtgttgttggttatatttttttatttagcgtaaacggttattatttaatagtttatggttataaattgttataggttttatattttatatattttatttttatagaattttaagggatagatattatgtttttttttaaaaaatttgttttcggagttaggttgggtggtttatatttataattttagtattttgggaggttgaggcgggtggattttttgattttaggagtttaaaattagtttgggaaatacggtgaaattttatttttataaaaaaatataaaaattagttaggtatgatggcgtgtacgtgtagttttagttatttaggaggttgaggtgggtggatggtttgagtttaagaggttgagattgtagtgagttgtgattatgttattgtattgtagtttgggcgatggagagagatattattttaaaaaaaaaaaaaaaaagtttttaatatttttttttttttttgattataaaagtaattttaaaattatatcggtaagttatgggaaagtgtgaaaatttttttattatttatttgttatataattattgtgaatatttttattttgtgttttgattaaaagagtgttttttttgaagatatttattaggtttgtttttaagttgtttaatgtgaaaatgtttaaatagttgtaaaatagagattagtttaaagtattatattattttttttttttttttttttttttttttgagatagagttttgttttgttatttaggttggagtgtagttgtatgatttcggtttattgtaatttttttttttaggtttaagtgatttttttgttttagttttttaggtagttgggattataggcgttaattattacgttcgggtaattttcgtagttttagtaaagaaggggtttttaatatgttggttatattggtttttggaatttttgattttaggtgatttgtttatttttgttttttaaagtaatgggattataggtatgagttatcgtgtttagttgttattattttttaaaggattaatggagttagtttttttatttgtttgtttttgtttttttgagatagagttttgtttttgtcgtttaggttggagtgtagtggtgtgattttagtttattgtatttttgttttttgagtttaagtgatttttcggttttagttttttgagtagttgggatataggtgtgtattattacgttttttaatttttgtatttttggtagagacggggttttattattgttgattagtttggttttgaatttttgattttaggtgattcgttcgttttagttttttaaagtgttgggattataggtgtgagttatcgagtttggttttattttttaaaatttttttattttgtaatatattatatagattaaaatttttgtagaatataattaaagttaattattaataagatggataggtagttggatgttgtggtaatgttagattatagtttttaaatatattttttaatttttggatttattataggtaagttataaatagtttatagattattattagttatttttttttggtatgaagttattcgtttgttgattttatattaggataattattaatttttattaggaggaggtttagggaggaggtatatgtagattgtttaagacgtgaagttaagtggaagtagagttaggatttgaatttatttgtttgatttttatggaaaagtagttaataatttttttaagtgtaaggtattttagattaaggagatacggaatttatgggtttttgtaaggaatgtcggtagaaaaaataaatttataatataaggttatagtttcgaatgggaagaattttttaaattttcgagatttttatgatattattttttttaggggaaagaatttagtaaaataaaagtagatatatatataagaatgttttagttatatatttgttattaaggttttttttttttttttttttttttttttttttttttttgagatagagttttgttttgtcgtttaggcgggagtgtagtggtgagattttagttttcgggtttaagtgattttttcgtttcggttttttgagtagttgggattataggcgggcgttattacgtttagttatgtatttttagtatagacgggggttttattatgttggttaagttggtttcgaatttttgattttatgatgttgttttagttttttaaagtgttgggattataggcgtgagttattaagtttgggttttttttggtttttatgtttggtttataagcgtggttagttggtgttagaggttaaggaggtcgttaggtaagaagttttttgggtagggatagaatcggttttaaaagtttggtttagttgggtacggtgttttaagtttgtaattttagcgtttttagaggttaaggcgggtggattgttggagtttaggagtataagaatagtttgggtaatatagtgagattttttttttataaaaaatataaaaattggttaggcgtggttaataatattatttttttgggaggttgacgtgggaggatcgtttgagtacgggaggcggaggttgtagtagttgagatgttgtttattgtattttagtttgggcgatagagcgatattttgttttaaataataataaaataaataaatgtttggtttagttgatattttttttttttcgttttaatattgatgggattcggatagttttgagttttgtttgaatgttgttgttttatttttatgatcgcgggaattgtttagattttatatttagtgttaaatatgttttcggttaaagtcggaattgagtttgggttattcgtttaagacgttggtttttgttttatcgttgttattataaagggattgagtttagtttttagttaggttttcgggaggtattttaggcggggattaagcgtagtttcgttaggttgtagaattagtggttagtaaaggcggttttcgtcggagttttggatttaatttgttgttgtttatttcgagaaattcggagattggggttacgttggttttttcggcgcgggcgcgcgggtgggggaggtggcgtagtcgaggttatcggttttacggaggggtatcgagtgttttttttcggagaggggtgtttcggcggttaggacgttaggaggggtgtttttcgtttttttgttgttgtttagtttttgtttggaatttttggtcgtttattttagtttcgttgcgggtttttagcgggtttttttagttttgggtatttcgtaagatttttatttggggtattcgtaggtttttatttgatttgagtatttcgtatattttatttattaggagtatttcgtagatttttatttattttgagtattcggtagattttttttattttacgattcgggagttttttagtttttatatgttgcggttgcgttcgcgtttcgtcgcggaggtttaggttcggtttatttggcggggtcgcggcggcggcggcgaagatttcgagtagtagtagtagcgattatagtagcgtcggtcgtatggtttcgggcgttcggcggcggtttaggtcgcggtcggggtttcgttcggggttcgcggagtcgtttacgtcgtcgtttaaatcgttatggcgagcgtagggcgcgtagggttcgttttttttcgagtagtagcggggcgtttcggtggaggggattcggttcggtcgttcgcgttttcgttttcgtttcgtttcgttttcgaggttatcgttttcgcgcgggattttttcgtttcgggaatcgcggttttggggggtttttgcggttgtagcgcggggattttacgtagtcggttttttagagcgcggagtttttcggaacgttttggagattggagtttcgcgggacgtttattttcgggggtcgcgattttttcggaagggtttcgcgagatttcggtttagattttcgggttttttttggagtttttattttttttgattttttttaatttttttttcgggtgtttgatcgtataattcgaggattcgtttttttagtcgaaatgtttgttttaatagtttttaaagtatatattaagtttttaattttttttcgtttttttttttttttttttgagacggagttattaggttggagtgtagtggggcgatttcggtttattgtaattttcgtttttagttaattttattttgaaaagggttttaaggggaaggagttagaaagggtttagtgaaggaggaggtggggttttgggggtggggggaatggttttcgagtagggggagggagagatagaaatttttagtatttttaaatggcgtggggtttgttttggagtcggcggcggtgtacgagtaggaagttttttagtagttgggtagtcgtaggttcgttttttagttcgagtttgtattatgtcgtttgacgtttgttgggagagggttttaaatttgttttgtttttttaagatgcgttataaagttagcgtagtaaaggagggacgcggtgtagggagattaagaatttaaaaataggtcgtttcgggagtttattggatacgttagtaaaaatgggttttgtaatatagagttttttttttgttttttttatatttttgtattttttttttgtagaattattttgaaattggttacgttcgtgaaaatacgtgatgaaatatttcgtagataattgaattatgtattggatatttttagatatagagatgtatttatatgttatacgaaaaaagcgggcgataatttggaattattttaaaaagtatgtattgatgttaggcgcggtggtttacgtttgtaattttagtattttaggaggtcgaggtgggcggattatatgaggttaggagttggagattagtttggttaatatggttgaaattcgtttttattaaaaatataaaaattagttaggcgtggtggtcggcgtttgtaattttagttatttggagggttaagataggagaattatttgaattcgggaggcggaggttgtagtgagcggagattgcgttattgtatttcggtttgggtgatagatcgagatttcgttttaaaaaaaaaaaaaaaaaaaaaaaaaaaaaaaaaaaaaaaaggtattgaaaatgataggattgtaagaaggattttgtttttaaataaataaataaaattataagaaaacgattgggtgaaagatgttaatattttaataagaaatcggttataggattatataagtgttattcgttttaggggatgtaatcgaatgttggtttagtcgttggttgtttgtagagtttaataagagtaagatgtggtggaaagaaagtgattttatttttaaagttagtaaggggaagtggttggatttttatttttaaagtaattacgttgaattgtggggtatggggagtgggaaaggtaagggttatttattttatttatttatttatttatttatttatttatttatttatttatttgagatagagttttcgttatttaggttggagtgtagtggtgtgattttcgtttattgtaagtttcgttttttgggtttatattatttttttgttttagtttttcgagtagttgggattgtaggcgtacgttattatattcggttaattttttgtgttttttgtagagatgggtttttatcgtgttagttaggttggtttcgattttttgatttcgtgatttgtttgtttcggttttttaaagtgttgggattataggcgtgagttatcgcgttcggttaaggtaagggtttaaaacgggaaaacgatgtggaagttaggtaaggattatgttaagtatattgtttgtttgttttgtttcggtggttgttttgggttttagtttataggaagtttgtggtttggtattattttaataatggttggatttttaattagacgttttgaggttatatgtggaattttgtagaagaatttttaggtttggtttgtttgttttaagattagcgtttggaatttttaagaaggtacgtaattagatacgggtatatagttagataaatgtgaagggagtttatacggtgaagaagggagggatatggagtttattttaaggttaagggaaaaggtttttgtagtttgttttaaggttatatttttgatggttgggtgcggtggtttacgtttttaattttagcgttttgggaggttgagttaggtggattatttgagattaggagtttaagattagtttggttaatatggtgaaattcgtttttattaaaaatataaaaattagttaggcgtggtggtatgtgtttgtaatttttgttatttgggaggttgagataggagaattatatgaatttaggaggtggaggttgtcgtgagttgagattatgttgttgtattttagtttgagttatagagtaagattttgttttaaaaaaaaaaaaaaaattgtaatttgtatattattttaaagaaatatttttggttagatgtggtggtttatatttgtaattttagtattttgggaggtcgaggtgggtggattatttgaggttaggagtttaagattagtttggttaatatggtgaaattttatttttattaaaaatagaaaaattagttaggtatagtggtaggtgtttgtaattttagttatttgggaggttgaggtatgataattgtttgaatttgggagatggaggttgtagtgagttgagatagtattattgtattttagtttgagtgtagagtaaggttttattttaaaaaaaaaaaaaaaagaaaagaaaaagaaatatttttgtgtttaattttatagtgagttgtgtatttgtttataaagagggttttatttattatatatattttagttttataaattttgaatttgtattatttttttttattaattttttattttgtaattagttgatttttttgaagtatttttaatagtttagagggattttttttattttttttaggagagtgggtgggggatggtagaaagaagttaatattttttgttggttagtggtgtttttttaggtattataatatttagattttttagttaggtaggcgatggttgttttatggggatattagtagagtttagtgatttggtttgtggtgggtttgtattgtagtaggtttgttaaattgtaattgtattttttagaatttttttttttgaaaagttttgaggtaatatgggtagggaaggatgtttgtgtgtgttttggtttattttttgttgtttataatagaatatttgaagttgggtaattgataaagaaaaggtatttattttttatattttgggaggttgagaagtttaaggtttagggattaaatttggtgagggtttttttgttggtggagattttttgtagagttatgaggtggttagggtattatatggtaaggggggttgagggtgttaaggtgttcggatttatttttttttttttttttttttttttttgagatggagtattattttgttgtttaggttggagtgtaatggtgtaattttggtttattgtaatttttgttttttgggtttaagtaatttttttgttttagttttttaagtagttgggattataggtatttgttattatattcggttaatttttgtatttttagtagagttggtgttttatttgttgttttggttttgaattattgattttaagtgatttatttgtttcggttttttaaagtgttgggattataggagtgagttattatgtttatttttttttttataaagttattagttttatttttatgataattattggtttatgaatttattagtttatgaatgaatttatttatttatgagggtaggattattataattaattatttttgaaaggttttatttttttatattgttatattgggaattaaatttttagtacgtgaaatttggggatatatttaaattttagtaatgtgcgagatttggaagatggaaggaaaggtgtagttatatttttttatttttgggaggttggggtagggtataaggtatttatttttgtagttttcgatttgtggtttttttgttgatgttttagatggtagggatgtagataggttttaggtttttttagtttttcgtggattttatgtggtcgtgtaagttggaggtgtggagatggagagtagggtgaggagggtggtagttgagttttagattttagtttgtttttgttttttttattttttgtttatttttttttttcggttttttgttttgaggattttaggttttagtatcggataggggaaaattgttttttttggattgtgtatatattttttatgtttatgtgaggttaaatttttgtaatataataatatatatatatatatatatatatatatacgtatatatatatatatatatattatattatatgatggttttgtttgttggattaaaatttggttgagtatgttttaaattatatagttaatgagtggtagtgtgggtttttagttaggtttgtttagtgttaaagttttttgtattttatagtaaattttttattatgttgtttagttttttcgtaatgagatttagttttgtgtttagttaagcgttttatagttttttatgattcggttattttattagtgagtttttgaaattgtatttcgtgaaggttatatgtgttttatttgtttgtttttttttttgttgtttattttatttgtttgcgtttttttttgtttttatttataacgttttttttaatttttatttttgttatatttatagtttaaattttataatttttggattttattttttgagaattttgttgttttttttgattattattttttattgtttgttgttattttgtgttatcgttggtgttcgtggggattgatatagttaaaggtagggtcgttgatatttgtgagtgggtaggtgagtgttttttttggatttaatagagttgtaagaggttcgagtttaaagtaggttttgattattattaagtggggttttgatatgtgatttggtgtttttttgttttaagaaattttaggattaaggttagaggaattggtatgttagcgaaaggatgaatttttttaggttttcggtgatgggttgggttttttttgttgtttgttatgggttatagttttttttttttatta

SEQ ID NO: 963 - DNA, 9731 bp, Artificial Sequence
  chemically treated genomic DNA (Homo sapiens)
atataaaggataaatgtttgaggggatggatatttaattttttatgatgtgtttattttatattttatgtttgtattaaaatattttacgtgttttataaatatatatatttattatatatttataaaaattaaaaattaaattaaaaaataaaataaagagagattaatgagtgttagggaagtattgaagatagattagcgttaaattgagatttttttttttggagatttaggattagaaagggaattgtaaatggaattatttttatatttaagtgattttttaacgttacgtttttgattaggggtgttataatttatattttgaaaattaatatgatagaaatattgtagaatagataaggagattgggtttgaattttattttgtgagtatttaaatttgttttgtttttcgagaagttatttttttattttttaatagtttttttttttggttttattttttttataaaatgaggaggttggttattttatttttaaagagtttgtgtaatttttatattttatttttattattatttgttttttagatttgtatttatttaataaaatgttttgagtttatgtattcggagttaagtgttgggaatatggttatgaggaatttatttatgttttgatgaagtttatgattttttttttttttttattaatttttttttttttaaattatagtgagttgaatatttattttatttattttaaaagatttaataaaattaaagataagtgtagtttaaaatgtatttaaatttagagtttttaaaaaaaaaatttatttttgttagaacgtatttacggttaagagtgtagtggtagttttttagaagtttattagagggcgcgtatatttttttattttttaagaaagtatttatgtgggttttgtttttgaagtttggcgttggtgttttttttttttatattttatgtaacgtggggtaagcgtgacgagtttttaagtttttttattttattaatttatttttattttatgtcgtgattttttttttgttataacgaagaattattttgtttatataattataatagtttcgtttttgtttttagtatttgtttttttgatattttagaagaaataagatttaagtttgatgttgaaaagaaagtattgatttttttagtgagaggattttttttttttatttttgttttttttagtcgtgggcgaaatatttttttaaggagttagagtagtttttttgagtaaatttttttggggaattataggaatttttttgagtagatgttttggagttgatattaggttttttgttcggtagtatgttgagtttttgaggttttgttttttttttgagttttatattttgaattgataagtttttgatttttaatattagtttgagtaatttatgattaattttttttataaattatgatttaaaagaaatatttaatagttttttttaagttttttgtttggtggttgttttagaattttaagttttattttttatttgattttaaaatttttttatttttaaatgtttattttgagttttttttgggagtaagtaaagatatttatgaaataaattgtaaatatgttttattgtatatggatatgaaattattttttggatgaacgtttttttagttaatataggaaagattgggaatatggtttgagaagaaaaaaaaagttggggggaagatagggagggtttttttgtttattttatttttgttttttgtgtattttagttagtttattttttaaggaaatgaataattttttttgtgtgtgtgcgaaaggtgttagaagttttttgaggttgtagttttatgtaaatatgttatttaagaagaaggttttaggggagagttatttatattttataggtattatatatgtaaaaggtgaaattgtgaatttttgaatttttaggagtggatgtttttatgataagtatatttttgcggttagttattttggtggttatattttattgttagatttttgtaggtaggagattatataattattttatatttttataatgattttagatgtttttttttaatgggattttataatttgaattttttttgggttttagatttattattattttggatttgtagtaataggtgtatttattttttttatttttaaataggtatattatttagttattaaaaagtaatttggtggtatgtttattgtttttttatttttatattgatttttggaattagttaagaaaatgattttttttttaggaattattgttttgatttattgttggtttattttgtttaaaaatatagattattttttaaattgaaatatatattaattattttaggaaattgttttttttattggaaattgatagtttttattggaatgtttttaaagtatagttgatgataattacgatttattgaaattttagttttttttgattgtgatataaaaattaggatataaattaaaatttaattattttttaagggtaattggggttataaaatcgagagattgtgagttagtgtgttaatatcgttggagtatagtatttgtttttaaaatagttttttatatgaaatgtttgtggataaggttatatttgtgtatcgagtatgttaagagagaatattaaaatgggtgatagatttggagatatatagttagtttttaggatattttggaataattaaagtatgttaaaattgtagtgggaaggggttaaataaagttttggtttttatttgtaatggtgtttaatgttggaataagaatttagtattaagattttagttagtatttgattttttaaatttggttaaagaggtttttttttatttggaagataggtgagattagttttattgttttatataatttatatttttaaagtttgtaagagaatagatattttttagaaagggtgtgatttataaaaattgtagaaaagaaaaagatttgttataaattaagtgtataaagagagtttattaaaggaagttacggattattattaaatgtagggattatttatatatttgtatatgtggataatttttgtattaagaataatttagggttatttattaggttattttttgatgatattttttagtgtgttttttgggttaaattttatttattgaaattttttaatatggtattttaaagttttttatgatataatttgttttttttattttggattttttaaaagattttatttttttgtttttttagagaatgtgttatttttttttattgtgtattgtttatgtttttaaaagagtatatgtttattatatgattgtgaagtttttttttttgtttttgatatttagttgaaagtttttgaagggatttgattatattttatttttttttgtttttttagggatgttgtagttgggtatatagtagagtttataaaatgttgttgaatatagtgtattattgatataatataattttagatttttaattttgatttttgaaaggtaaatattgttataatgtattaattatatagaagatttaaataaatttaatttttttttaaataaagtaggtttgtttgttttttgttagggtatttatttttataaataaatttttggttttaggataatataaagagttagagtaggattttaagtagaattgtgtttttagttgatgtgttagttttttgagagttatgtggaaaaaaaaaaaaagaaaaaatttaaggtttaggttatttttattatttttgggaaattaggtttggagagttttttagggaaagaggtatgtttgttttgggtttttgtaattttattttataatttatttttttatttattgttttataaaattaaagggaaataggtataaattgtatcgataaaagattagaattgaatttttaatggtaaaggtaagtgtatattataaatagtaaaatagttggtttggattatgttgtcggttagttatttagttgagggatttgaatgatattataattttcgagagggtattgttagttagttggtgttatttagaatatataaaaattagagaaagaaaatatattttggtatatagattttttttgttatatatatatatatatatatatatatatatatatatatatataggtttgagttatatggaaaatttaaataataggaaaattgtttgttttttaggtattttttttttagagtggtggggtggggaggggatagtgataggtagtttagtagaagaataaagaaaaatgttttattttagttgggttttatagttcggtatagtttttgttttatcgtaggagaaaaagtatgagatagtgttttaaagggattaatttaatgttgtttgtttttttataggttttaggaaatgagattatattttttatttggtaattgggataaggggttattcgagtgttgttttttaatttattttattttagttattttagggttaaaattgtagagtttgttggagagggttttatcgttttttttttttttttttgttttaaataatgtatttgttttagaatttaaaattgtttttttattttttatatttttttaatattggtaaggtgtattagtagacgtttgtgtttttatgtttagtagaaagttaattagaaaatagatttttattttttatggtagtataagtattttaatgtttgcgaattttgttattaatatatatttttttaagggaaaaaaatgtttttgtgttttagttttaaaatgtaaaggtatgatgttatttgttattatgtttaaaaaagtttttatttaataattttgttagaagagggagagagagagaaggtaaatgtttttttagttgttttttgtttatagtgtttgtgttttgtagataaatgtgaggattttttttaaattttttttttgtttgttaaattttattgttattgttaaatttagagtagatagagtttgcgtaatggaataaagtttttaaaattgaaatgtgatattgtttttaatattttttatttttttggatttttttttgttttattatttttgttaattaatttatttttagattttgtattttagaagtaatgggaaaaattagtagttttttaatttaattatttaagtgttgtttttgtgattttttgaaggtaaatattttttattttttgaagttattggggaattttatttaaattgtgtattgtttgtttttgtttagaattgttttttattttaaaatttttattgtttcggaatcgagagttatttataaattgttgaatatgtaattttgtggaatttgaaaaatagttcggggagatggatgtatttgtatagatatttgtatgagtagaaattattgtaaggtatttatgttaaattttttatttttgtagggttttcgtggtgttattatagaagatttttttaaattttttttatggttaagggttatagagtatggatatgaatttggggatttttttttttttttgtaggtgtagatgttttatttttaagattatgtttttttgtatgtgtgtatgtgtttttgtgtgtatgtgtttttgtgtgtgtaatttattaggattttatttataaggtatgttatatatgaagggttgtattttagatgatattaaagtttttaaatatgatttttggagttaaggtttcggaattttgtatttatgtttagagagagtgttaaagttagagtaaagtgtaatttgtttttttaaaaaagaattttttgataatttttgttgattttgtatatttgtataatttaaataaatatatattgtatatggaaagtagaaattttttaagagttgtttgtttaatttttttgtttagaagaggatttttatgggtaaagtttggatttggggttttgtgttataaaattttgattttatatttagtgtcgtgaagtttttttaggtaaatttggttgttgttgttagtgtatcgatttttcgttttcgattgttggtcgtagttttagtttttatttttagtaaaattatattttttaagatttgtgttttttttttaatttgtaagcgtttttaagttgttgttattggttttatcgatttaattgtttgagggtttaatttataagacgtttttgttatttagtgtagtatttagttgttgtttttaaatattttattattacgattttttttagttaagtaagtggttttaggagttaaagatatatttttgttaggtatttgattttgttgtttttgagatgttaatatatgtaggttattttgtttttaaagaaatgacgttattgtgtatatatattatgtgatttagtagttggagtttttgtttttttatttaggggattataaaagaggttgtggagcgttatttttgtattaattataagttaagaaaattgtttttaaatgtattttttatgttgtgtatgttgaatattttagaagtggagtttttaataagttgttatttttttttgtatttgaagtaggaagtggtttgagggagttgcgtggttttttatatgtaatttagtgggtaaaggtgttttgtttagaggtagagtttattagttgattgtattttgatttttaaggtatttttaagtgagtgagtcgggggaagggagtaagggagtggattggagtttgggttattatttgggttgttataataggtatataatggaaataggtggtttgattggggggaaaagattgatttaaattttagttgtgtaatttgtttattgttttaatggataaaaggtagtttatttaggtttataatagtatatttgtttgggtgtttaaatgtaattagatgtttttataaattttatttataaagtagtatatgtttttaagattttagttttttatttatatcggttttataatatttattttgatttgttgtaaaagatttggaataaataaaaatgattatatttatagtgagtatttttttatgattgttgtttttaaattttatagggtatttttattgtggtttagatatttggaattaattaatattttatttatttaagattaaaaaaaaaagaatttttaaaatttgggtttgtgaatgatttttgagaaagtgttttttgattttttttttttttttttttatgtttttttgattttttttttttttttttattatattttttttttttttttattgattttttttgtgtttggtaaaataaaaggttaaggaaataatgaatatatgggattatttgttttatattttaaatttttaagtaagttcggtattgtttttatttgtgggaatataaaattttttggttttttgtgggtgtattggattgttttttatattaaaggaaaatgtattagaggttttgttttgttttagaattgtaagtattgagatttatttgataatataatttagtaaaaaaaaaaaaaaagaaaaagagaaatttatttaaaaaaaattttaaatttttaagttttagagatttatatgtatcgttgtatttaaatgtgttatattagaattattaaaaatatagttttgatatttaatgaagtttgaaatttattaaggttataatttgagtaatttttttttttggattttataaaaattgaagaatttgaaggtatttatagttgtaggtgtttagtttttagtattgttatgaacgtaataaagaagggaggggtggagaaataggattcggtagaataatatattttttagaattggtttattttcgtagtgtgggggtatgttttgtaagattaattataggtttgtttttttgaaaaatgttacgaggtttaggtgggttggatttgttgaggtttttaatggaaatattgaataggaaaattttattaattttataattaaaaaaaaaaaaaaatgagaattggatgataatatgttttttttagttttagtgttttgggttatgtagggggtggaagatttttatgcggagattttgttgagaaaaatgtagtaaatgtttagttgagtttttatttttttttttattttatgtttattatttatgattatttgtaaatagagggcgttttttatttttaattgttttataattattaattgaatatttatattttgttaacgagagataggggttttggttttttttttttttttttagttgttgaggtgaaggtttgattataaaaaatggaaattattattagaatgatggggaaaattttgttattgatatagagttattaaattgagagtttatggagggtaaggagggtagttagaaaataaatgattgtttttttaaaagtgatggggttgaatggatttgttattattttgaggtttaaaaaaaatgttttttttataattatagtttttagtatgattttataatttttttaatagcgttttttatttaatattttgttagggattttttttatgatgttgaaagtagatgtatttgagagaagtgaagttatttattttgagaggttttttggaaaaagttatatttttgtgttataagtaataatatggaaaaatttaatgattattttagtatggtttttattatttagagtgaggatgaagatttgagttataggattgttgtttttggtaaggttgtcgtttggtagtttattattgattaagttatgttaattaggggttttttggtatattttgttataaaatagatatagtgatatataagtttttttaagagatgaagttataatttttgtgattaaaaataaaataaaagatttttgttagtttgagtttagtgttttatatatagaagggatttttaatacgtgttgatttgatattggatttgaggttagggattttagaatataggagtggtttttatttgagttaattttatttttcgatttttatatttttttttgtttttgttatttttttttatttgtggttgtgttaattgttgatatgttttaggtaaggaattagttttttttttttttttttttttttttttttttttatattgaggaaataaaataaaaataaaattttgtgatgatatatagtattgttaaaagttattttttggttatagtaaattatttttagttaaaaatagggaatgatgttttggttaaaaatattttgtttaataatgaatgtatatattatttatggatggttaatattgagagaatttaaattaataaaatttatttggttttaaatttgtattgagtataatttaatttttgataatttaaaagttttattagggttttagagtgatatgggattttattgtaataatagtattttttattttcgtagtaaacgtttttagatattttgttttaatttattgaaataggaatttataaagaaagggtttagggaggatttttttaaagatttatagtagttaggggaataaatataggttgttggatgtcgagatacgttttatttataattttttttgggtttttatgtattttattggtttttgtgttgggtagttttgattaatgatagtcgtggaatcgtgggagttaatgtatttttgttttattttattttttttgtaaggattaaggaggaaatttgattttttttttgttttttgggtagg

SEQ ID NO: 964 - DNA, 9731 bp, Artificial Sequence
  chemically treated genomic DNA (Homo sapiens)
tttgtttaagaaatagagggagggttaggttttttttttgatttttgtaaggggagtggggtgggatagaagtgtattgatttttacgattttacgattgttattaattaggattatttagtatagaagttaatagagtatatgagaatttagagggagttgtggatggagcgtgtttcggtatttaataatttgtgtttatttttttggttattgtggatttttggaggagttttttttgaattttttttttatgggtttttattttaatgaattgagataaaatatttagaaacgtttattacggaaatgaaagatgttattattatagtgggattttatattattttgagattttggtagaatttttgaattattaaaggttaaattgtgtttagtatagatttggggttaaataagttttgttaatttaaatttttttaatattggttatttatagatggtatatgtatttattattgagtagaatatttttaattaaaatattattttttatttttgattaaaaataatttattatggttaaaaaatggtttttgataatattatatattattatagggttttgtttttgttttgtttttttaatatgagagagagagagagagagagagagagagagagattgattttttatttggggtatattagtagttgatataattataaatagaagaaaataatagaaatagaaaaaaatatgagaatcgaagaatgaaattggtttaaatagaaattatttttgtattttaaagtttttggttttaagtttaatattaaattaatacgtgttgagaattttttttgtgtatagggtattgggtttaaattggtaaaaattttttattttatttttagttataggaattatggttttattttttggagggatttatgtgttattgtatttattttatagtaaaatatattaagggatttttggttggtatgatttagttaatgatagattgttaaacggtagttttgttaaaagtagtagttttgtggtttaagtttttatttttattttaagtagtagaaattatgttaagatgattattaagtttttttatattgttatttgtggtataaagatgtggttttttttaagaagttttttaaggtgagtggttttattttttttagatgtatttatttttagtattatgggaagagtttttgatagggtgttaggtgaggggcgttattaaaagggttgtggagttatgttggaagttataattataagaagagtattttttttgaattttagagtagtggtaggtttatttaattttattatttttggagaaatagttatttattttttgattattttttttgttttttatggatttttaatttagtggttttatattagtggtaaaattttttttattattttaatgatgatttttattttttgtagttagatttttattttagtaattgaggaaaaaaaaaaaaaattaaaatttttgtttttcgttaataaaatataaatatttagttaatggttgtaaagtagttgaagatgaaaagcgttttttatttgtaaatgattataaataatggatataaaatagaagaggaggtaaaagtttaattgaatatttattgtattttttttaataagattttcgtatggaaattttttattttttatatagtttaaaatattgggattggaagaagtatgttattatttagtttttatttttttttttttttggttgtaaaattagtggggtttttttgtttaatatttttattggaaattttaataaatttaatttatttggatttcgtggtattttttaaaagaataaatttgtgattgattttgtagagtatatttttatattgcgggaatgggttagttttagaaagtatgttattttatcgaattttatttttttattttttttttttttgttgcgtttatagtaatgttgaaggttaagtatttgtaattgtagatgtttttaagttttttagtttttgtgaaatttagggaaaaaaattatttaagttatagttttagtgaattttaaattttattagatgttaaaattatatttttaatagttttagtataatatatttaagtgtagcgatatatataagtttttggaatttaagaatttaagattttttttaaatagatttttttttttttttttttttttttttgttgagttatattgttagataaattttagtatttatagttttaggataagatagaatttttagtgtatttttttttagtgtagggaatagtttagtatatttatagagaattagagaattttatgtttttataaatgaaaataatatcgaatttgtttaggagtttaaagtgtgaaataagtggttttatatgtttattatttttttggttttttattttgttaaatataaaagaaattaatagagagaaaggaaagatatgatagaaaaaaaagggaagaattagaaagatatgagaaaaaaagaaaaaaaaattagaaaatatttttttaaaaattatttataaatttaaattttaaaagtttttttttttttaattttagataaatggaatattaattgattttagatgtttgggttataatgaaaatgttttgtaaaatttgagggtaatagttataagaaaatatttattgtaggtgtaattatttttgtttgttttaggttttttatagtaggttagggtgggtattatgaggtcgatgtgaatagaaaattgaagttttaaaaatatgtgttgttttgtgggtggggtttgtgaaagtatttagttatatttggatatttaggtaggtatgttattatgagtttgggtaaattgttttttgtttattgaaataatgaataaattgtatagttgggatttaagttaattttttttttttagttaagttatttatttttattgtatgtttattgtagtagtttagatagtgatttaagttttagtttatttttttatttttttttttcgatttatttatttggaaatattttgagagttagagtataattagttggtgagttttgtttttgggtaggatatttttatttattgaattatatgtgaaagattacgtagtttttttaaattattttttgttttaagtatagaaaaaagtaataatttattaagagttttatttttgaagtgtttagtatatatagtatgaaaagtgtatttggaaataatttttttaatttgtaattaatgtagagataacgttttatagttttttttatgattttttaagtaaggagataaaaattttagttgttagattatatagtatgtatgtatagtgacgttatttttttgaaagtaaggtggtttgtatgtgttggtattttaggaatagtagaattaggtgtttgataagggtgtatttttaatttttggagttatttatttgattagggaaagtcgtagtggtgaagtgtttgaaagtagtaattgaatgttgtattaagtggtagagacgttttatgaattgagtttttaggtaattgaatcggtggagttagtgatagtagtttaaaagcgtttgtaaattgaaaaaaaaatataagttttgaaggatataattttgttgagaatggaaattagaattacggttagtaatcggaaacgagaagtcggtgtattgatagtagtagttagatttatttaaagggattttacgatattgaatataaaattagagttttataatatagaattttaagtttaaattttgtttatgaaagtttttttttaaatagaaaagttgggtaagtagtttttagaaagtttttgttttttatatatagtatgtatttgtttaaattatataaatatgtaaggttagtaagagttgttaaggagtttttttttggaagaataaattatattttattttaattttaatattttttttgggtataagtgtagagtttcgggattttagttttaaagattatatttaaaagttttaatattatttaaaatataattttttatatatagtatgttttgtaaataaagttttgatgagttatatatatagagatatatatatatagagatatatatatatatgtaaaagaatatggttttaaaaataaaatatttgtatttgtaaaagaaaaaaaaaatttttaagtttatatttatgttttatagtttttagttatagagaggatttaaaggaattttttgtaatgatattacggaagttttgtagaagtggaggatttagtataagtattttgtaatagtttttatttatatagatatttgtgtaaatgtatttattttttcgagttattttttagattttatagaattgtatatttagtaatttataaataattttcggtttcgaaataatgaaaattttaaagtgaagaatagttttaggtagaagtaaatagtatataatttaaatagaattttttaatgattttaaagagtaagaaatatttatttttaagaaattataaaagtagtatttaaataattgggttggaagattgttgattttttttattgtttttgaagtataaagtttgaaaatgaattggttagtaggaataatgaagtaaaaagaaatttagagagatgggagatgttgagagtaatgttatattttaattttgaggattttattttattgcgtaggttttatttgttttgaatttagtagtgatagtgagatttagtaaatagaagagggatttagagaaaatttttatatttatttataaaatatagatattgtagataggaaatagttgggggaatatttgtttttttttttttttttttttttggtaaagttattgagtaaggatttttttgggtatggtgataaataatattatatttttgtattttaaaattagagtatagaagtattttttttttttaaaagaatgtgtgttagtgatagggttcgtagatattaaaatatttatgttgttatagaaaataaggatttgttttttgattaattttttgttgggtatgaagatataaacgtttgttaatatattttattagtattaaaggaatatgggggatgggagagtaattttagattttagagtaaatgtattatttaaaataaaaaaagaaagaaaggacgataagattttttttagtaaattttataattttaattttgaagtgattggggtaaagtagattggaagatagtattcgggtgattttttgttttagttgttaagtgagaggtgtgattttattttttagaatttatggaggggtaggtagtattggattggtttttttagggtattgttttatatttttttttttgcgatgaggtaaagattatgtcgagttgtaaaatttaattgaaatagaatatttttttttatttttttattaggttgtttgttattgttttttttttattttattattttgggagaagggtatttggggggtaaataatttttttgttgtttgaattttttatataatttaaatttgtgtgtgtgtgtgtgtgtgtgtgtgtgtgtgtgtgtgtgtatgatagagggagtttgtgtgttagagtgtgttttttttttttgatttttgtgtattttaaataatattagttggttagtaatattttttcgagggttatgatgttatttaaattttttaattgggtgattggtcggtaatatggtttaagttagttgttttgttatttataatgtatatttgtttttgttattgagaatttagttttgattttttgtcgatatagtttgtatttatttttttttggttttgtgaagtagtagataagaaagtgaattataaaataaggttgtaaaagtttagagtagatatatttttttttttagagagttttttaggtttggttttttaggagtggtggaaataatttggattttgaattttttttttttttttttttttatatgatttttaggggattgatatattaattgaaaatatagttttgtttgaaattttattttggttttttgtgttattttggggttagaaatttgtttgtagaagtgggtgttttaataaaaaataaataaatttgttttgtttggaagggggttgggtttgtttgagttttttgtgtggttaatatattgtagtaatgtttattttttagaaattaaagttagaaatttggaattatgttgtgttaatggtgtattatgtttagtaatattttgtgagttttattatgtgtttaattataatatttttaggaaaataaagaggaataagatatggttaagtttttttaggggtttttagttgaatgttagagataaagaggaaaattttatagttatatgatgggtatgtgtttttttaaaaatatgaatagtgtataatgagagggagtgatatattttttgggaagataggggagtaaaattttttggaaaatttaaaatgagggaggtagattgtgttatgagaggttttggggtattatgttgggaaattttagtgggtgggatttgatttaaagagtatattaagaggtattattaagaggtggtttagtaggtggttttggattatttttaatgtagggattatttatatgtgtagatgtgtgagtaatttttgtatttaataataattcgtggttttttttaataagttttttttgtatatttgatttgtgataaattttttttttttttgtagtttttgtggattatattttttttgaaaaatgtttatttttttatagattttgaggatgtagattgtataaaataatagagttgattttatttgttttttagatgagaaaaaatttttttaattaagtttggagagttagatattggttggagttttggtgttaagtttttgttttaatattggatattattataggtgaaggttaggattttgtttaatttttttttattgtagttttagtatattttaattgttttaagatgttttagaagttaattatatgtttttaagtttattatttattttgatgtttttttttggtatgttcggtgtatagatataattttatttataagtattttatatgaaaggttgttttggggatagatgttgtattttagcgatattgatatattgatttatagtttttcggttttgtaattttaattatttttaaaggataattaggttttaatttatgttttagtttttatgttataattaaagaaaattgaaattttagtgagtcgtaattgttattagttgtgttttggaaatattttaatgagagttattagtttttaatgggggaagtaattttttgaggtgattaatgtatattttaatttggagaatggtttatatttttggatagggtgagttagtaatggattagggtaataatttttagagaaaaggttatttttttggttaattttaggagttaatatgaaaatgaaagagtaataaatatgttattagattattttttaatggttaagtgatgtatttgtttaggagtaaaagaaatgaatgtatttattattataaatttaaggtagtagtaaatttaaagtttaagaggagtttaggttatgaagttttattggagagaaatatttagggttattataaaagtatggaatgattatgtagttttttgtttgtaaaaatttgatagtgagatatggttattaaaatagttaatcgtaaggatgtgtttattataagaatatttatttttggaaatttagagatttatagttttattttttgtatgtgtaatgtttgtgggatataaataatttttttttaaagttttttttttgagtagtatatttgtataaagttatagttttagaaaatttttgatatttttcgtatatatatagaaaaaattgtttatttttttaaagggtgagttggttaaggtatatagaaagtaggggtggggtgggtaaggaggttttttttgttttttttttaattttttttttttttttaagttatgtttttagttttttttgtgttaattggagaggcgtttatttaaaaggtaattttatatttatgtataatagggtatatttataatttattttatgaatgtttttgtttatttttaaggaaagtttagaatggatatttggaggtaagggaattttggaattaaataaagggtgaggtttaaggttttagggtaattattaggtaaagaatttgggggaaattattggatgttttttttggattatggtttgtgaggagggttggttatgggttgtttaaattaatgttggaggttaagaatttgttaatttagaatataaaatttagaggaaagatagggttttaaaaatttaatatgttgtcgagtaaggggtttaatgttagttttaaaatatttgtttagaaagatttttgtgattttttaggaagatttgtttaaaggagttgttttaattttttaaagaagtgtttcgtttacgattagggaaaatagaaatagggaggagaaatttttttattaaagaaattaatgttttttttttaatattaaatttggattttattttttttaaaatgttaaaagggtaaatattggaaatagaaacgaaattgttgtggttgtgtgagtaaagtaatttttcgttatggtagaggagaagttacggtatggggtaaggatgggttggtggagtgagagaatttgaggattcgttacgtttgttttacgttgtataaaatgtggggaaaagagatattaacgttaaattttaggggtaggatttatataaatgtttttttggggaataaaaaaatgtgcgcgttttttagtggatttttgagaaattgttattgtatttttgatcgtggatgcgttttggtaggagtgggttttttttttgaaagttttggatttaaatatattttaagttatatttatttttagttttattaagttttttgaaataagtaagatagatgtttaatttattgtagtttaaaaaggggaagattgataagggggaaagaaagattataaattttattagggtatggatggattttttatggttatatttttagtatttaatttcgggtgtatgagtttaaaatattttgttgaatgaatgtaagtttggaaaataaatgatgataaaggtaaaatataaaaattgtataaattttttaagagtaaaataattaatttttttattttataagaaaaataagattaggaagaggggttgttggaggatagaaaaatgatttttcgagaagtaagataaatttaggtgtttataaaatagaatttaaatttagtttttttgtttgttttgtagtatttttattatgttagtttttaaaatgtgggttataatatttttggttaaagacgtggcgttaaagaattatttaagtatagagatgattttatttataattttttttttgattttgaatttttaaaggagaaagttttagtttggcgttagtttgtttttagtgtttttttagtatttattagtttttttttattttattttttaatttaatttttaatttttgtgggtatgtagtaggtatatatatttatgggatacgtgagatattttgatataggtatgaaatgtgaaataaatatattatggagaattgggtatttatttttttaaatatttattttttgtgt

SEQ ID NO: 965 - DNA, 8244 bp, Artificial Sequence
  chemically treated genomic DNA (Homo sapiens)
ttttaaatatatttattatttcgacgggttataataatttttttggacgttaattttcggggacgttaaaatatattagtttcggcgggtttttttagatttatattatgtggtttggggttttagatgtgtttttttttaggttttggatagttttatatattttttttaggttttatagatttataggttattaattcgggttttttaattttaaagacgaagtttttggttcgtggtggtcgcgttgattaatttgtttggttttttaggatgtggatagtgttttttttatatttaggtattgtttttaaaataagtggaattttttcgtataattttgaatattaattttagggttttttaagtttattgtttttcgtatacgttcgttttatttcgcgtttttttattttattttcgcgttttttttcgtttattttagtatgggatatttgttgttgggtttcgtaaatttatttatattaatttgggttttttaaattttatacgttgaattttaagttttttatgatatttagtagggttggaaggttggaatttttagagtatgaaaattgttttttatatttttttttaaattcggttattatatttagagtatgttgaatttttttttgaattataaacgatttgttttttgattgtttgagttttataaaatggagggatttttttagtgattttttaaagttattgagaatgttgtgggtgtgtgagttataaagttttggggtattaacgtttatggttttatatgttgtttggttacgaattaggttttttaagatgtagatagtgttatttaggtttttggagtatattgagtagttattaggaggtgtttaagtgtgatttaggattttttaggtttttttaaattatatagggtttttcgggtttttttgggttatattaagtataaaaggattttttgggtagagtttatttttatttttgttatgttaggtgttgttaacggttttagtttttaaatatttcgagtattttttttgtattataatatattgattattaaataattttttgggttttaggagttttataataagaattttgtttttttaaaatttaggtattggtttgaaattttaacggttaggattatattggattttttttttggttttttatatttggatgttttggacgttgttttttaggttttttaggaatatttagtattgttttcggattataggatagtattgattttttgggttttaaataatttattgagttattttaaagttaagtaatattttttttaaatatattgtatattttttattataaaatttgaaaatttttaagttttaagatttaggaattttgaattttttttttttaaaatgtatatatggatttttaagttttttaaggattttgagtaatttttttagatttttagatttaaaaacgatttttttggagtttttaaattgcggtattgttttttagttttttaaagtaaattgagatttttttttttttataaaataattgaggttttttttttttttaatattgatttatgagttttttgattttatggtttttgttttgggtttttttatatttagaaaatgttttatggatttttaaagtatattaaaaaatgtttttgggttttaagaaattttaggtatggaaaaatttgcgatttataagttttttagttattaattaggtttttagaaatttagatattaaatttttattgggtaatttttatgtgttttaaaaatttgaaatgtgttttattggggtttttttaaatgtagacgatatttaggaaaatatatagttttttttttatttattaaaaataagttaatggaaattatttaaaaattagtatagaaaaataatattgattttatatttttttattttttattttgttttttttaaatgtattgattatattttaggtttttttaaaatttagatagtgtttttttttatttttgaagggtgttaaaatttttttttgaagttatagtaattatgaaggttatttttttttcggttgttgttagcgtttaggttattaatttatatttttaagatgtgaaaattaattttagtttttttttaatatattaagaatgtgtttggatttttaaaatgtgttttttgtttttatttgttaattttacgtaatatggttttacggtaaaatttttaattttatatggagaattttttttaattatttttttttataaattggttttttaagttagttggtttttatttgagatttttttttttatgtttttaattgtatggagtaattttttttattttttaaatttgtaatttatttttttggagtttcgagtttagttattaattacggtttttatattaacggagttttcggggtttttttttttaggatatttattcgttaagttcgtaaggtagaaagaattttgttttgcgttttttaaaatttgggtattgttttcggttcgtcggttatttattgtagtttttttaatttcgcgtatagcgggtattggtttcgggtttttttgttttttacgaagtttttagagtaattcggatttgggaaatttttttttagcgttgtttaaatatatttgggtcggtcgcgcgtttttaggacgtggatagggagggttttttcgtgtttaggaaagcgatcgggtattgtttttagttttttttaaatttgggtattgttttcgggttttttaacggattgggcgttgttttcggatattgaggattggtttcggggtttcgtttatttttagtagcgtttatcgtttgttatagagcgttcgatcgttcgttgtttgagtttttggtgcgttcgcggacgtagtttttagtttcgcggtgagtttttcgtcgcgtcgatttttttcgtttttgcgtttttgatcggttttcggttcgtatttgttgttgtttcgtcggtgttggcgttcgttttcggttgtcgtcggggaggtcggcgtggggcgcgggatacggttgcggatttgcggttggcggttgcgttcgtttttgttgggcgtttcgaaattcgcgttattttcgtttgtttattgtaaagattttattcgtggggaaagcggttggagggttttaaagtggggcgggtagggggttggggcgagggacgcggaggagaggcgttttcgtcgggcggtaaagtgtttttagttcgcgggtttaggatttcgtcgggaggcgcgcgcggagcgcgggcgaagtgattgatggcggagcgaggggggcgaggggggttaggggggcgcgagatttcgtcggcggttttttttttttggttaggtttaggcggcggggggttggcggggtgcgggattttgtgcgtggtttttgatttggtaaaaattatagtgtttttttatatcgtttaaattttttaggagatggtttttttagatttttaaattatcgtggtggttttcgagatcgaattcgcgtttatgtaagtttaacgtattgaggacggggtaattattatttagatattttgggtgggtcgtaaaggcgagttatttagacgtatttcggtgagttcggttatgtaggtaggatttgagttgtgtttttcgttttgatttttttttttttggcggtcggagttttcgtaggttttaagtttggtttagattcggttcggcgtagtcggtttttcgcgcgtttcgtatttggcgggggtttcggggtttcggcgcggtatcggggggcgttcgggatttggttgaggttttaagcgtcgcgtggtcggttttttttgttggggtaggtggcggttgcgcgtttcgttcgagtttaggggtttttttagtcgtaataattagtaaggatttttcgatttagttttaagttatttgtatttgtatttagacggggcgtattcgtagtgtagttttttggtggggcgttgggagttcgtttgtttttgtttgttcggagattttagtttacgagtataggtcgttcgggtattttagaaattcgggatggggtttttgaattttttagaacgggtatttagtatggttttggcgttttgcggttttttgttttttatttagtttcgttttcgcgtattttttagtttttgcgatcgtcgttttttttttcggggttttagggtttttagttcgtatttttcgtttcgtttttggttcgggttgcgggggcgggtcgggggcggggcgagggtttcgcgggcgtttattggcgcgggcgcgaggttagcgaggttcgcgcgggttttgggtcgcgggttggcgcgattataagagtcgggcgtgggcgttcgtagttcgtttgtttttcggcggagttgcgtgaggttcggtcggtttcggtttttttttttcggtcgttttcgttttttggtttacgtttgttcgcgttttgtttattagcgtttttatcgggtaaggcggtttcgcgtcgacgtcgttcgttgtttcgttgttgattttcgtttcgggcgtcgttcgcggggtcgcgtttcgtcgggtttgcggatttttcgtcgttttttttttatttattttaattttttttattttcgtttcgttcgaggaggcggtttttttcgtaggtagttcggttcgtaggtcgtcggcgttgttatttttttcgcgttttttttttagtttttttttcggcgcgtagtttcgggtcgttttttttttcgcgttgcgtttcggagcggtttcggtgtcgttatcgtttgtttttttttcgaggttcgggttcgcgacggtagagggtttcgtcggtttaaatcgagttgggcgttcgcggttcgggtgtagtttttatttcgttttttagttatcgtttttttcggtttttcgacgtggcgttttttttttcgtttttttgtgtttttcgcgttttttttggcgtttggtttcggttttcgttttttttttcgtaatttttttttcgttttttttcgttttttttagtttttagttttcgatttttttttttttttacgttcgttttttcgttttcgtcgaattaaagtggattaattatacgttttttgttttttttcgtgttgttttttttcgttgtgcgtttgttcgtttttcgttgttttttttttttttcgtttttttttcggttttttttttttacgtttattttgttttttttattatttttgtttttttttatttttgatataatagttgattttatttttcgatattttttttttttcgaaaagtataatatttggttcgttttagttcgaagatagttcgttttttttggataattagacgaattttttttttttttttaaaaaaaagttattttttcgttttgtttcgtcgtatattcggttttcgcgattcggttagagcggcgttggtagaggagtgttcggtaggagggttaacgttcgttgttcggtttgcgatacgtagtagggaggtgggcggtagcgtcgtcggtttttaggtaagcggcgtgtgcgggtcgggtcggggtcggggttggggcggcgcgggtttgcgtcggacgttcggtttttttttcgttcgttttcggttcggggtttgcggggttcggcggggcggttgagttcgggggggaggaggaggaggaggaggaggacggacggttgcgggtttcgttttttgcgcggagtttcgcgtttattttggcggcggagttgggggtggggtgggggcgtcgggaagggtcgagggaggtgtgaggtgtttgtaggggcgatttttcggtcggtttgtgggtgtagggggtgtcgttttatatgtgtgattcgtgttttgcgggttttggttttcggggtgttgggtaacgaggaggggcgcggagtcgtagaagtttattttggtatgttgacgcggtgttagcgagatcgcgagaggaagacgggggtgggcggggttaggatggagaggggtcgagttggtaggagttatggtagacgttatattcgcgatattttttttatattttttttggttttgttcgtaatatttttaaataggagtttcgggagagggggagaggggttgttggtttgaggttaagaagggtagagttttcgattcggagagaggtcgcggtttttgtttagtgggtagcgtggaagtttttatataaggaggtgggaaggagattttttttttttttattgttttgtgtagagatgagtcgggggtgtaggatgggagtttatggtatttcgttacgggatggtttagggttttcggttgggggtgtaggagagaagagattggttgggaggagggagagggcgggagtaaaggcgcgggggagtggttagtagggagaggggtggggggtagggtggagttcgggttgggaggagtcggtttatatataaaagttgaggtattgattagtttgtaaattggatattagttttttttgtgaaagagatttttagtttttttttttttttttttttttttttttttttgttttagcgagttttttgttgagttgtaggtaattagggttgtggagtgaggattttcgttgttattttattttagtttgaggtagggtagtagggggtacggtttacgtttgggtttcgggttttgtagtcgttagttcgttgtttttcggatagtattttttttttttttttttttttgtttttgtttttatttggtttttgtttttttatttgttttttttttttttgtttttttttttcggttttttttttgtttagtttagggttttttttgggtttttatttgtttcgtatcgttgtatgttttttgttttgttttttgtcggttttttgattcggatttttaagtttagagtggtggggtttgttgcggaagcgcggcgagggttagagtggttagttggcggagtgtgtttttagaatttggaagggggtggtagagggggcggtgagaggattggttagggtttagttaaggagatgattaaggaggtttttagattttcggcgtagttgtttattagtttttagagagggtatgtaaagttgtgtttttgttttattgtttgtttagtcgtttatataatttattgtattaaaaatttttttgggtttgcggagcgaaggttggggttgttcgtttggagggttttattttttgtaggggtagggttaatttgttgtggtggttttcggttttttattttcgagtgggttaattcggttttgtggttttgtagtttgtggagggggtgtgttttaagattggtttttttttttagattgtagtttggggaatttggtgtcggattttttaggtggtttgagttggtttttttagtttttacggggagagtttggtagcgtaaatagggagatgttttggaggtttttggttttattggttcgatttgaggtttggaaaggaggttttgggcgtgtgtgtgtgtgtttgggggtatttaaggtagattggagttggagaattgggtgattgggaaaataaggtttttagagtatgggtggcgtggttgtgttaattattggagtttttgatttaggtttggtttagttgtagattggaaaggtggaaaagttagggggaggggcggggttggtttagtaggattggtttgttgttttgagggcgatggtttttttggattttttttgtttagttgggggttgtggggaggaagggattggtttttttggatgtatatgttttgtaggggtggggttgtttgttattttggttggcgttggaggtttgagaagtggcgatgtgacgttgggttggttttgtttttatggtgttataggacggaggttaggtcgggtgtttagtttgggtttttgtagttgtggatgtcgttgagtttttgtaataatgatcgtggagatggttatttttcgtgtaaaattattagtgttttttgtaaatggaaggaattgggttttttttgtgtgtttttggacgttttattttgtatatggttttgcgtttttatttcggtattatgatttgtgtgttatttttgtaataaaaataatgtttataggaaagtcgtgtttttaatttttaattgaatttgtaggttggtaaatttggtttgggaggggtatttttggtttggggtttggtttggttgtttcgtttacgttatttttttttcgtttttaga

SEQ ID NO: 966 - DNA, 8244 bp, Artificial Sequence
  chemically treated genomic DNA (Homo sapiens)
tttgggggcgggagagaagtggcgtgagcggggtagttaggttaagttttaggttagaggtgttttttttaaattaaatttgttaatttataaatttagttgaaaattgaaagtacggtttttttataaatattatttttattataaaagtaatatataggttataatgtcgaggtgagggcgtagggttatgtgtagaatgaagcgtttagaagtatatagaaaaggtttagttttttttatttgtaagaagtattagtaattttatacgaggggtgattatttttacggttattattgtaggagtttagcggtatttatagttgtaggggtttaggttggatattcgatttggttttcgttttatgatattatgggggtagggttagtttagcgttatatcgttattttttaggtttttagcgttagttaagatggtagatagttttatttttatagagtatgtgtatttaggaggattagtttttttttttttataatttttagttgagtagggggggtttaggaggattatcgtttttaaagtagtaggttagttttgttgggttagtttcgtttttttttttggtttttttatttttttagtttgtagttgagttaggtttgggttaaggattttaatggttaatataattacgttatttatgttttagaaattttgtttttttagttatttagttttttaattttagtttgttttgggtatttttaaatatatatatatacgtttagagttttttttttaggttttaaatcgaattagtaaggttaggggtttttagaatatttttttatttgcgttattaaatttttttcgtgggagttggagagattagtttaggttatttgggaagttcgatattaggttttttagattataatttggaaggggaggttagttttaggatatattttttttataggttgtagggttatagggtcgggttaatttattcgggggtgggaggtcgggagttattatagtaagttggttttgtttttgtagaaggtggaattttttaggcgggtagttttagttttcgtttcgtagatttaggggagtttttgatgtaataaattatgtgagcgattgagtaggtagtgggatagaagtataattttgtatgttttttttaaagattagtgggtagttgcgtcgaggatttgaaagtttttttggttatttttttgattggattttggttagtttttttatcgttttttttgttatttttttttaaattttaagagtatatttcgttagttggttattttagttttcgtcgcgttttcgtaataagttttattattttgaatttggaggttcgggttaggggatcggtagaaagtaggataggaagtatgtagcggtgcggagtaggtgagggtttaggaaaagttttgagttgggtaaggagggggtcgaagggaaggaatagaaagggaaggagtaggtgagggagtagagattaggtgggggtaggggtagaggaaaagaggggaggggggtgttgttcgagaggtagcgggttggcggttgtagggttcgaggtttaggcgtgggtcgtgttttttgttgttttgttttaggttggagtgggatggtagcgggggtttttattttatagttttggttatttatagtttagtagaaggttcgttggggtaggaggaggaggaggaagaggaggaggaggaagttggaagttttttttataggagaagttaatgtttagtttgtaggttggttagtgttttagtttttatgtgtgagtcgattttttttagttcgggttttattttattttttatttttttttttgttgattattttttcgcgtttttgttttcgttttttttttttttttagttagtttttttttttttgtatttttaatcgggagttttggattatttcgtagcgaagtgttatgggtttttattttgtattttcggtttatttttgtatagggtagtgaagggggggggggttttttttttatttttttgtatggaaatttttacgttgtttattgggtaggggtcgcggttttttttcgggtcgaaggttttgttttttttagttttagattagtagtttttttttttttttttcgggatttttgtttggaaatgttgcggatagagttagagggggtgtgggggagatgtcgcgaatgtggcgtttgttatgatttttgttaattcggtttttttttattttggtttcgtttattttcgtttttttttcgcggtttcgttggtatcgcgttaatatattagggtgggtttttgcggtttcgcgttttttttcgttatttagtatttcggaggttagggttcgtaaggtacgaattatatatgtgaggcggtattttttgtatttatagatcgatcgggaagtcgtttttgtagatattttatatttttttcggtttttttcgacgtttttattttatttttagtttcgtcgttagggtgagcgcggggtttcgcgtagggaacgggattcgtagtcgttcgttttttttttttttttttttttttttttcgggtttagtcgtttcgtcgagtttcgtaggtttcgggtcgggagcgggcggaggaagggtcgggcgttcggcgtaagttcgcgtcgttttagtttcggtttcggttcggttcgtatacgtcgtttatttggaagtcggcgacgttgtcgtttatttttttgttgcgtgtcgtaaatcgaatagcgggcgttggtttttttgtcggatatttttttgttagcgtcgttttggtcgagtcgcgggggtcgaatgtgcgacggggtagagcggggggatggtttttttttggggggggggggagaattcgtttgattgtttagggaggacgggttgttttcgggttggggcgggttagatgttgtatttttcgggggggaaaaggtatcgggaaatgaggttagttgttgtattaaggatagaggggggtagagatagtgggagagatagagtgaacgtgaaaggggggggtcgaagagagggcgagggggagagaggatagcgagaggcgggtaggcgtatagcgggagagaatagtacggagagaaatagaaagcgtgtaattaatttattttggttcggcgaaggcgagagggcgggcgtgagggggggagggagtcggaggttaggagttgggggggacgggagggagcgaagggaaggttgcgggagaaagagcgggggtcggggttagacgttaagaggggcgcggggagtatagagaagcggagggaagggcgttacgtcgaggggtcgggggaggcggtgattggggggcggagtggaggttgtattcggatcgcgggcgtttagttcggtttgggtcgacggagttttttgtcgtcgcgagttcgggtttcgggagggggataggcggtggcggtatcggggtcgtttcgggacgtagcgcggaaaggggagcggttcgaggttgcgcgtcggggggagggttggagggggagcgcggggggggtgataacgtcggcggtttgcgagtcggattgtttgcggggggaatcgttttttcgggcgaagcggggatggggggagttgaggtagatgaagaggaggcggcggggaattcgtaggttcggcggagcgcgatttcgcggacggcgttcgggacgggagttagtagcgaggtagcgggcggcgtcgacgcggggtcgttttgttcgatggaggcgttggtgggtagagcgcgggtaggcgtgggttaggaggcgggggcggtcggaaggggggggtcggggtcggtcgggttttacgtagtttcgtcggagagtaggcgaattgcgggcgtttacgttcggtttttatagtcgcgttagttcgcggtttagggttcgcgcgggtttcgttggtttcgcgttcgcgttaatgggcgttcgcggagttttcgtttcgttttcggttcgttttcgtaattcgagttaagagcggggcggggggtgcgggttgggggttttggggtttcgggggggggggcggcggtcgtaggggttggggggtgcgcgggggcgaggttgggtggggggtagggagtcgtagagcgttaaggttatgttgaatgttcgttttagagaatttaggggttttatttcgggtttttggggtgttcgggcggtttgtgttcgtgagttggggttttcgggtaggtaggggtaggcgggtttttagcgttttattaggaggttgtattgcgggtgcgtttcgtttgagtgtagatgtaggtggtttggggttgagtcggggggtttttgttggttgttgcggttgagggggtttttgggttcgggcggggcgcgtagtcgttatttgttttagtagaaggagtcggttacgcggcgtttggagttttagttagatttcgagcgtttttcggtgtcgcgtcggagtttcggagttttcgttaggtgcgggacgcgcggaaggtcggttgcgtcgggtcgaatttgggttaggtttggagtttacggaggtttcggtcgttagaggagagaggattagggcgggaaatatagtttaaattttatttgtatggtcgagtttatcggggtgcgtttaagtagttcgtttttgcggtttatttaaaatatttggataatggttatttcgtttttagtgcgttggatttgtatagacgcgagttcggtttcgggggttattacgataatttgggggtttggggaaattattttttggagagtttgaacgatgtaagaaagtattgtgatttttattaagttaaaaattacgtataaaatttcgtatttcgttagtttttcgtcgtttaagtttagttaaggggaaggggtcgtcggcggaatttcgcgtttttttggtttttttcgtttttttcgtttcgttattaattatttcgttcgcgtttcgcgcgcgtttttcggcggagttttaggttcgcgggttagaggtattttatcgttcggcgggagcgtttttttttcgcgtttttcgttttagttttttgttcgttttattttgggattttttagtcgttttttttacgaatgagatttttgtaatgagtaaacgaaagtggcgcggatttcggggcgtttagtaggagcgagcgtagtcgttagtcgtaagttcgtagtcgtgtttcgcgttttacgtcggttttttcggcggtagtcggagacgagcgttagtatcggcgggatagtagtagatgcgggtcgagagtcggttaggggcgtagaggcggaggggatcggcgcggcggggagtttatcgcgaagttggaggttgcgttcgcgggcgtattaggagtttaggtagcgagcgatcgaacgttttgtggtaggcggtggacgttgttgaaggtgagcgagatttcggggttagtttttagtgttcgggagtaacgtttagttcgttggaagattcggggataatgtttaaatttgggggagattgggggtaatgttcggtcgtttttttggatacggggaagttttttttgtttacgttttgagggcgcgcggtcgatttaagtgtgtttgggtaacgttagagagaaattttttaaattcgagttgttttggggatttcgtaggagatagagaggttcgaaattagtgttcgttgtgcgcggggttggggaagttgtagtgggtggtcggcgagtcgggaataatgtttaaattttggggaacgtaaggtagagttttttttgttttgcgggtttagcgaatgggtgttttggaggaggggatttcggggatttcgttaatgtgggaatcgtgattaatgattaaattcgagattttagaaaaatagattataggtttgggggatgagagaagttgttttatgtaattgggaatatagagaaagaggttttaaataggggttagttagtttgggggattaatttgtgaggaggggtagttaaagaaaattttttatatgaaattgggaattttgtcgtagagttatattacgtaaaattggtagatgaaagtaaggaatatattttggggatttaaatatatttttggtgtgttagggggaagttgagattaatttttatattttaagaatataagttagtggtttggacgttggtagtagtcggggaaaaaataatttttataattattgtggttttagggaaaggttttaatattttttagagatggaagaaagtattgtttagattttgggggagtttggagtgtgattagtatatttggggaaagtaaaataaaaaataaaaaaatataaaattagtattatttttttatgttaatttttaaatgatttttattagtttatttttggtaaataagaaaaagattatatatttttttggatgtcgtttgtatttgggggagttttagtgaaatatattttaagtttttgggatatatggaaattatttaatggagatttgatatttaaatttttggaaatttagttagtagttaggaaatttataggtcgtaggtttttttatgtttgggattttttgggatttagggatattttttagtgtgttttgggggtttatggaatattttttaaatgtagggggatttagggtagggattataaagttaggagatttataaattagtattaaaaaaaaaaaaaattttaattgttttgtgaagggaaaaaaattttaatttgttttggaaggttgggagataatatcgtaatttgggggttttaggaaaatcgtttttgaatttaaagatttagggaagttgtttagagtttttggaggatttgggggtttatatgtatattttaaagaaaggggatttagaatttttaggttttaggatttaggaatttttagattttgtgatagggagtgtgtagtgtgtttgaaggaaatattgtttaattttgagatgatttagtgggttgtttggagtttaagaaattagtgttgttttgtgattcgagggtaatgttgaatgtttttagagggtttggagggtagcgtttagaatatttaagtatgggggattaggaaaagggtttagtgtgattttggtcgttggggttttagattaatgtttgaattttagaaaagtaagatttttgttatgaagtttttgggatttagagaattgtttaatagttaatatgttgtgatgtagagaaagtgttcggaatgtttgggaattggggtcgttagtaatatttggtataatagaaataaaagtaggttttgtttaaggggtttttttgtgtttggtgtagtttagagggattcgggagattttgtgtgatttggggggatttggagaattttgggttatatttgagtattttttggtaattgtttagtgtgttttagggatttgggtggtattgtttatattttaagggatttgattcgtggttaggtagtatatagagttatagacgttaatgttttaaagttttgtgatttatatatttataatatttttaatagttttggggaattattggggaaatttttttattttatgaaatttagataattagagggtaggtcgtttatgatttagaaaaggatttaatatgttttgggtgtaatgatcgaatttgggggaaggtatgggaagtaatttttatattttgagggttttaattttttagttttgttgagtgttatgagggatttgggatttaacgtgtaaagtttagggaatttaggttagtgtgaatagatttgcgggatttaatagtaaatgttttatgttgaggtgaacgggaaggggcgcgggggtggggtgggggggcgcggaatggggcggacgtgtgcgggaaatagtaagtttaggagattttggagttaatatttaaaattatgcgggaaagttttatttgttttggaaataatgtttaaatgtggaaaaggtattgtttatattttggggagttaggtaaattggttagcgcgattattacggattaagggtttcgtttttaaaattagggaattcgggttagtggtttgtaaatttgtgggatttggagggggtgtataaaattgtttagagtttgggagaaagtatatttggggttttaggttatatagtgtaagtttggaaaagttcgtcgggattgatgtgttttgacgttttcggaaattaacgtttaagaaaattattgtgattcgtcgaaatggtgaatatatttagaa

SEQ ID NO: 967 - DNA, 6297 bp, Artificial Sequence
  chemically treated genomic DNA (Homo sapiens)
atattttatgagtttaggatttagtatagtttttggttaaaagtagtttttttttatttttatgtgatttttgtttaagtaaaaggttttgtatagtaaatatagtttttgtattttattatggttttgtatttgttgttttttgtgtttataatgttttttttttaaattttttttatttttttagatttatttaaaagtaattttttttatgatgagattttttttttaatttttattttgaaaaatgttaaatttatagaaaagttgaaagaatagtataagagtattgatatattttttattatatttgtgattgttaatatttttaatttttgtttgttatttatatatatatttttttttttttttgaaattatttgaaagttgttaatattatgatattttatttttagtatgtattatataagaataagtatatcgttttatgtaattatagtagttttattttatgaaatttaatattgatttaatattatttattgtatatttttttttggtagtttatgattttagaaattaagaagtttaaaatgaattattgtgtgttttgagggttttttggtagaattatgtttttttttgggtgttttaaaaagtttttggatttttggggtgagattttgtttgagttttagaataatgtgtgtatgttattagtttgatagtttatggtttgtgttttaaaggggtagttattagtgttatttgtttttgttattgtttttgatattatgtagggatatttttagtagttgttttttttgtttttggtttgttatttgagtttgtgtttttaaagttagatgtaggaagattgggtttttataatagggcggtggttggagtatttggatgttaagtttggatttgttttattatttgagggatatttgtgtttttggttatttgtgtttttaggttgttataataaagtatttttgggtggtttaaaatgatagaaattgttttatatagttttggaggtcggaagtttaaaattaaggtattggtagggttacgttttttttgaaggttttaggggagaatttgttttatgtttttgttttagtttttggtgttgttggtaatttttggtgttttttggtttgtagatgtatagtatttttatttttatatggttgttttttttttgtgtgttttttgtttattttttgaaagtatattagttatattggattaagaatttattttattttagtataattttattataatttatttataaggaatgattttatttttaaataaggttatatttgaagtattgggggttatgagtttaacgtatttttttaggggatataatttagtttataatagggggttttaggttgatatttgtgagtttttgtttttttaaaggttttttagaaaatttaaatgaaatataggagaattatgttttgtagtatttgattttatagtaggagttttttaatttttcgggttatggatttgtattggtttgtggtttgttaggaatttggtcgtatagtaggagaacgagggtattatcgttgagtttcgttttttgttagataagtggtggtgtaaattttattgtgtatgagaggggtttagggtggattgtttttgtgatgtttgatgaaatattttttataatagttttttattatttatggaaaaattgttttttacgaaattggtgtttggtgttaaaaggttggggattgttgttttaaagttttttatataggatttatattaaaaattttttagtggtttttaaatgttttttatatttttttatttttgggtttaggttttaagtaagaattacgtattgtattttgttatgtttttttagttttttttaatttaggataatggtttttaaatttttatgtgtatgagaattttttggagagtttgttagagtaattttttggtgttaaatttttacgtttatgagaattttttggagagtttgttagagtaattttttggtgttaaatttttacgtgtatgagaattttttggagagtttgttagagtaatttttcggtgttaaatttttatgtgtatgagaattttttggagagtttgttagagtaattttttggtgtttatttttagagatttttatttaataggttgaggtaggatttatgaaatggtatttttaataagttggtaggtgatataaaagttgtttgtttaaggatcgtatttttgaaaattattgatttagaatagaggttggtaagttttttttgcggagggttatatggtaaaatatgttagtatttttaggttatatagtttttgttgtaacgatttaattgtgttattgtaggtaaaagtagttttagataatatataaatatatgggtgtggtcgtatttttataaaattttatttataaaatagttgttttattatatttgatttataggttattgtttgttatatggatttagagtagtatttttattttttttttttttttttttttggaggagagttgtttttttagcgtattaatattttgtaatagtttagtttagtttttttgttatatgttttatagtttgaatttgattgttttattttaattagattaagttgaattttttggtaagattatttgtgatagtgtgtacggtagggaataattgtgaaagattttgaaatggattaaaaatattagtggttaattgtaatggaatgttagttgtttagtatagttttttgggttatttgattttatggggttttgtgtttgttattgtttttgaggtattttataattttgtaaattgtagattattgatggtaatatatacgatttttgtttttagaaatgtaaattgtgtttattgcgtacgtagttgttttttgatttatggttattgattaattttttatttatagataattttattttagtatttttaattgtttgaatatttgttggattttttttggatttttttttgaattagttgtgatatgttatcggtttttatattaatgaatgagttaaggaatatttttgatatatgtttattttatatttgagttatgattatattattttttaaatattattttttagtattttttattgtattattttagaaagtagaaaatgttagttttttaaaaattggtgatattagttttaattatttgattaaggtggttttattagatttttttattgtgaagaggtattttgtgttttttaaggaagtatattttgaaggtgatattttgagataaagagaatatttcgttttataataattttttattagatggttttagtatttattgatggtttttgtttgtatttattataatattggagttgtaaaatataaattttttttttttttttttttttttgagatggaatttcgttttgttttttaggttggagtgtagtggtacgatttttgtttattgtaatttttgttttttgggtttaagcgatttttttgttttagtttttcgagtagttgggattataggcgtgtgttattacgttcggttaattttttgtatttttagtagagatgggattttattgtgttagttaggatggtttcgattttttgattttgtgattcgttcgttttggttttttaaagtgttgggtttatagtcgcgagttatcgcgttcggttattataaattttttttcgacgtttatagtttatatttgagttttttttttgatttattataatattttttttttttgggtaatatattaatagtacggtggttatgttataggtttgtgattggtttgggtttaaattcgggtttttttatttattagttgtaagattaattagttatttaatttttttattttttattttttttatttgtaaaacggatgtaataaaggtatttttttttataggattgttaggattaaatgagttaaattatagtgttcgaatattttagtatttcgtatataattatttgtttaagaaatgttagttattattgggttatgattatttatatgtgtttgaattttagttttgttatattttagagtgtttttgagtaagttattgagtatttttgtgttttaattttttatttataagtaggtttttattttataggtttttaaagatttatgtttatatgtttagtagtgtttggtatggaataagtattaaaaaagatgagtttttatgatgatgatgattattatttttagttatgattattttgtatatttattttaaaagaaagtgaatttttttagtttaagatttttagatttatcgttttatttttattgtggttagtttatggttatttacgtagtgaattaataaagttttgttgagtggtatttgtttgatagcgatatttttgtttatttttttattttgttggatttgtgttgttttttttgttgtaggaagtttacgtttgggaaataatatttttatagaaggtttgagaggttttgacgggttaaggttgtaaatttttatgatttgattttacgggtagttaaagtgtgtttttattttttacggattcgttgttattaggttgtgcgaaggtatttatttttttggtattttgatttaagttttttatttttttttattggtcgatcgaggttgggaatagttgttttaatttgggaagtattcgttacgatttagtagggcgcggtgggaggggaaattgaggttcggttaggtattttcgtcgcgtttagttcgtcgagaggtttaggtttcgggaggtatttggagtttgcgtttcgttcgcgtcgttttttgtttcgcgcgttgcgtttacgtgattcgggtttgggaggagtcggggcgggcgggggttatttgaataagggagttacgtgagcggggggcgggggtgggggggcggtgtcgggcggttgttacgtgacgcggtttcggggtcgtcgttgtcgttgtcgttgtcgtcgagtttagtcgagtcgcgtttatttcgggttttcgtttcgtttttattttcgtttttgttttggcggcgcgatttcgtttcgggcgcggtttttagtagtcgcgcgtcgttagtttcgcgttcgtcgcgtagttcgggttcggcgcgatgggggtcgtcgtcggtcggagtttttatttggggttcgcgttcgttcgtcgttcgtagcgttttttgtttttgttgtagttgttgttgttcgtcgttgtttcggggtttacgtaggtttaggtcgtttcgtttttcgagttgtgtaggtgggtggttcgttcggacgtaggtttcgttcgcggtgttcggggtgagcggtcggcgtggggggcggggagcgttcgaggagtttttggggtttttaagtcgttttcgtttcgcgtcggggttcgtttcgttttcgagggaaagttgtttgcgtggtgttcgcgagtttcgtcgggtttcgtgcgtaggcggggggcgcgggggtatacgcggtcgtggcggttttggagtttcgcgttcggttatttgtggttgtcgttgagtcgggggtggttttgtgcggagcggtcgtttcggtttttggggtcggcgtttgttttcgcgcggtcgggcgttcgggaaagttggaggtaggaattttagtttgttttgttttcgttgcgcgtttgtattagagtttcgttagcggggtatcggtgaggtttttcggtgtggagaggtttatcggggcgttggagttcgtaggaatggttttggagttgagtgtttgtggttttatttgttgattgattttttttcgtgggtttattttttttttaaagaatatatatatatatatatttttagtaggcggtgatttttgttttttttagattgggggtagggggtgtcgtttagtgtgagtttttaagatttgattttttatttttttgagtttaattttttgtttggttgtttatatgatgttattgttttcggggcggattattttagtggattttgttttgggaattatgattgtataatttattagttttatcgagggttgtttatttcgcgtaattgttagtagtttagggtttggggaatttcgaattttaggaattttttgattatttttttttggattgtttaggatgatggaaaatttagtttttgtttatttttttaaattttggtaaaaaggaagtaggatgaaaagttttgaatagataatagtttttttttgttattgttatttttataagttatttttataagttattttttagagtgaaa

SEQ ID NO: 968 - DNA, 6297 bp, Artificial Sequence
  chemically treated genomic DNA (Homo sapiens)
ttttattttgaaaagtaatttgtaaaagtaatttgtaaaagtaatagtaatagggagaaattgttgtttgtttaaaattttttattttgttttttttttattaaagtttaaaaaaataaataaaagttgaattttttattattttaaatagtttagaaaaggatggttagaaaatttttgaaattcgaagttttttaggttttggattgttagtagttgcgcgaggtgaatagttttcgatgggattgatgggttatataattatggtttttagagtaagatttattagaataattcgtttcggagataatgatattatgtgagtaattaggtaggaagttgggtttagagaagtgaagggttaagttttgaaagtttatattggacgatattttttgtttttaatttaaagaagataaaagttatcgtttgttaaaaatatatatatatatatattttttaaagagaaaatgagtttacggggggaaattaattagtaaatgaaattataaatatttaattttaggattatttttgcgggttttaacgtttcggtgagtttttttatatcgaggggttttatcggtgtttcgttggcgaaattttgatgtaaacgcgtagcgggaataaagtaaattggagtttttgtttttaattttttcggacgttcggtcgcgcgagggtaggcgtcgattttaagggtcggggcgatcgtttcgtataaagttattttcgatttagcgatagttataagtggtcggacgcggggttttaggatcgttacgatcgcgtgtgttttcgcgtttttcgtttgcgtacgggattcggcgggattcgcggatattacgtaggtaattttttttcgggaacggggcggatttcggcgcggaacggaggcgatttggagattttaggagtttttcgagcgtttttcgttttttacgtcggtcgtttatttcgggtatcgcgagcggagtttgcgttcgggcgggttatttatttgtatagttcggggaacggggcggtttgggtttgcgtggatttcggggtagcgacgagtagtagtagttgtagtaggagtagagagcgttgcgggcggcgggcgggcgcgggttttaggtgggggtttcggtcggcggcggtttttatcgcgtcgggttcggattgcgcggcgggcgcgaggttaacggcgcgcgattgttgggggtcgcgttcgggacggggtcgcgtcgttagggtaaaggcggaggtggagacggagcgggagttcgaggtgagcgcggttcgattgggttcggcgatagcgatagcggtagcggcggtttcggaatcgcgttacgtgatagtcgttcggtatcgtttttttattttcgtttttcgtttacgtgatttttttgtttaggtgattttcgttcgtttcggttttttttaggttcgggttacgtgagcgtagcgcgcgggataggaagcggcgcgggcggggcgtaggttttaggtgtttttcggggtttgagtttttcggcgggttgggcgcggcgggggtgtttagtcgggttttagtttttttttttatcgcgttttgttggatcgtggcgggtgttttttaggttagagtaattgtttttaatttcgatcgattagtaggggaaaatagggaatttggattaaagtgttagggaggtaaatgttttcgtatagtttagtggtagcggattcgtggggggtgggaatatattttaattgttcgtggagttaaattatgggggtttataattttggttcgttagagttttttagattttttgtgggaatgttattttttaagcgtgggttttttatagtaaggaaggtagtataaatttagtaaggtgaaagagtggataaaagtgtcgttgttaagtaagtgttatttaataaagttttattaatttattacgtggatggttatgagttagttataatgaaagtagaacgatgaatttaaaagttttgaattaaaaaaatttatttttttttagagtaaatatataaaataattatgattgaaaatagtaattattattattataaaagtttattttttttagtgtttattttatattagatattgttaagtatgtaagtatgaatttttaaaaatttatgagatgggaatttatttatagatgaggaattgaggtataaggatatttagtgatttatttaaagatattttgggatgtggtaaagttggaatttaaatatatataaataattatgatttaataatagttaatattttttgagtaagtaattatgtacgaagtattgaagtgttcggatattgtgatttagtttatttaattttaatagttttgtaagagggggtgtttttattgtattcgttttgtagataaggaaagtgaggaatggagaaattaaataattagttagttttgtagttagtaagtgaaaaagttcgggtttgagtttaagttagttataggtttgtgatataattatcgtgttattaatatattgtttaagaaaagaaagtgttgtagtgggttaaagggagagtttaggtgtaaattgtggacgtcgaaaaagggtttgtggtgatcgggcgcggtggttcgcgattgtaaatttagtattttgggaggttaaggcgggcggattataaggttaggagatcgagattattttggttaatatagtgaaattttatttttattaaaaatataaaaaattaatcgggcgtggtggtatacgtttgtagttttagttattcgggaggttgaggtaggagaatcgtttgaatttaggaggtagaggttgtagtgagtagagatcgtgttattgtattttagtttgggaaatagagcgagattttattttaaaaaaaaaaaaaaagaaaaagggtttgtgttttgtaattttagtgttataatggatataggtaaagattattagtaaatattaaaattatttggtgaaaaattattgtgaagcggaatattttttttgttttaaagtattatttttaaagtatatttttttaaaaaatataaaatatttttttataatggaaagatttggtagaattattttaattaagtaattaaaattagtattattaatttttaaaaaattagtattttttgttttttaaagtgatgtaataaaaaatgttaaagggtaatatttaaaagatggtataattatgatttagatgtagaatgaatatgtattaaaggtattttttagtttatttattaatgtgagaatcggtaatatgttatagttggtttaaaggaaaatttaaggagaatttaataaatatttaagtagttaggaatgttgaaataaggttgtttatagatggaaaattggttagtaattataggttaaaaaatagttgcgtacgtaatagatataatttgtatttttaaagataaaaatcgtgtatattattattagtagtttataatttatagagttgtaaaatattttaaagatagtggtagatataagattttatagaattagataatttaaaagattgtattaaatagttagtattttattatagttgattattaatatttttggtttattttaaagttttttatagttattttttatcgtatatattattataagtagttttgttaagaagtttaatttaatttaattgagataaaataattaaatttaaattgtgaaatatatgataagaaaattgaattggattattgtaaaatattaatgcgttgaaaaaataatttttttttaaaaaaaaaaagagaaaaaaagtggaagtgttattttaaatttatgtagtaagtaataatttgtgggttaaatgtggtaaggtagttgttttgtaaataaagttttgtgggaatacggttatatttatgtgtttatgtattatttagggttgtttttgtttgtaatgatatagttgagtcgttgtaatagagattgtatgatttgaaaatgttaatatattttattatatggtttttcgtagaaaaagtttgttaatttttgttttagattagtggtttttaaaagtgcggtttttagataagtaatttttgtgttatttattagtttgttagaaatgttattttatgggttttgttttaatttattgaatgaaaatttttggagatgggtattaggagattgttttagtaagttttttaggagatttttatatatatggaagtttggtatcgggagattgttttagtaagttttttaggagatttttatatacgtggaagtttggtattaggagattgttttagtaagttttttaggagatttttataaacgtggaagtttggtattaggagattgttttagtaagttttttaggagatttttatatatatggaagtttgagaattattgttttaaattaaaggagattaaaaaggtatgataaaatgtaatgcgtgatttttatttggagtttagatttaaaaataggaaggtataagggatatttggagattattggaaaatttttaatgtaaattttatataagggattttaaagtagtagtttttaattttttggtattaggtattaatttcgtggaagataatttttttatggatggtggagggttgttgtgggggatgttttattaggtattataaggatagtttattttagattttttttatgtataatagggtttgtattattatttatttgataggaggcggagtttagcggtaatgttttcgtttttttgttgtgcggttaggtttttaataggttatagattagtataagtttatggttcggagggttgggggatttttgttgtaaagttaaatattgtagggtataatttttttgtattttatttaaattttttgaaaaatttttgaggaagtagagatttatagatattagtttaagattttttgttataggttgaattgtgttttttaaaagaatacgttgaatttataatttttagtattttaagtgtgattttatttgaaaatagggttattttttatggataaattatgatgaggttatattagagtagggtgggtttttaatttagtatgattggtgtatttttaagaagtgggtaagaaatatataaggagaaggtagttatatgagaatggaggtgttatgtatttataagttaaggaatattaaggattgttagtaatattagaagttgggataaaggtatggaatagatttttttttagagtttttagagggagcgtgattttgttaatgttttggttttggattttcggtttttagaattgtgtgagataatttttgttattttaagttatttagaggtattttgttatggtagtttaagaatataaatagttaagaatataaatgttttttaaatgataggatagatttaggtttggtatttaggtgttttaattatcgttttgttgtgaggatttaatttttttgtatttgattttggaaatataagtttaaatgatagattaagggtagaaagagtagttattgaggatgtttttgtatgatgttaagagtaatagtagggataggtaatattaatagttgtttttttggaatataaattatgagttattaaattgatggtatgtatatattgttttgaaatttaaatagaattttattttaaagatttaggaattttttagaatatttagaaaggaatatgattttattaaaagatttttaaaatatatagtgatttattttaggttttttgatttttaagattataaattgttaagaaaaaatgtatagtaaataatattgaattaatgttaaattttataagataaagttattgtgattatataggacgatgtgtttgtttttatgtgatatatgttgaaagtgaagtgttatgatgttggtaatttttaaatgattttaggggaaaaaaagaatatatgtatgaatagtaagtagaggttaaaaatattaatagttataaatgtagtgaagaatatattagtgtttttgtattatttttttaatttttttataggtttgatattttttaaaatgagaattgggaaagagattttattatgaaagagattgtttttgagtgaatttggaagaatgggggaaatttagggaaaggatattgtaggtataaagaatagtaagtgtaaggttatggtaaaatatagaagttgtatttgttgtataaggttttttgtttaagtaaaagttatatgggaataaagaaaaattatttttggttaaaaattgtgttagattttgggtttataaaatat

SEQ ID NO: 969 - DNA, 7061 bp, Artificial Sequence
  chemically treated genomic DNA (Homo sapiens)
ttgaggttagaatggtttttaatttttgggtggttaaaggtttattagagtcgatgacgatttttaaagattatacggaagtatatagttgtgtagttggttttagggagttcgaggggttttgagttacggtatggatttcgtttatggttttttgattttttttatttgtttttaatttttttttttattagttttggttattatgtgggttattttatttgaagtattattttatatttttttttttgatgttttttttttttttttatgtattaattataagttgtagtgtatttgttaaagtatttgtttattatttttttttttttatatttttgagggtggggttttgttttttttatggttgatttttagtttttgggtgtttggttggtgtttagaaggggtgtaggaatgaggggtttttaggcgtcggttttttttttggtgattttttagaatcgattttttttttttttttttttttttttttttttttttttttttttttttttttttttttttttttttttttttttttttttttttttttttttttttatttttttttttttttttttttttttattttttttttttttttttttttttttttttttttttttttgagatagggttttattttgttatcgaggttggagtatagtggtgtgattataatttattgtagttttaaatttttgggtttaagtgatttttttattttagttttttgaatagttagattatagttatatattattatgtttggttaattatttttatttttatagagatagggttatgttttgttatttaggttggttttaaatttttggttttaaacgatttttttacgttagttttttagtgttggaattataggcgtgagttattttgtttgatttagaattttttttttaaggatatttatttttttagtttgtttatatttttgtggtggtggtttgttgttttaatgaggagtttaaatttttttgtatagtttttaggtttttttgtgtttggttttttgtttgtttttttgttattttttgtttgttattttagtttttagtaggaagaattattggtttttttttgaatatattgtattttttttagttgtttgttgttattttattattatttttatttttttatattgtatattttatttttttgttgtttgggggaaggttatttattttttaagattagttatggttagtagtttatggagacgtatttagatataaatagatttgttgtttttttttattttatttattttaagggttaggttgtaagtagttcgtttttgatagattatttttttgttagatgggggtaagattgtggtttagtgtagggtattttattattttttttttttatatttagtttagtatttgttttatattggaagggtattttttttttattttattgcggttattgttgggtgagggaaagaatgtagatagaagtttgggagtttgagatggagaagttggaaggaagagtaatttattttgagggggtagtcgtaggaggtgggggatattaggatagagttttgtaagaaagagttttcgggatggatggaagagattatggatttgataagtatgatagggtgatggaagtttaggtattgagaatagtaagattagagttatggggttagggttaggttaattgaggttgaggtgtagtaggttcggagattttttttttagggtttattttgtattttttagagttgagagatgtatttttttttatgttttttttgggtatttttttagtttttttagttagttgtgagttagagtattgggattattaaaggtaggttaggttgtgatttttgttagggggtagtggggtttggggatttatgaatgtttttagaaatggttgtgtgagtagttatattatcggttgtgattttaatttgttagggtagggtcgtttatttttatataggatggacggatggatagtcggtttatataggtttgtagggaggggtttggttttatttgtgttgatagagggttaggagtaggaggagagtttttttttgatttgggggttgtttggtttgttgttgttatgaagtaagtaaggaaaatatttgggaaatcgatttttgaggggaggaatttttattatatgtaggataagtgagattttagggaggatgggtgggacgaatgttgagtaagtgtataattatttagggcggagtatattgtttggtatatagtaggtggtttttagatatttattaaagaattgttttttttatgtgttttattaagaaaatattttagttgtgggtattgattgtaagttgaggaagttagagagaaaatatagagtatatattttttttttggaaattaaattgtttaggtatttattttaaaaataatgttaaaaaatttaaaatcgttggttagtttttttattaaatattaaattttgttttgtaaagaaataatgataaataattataaatttttaattgtagtgattttattgttttattttgatttttgtaggagacgttggggttattattttttggagattttagaggtagaataaaagttagtttggtaaatttaagttatttttcgaaggttatagaaataggaaagtggtgagaaaaggaggtcgttagttaattttaatttggttatttttttatttttattttttgagttagagtttcgtttttgttttttaggttggagtgtaatggtatgattttggtttattgtaatttttgttttttgggtttaagcgatttttttgttttagttttttgagtagttgggattgtaggtgattgatattatgtttggataatttttgtatttttagtagagatggggttttgttatgttggttagtttggtttcgaatttttgatttttggtgattcgtttattttggttttttaaagtgttgggattataggtatgagttattgagtttggttttttggttattttttagattgataatgtaatagatagtgtaaatatatttataaatttagaaggttaagaaagggtatgtaaggaaaatcggtttgttttttagttatattttttattattatttataagaaggtattgttattaatttatgtattttttttaaaatatttaataaatgtagaattagttgtatatatttattttgtttttattgtatataaatagtattatattttgtatttttttatttgtatttagttaggagattttattttagttgaattattttatttttagagatttttttttataagaaaattagagttgtttttttttgttgatagttgtttattttttagtggaaggatgttttaggatttatgtatttagtatttagagatgggtatttaggttatttgtagtatggtttttagatagggattggttcgcgtatttttttatataagtttaaaatgattttttacgtttgttttattatttgtaggataaatagttgagggtggtattgttagtatagattattttatttttagttttagaattttagggtagttattatttttatttgtttttatattttttttgaagggagtagtagggattatttttttgaatgtaagaatgattgttatttgaggtgatttagtaatgttttattgttttagagtgttttagttagattatagagaaaggtatttatttagggtttgtttatagtaaataggattgtatgggtattagaaatgtgaatttttgtttaggatttatcgttatagtttttgtgattttgatttggtaatagttttttttttttggttttagtgtttttttttataaagtaaggggttggataagttatttttagttttttagtttggtaatattatttttaaaggatttgaagggataataggaggtttaggtttggaggtagggtagttttgagtttgtgtttagaatgggaggtaaagatggtggtaggtgggtgggaaaatgtggggtttgggggttataggagagattaaggggtaggtttggagtatggtacgttttttgattatagttttttattggaaggttatggagggagtgatggggagagtttgtaatttttggagataagtttgattttgattttttttgaaggatttttttttttcgattttttttttgtgaaagagaatattcgagaaatgagaattttaattaaagagaaaatttttgtatttgttattgataaatatttggtttatgcgggaaagttatgggtgttttgggattttggttttattgttaataagattttgttagatttttttaattgtttttttagagaggagaaaggtttttggaggtagagtgagattggggagtttggtagagttttaggatgaattgtgtttttgttttgttttgttgtaggttggagttttttttttgtagaaagagaagtaatttcgggtttttttatagataatttgttagggttcgtagagatttggattttaattttatttcgtttttttttatttggggtattgttttttgcgtttgagaattgttgggtgggttggtgttatttaggatttttaaatttttgtaggagacgttttgtaggagatttttagggtttttttttgtgttaattaaagagtttggttagttggatttgggttgtttttttgataaaaataaacgttattttttttttagttgagtatttgttagaattggattttaattgagggtttgaattttttaataacgggataaatagtatgaaattaaaatcgtttattttttttttattagcggtttgcgtagggttttgggtgtattagtaaaataaatttattttgaatatttagtttttagcgtgcggcgttgttaattattaattttttggtgtaagtggcgcggtttgtgttttttataaggtgcgcgttgtgtttagcgagtatcggttatcgttattttatttagcgagtatttgtcgtcgcgtcgtcgttatttttttagagagtattggttatcgttttattattatttgtttagagtttgggttatcgttcgtcgttattagtttagagagtatcggtttttgtttgttgttcgcgtttggagatgttagaggttttcgttgttcgcgtttggttggtattgtttttgttgattgtttaggtcggcgtgatagtcggcgtttcgtggtagtgcgcgttttgtttcgtcgagaagttcgcgttttgttcgtcggtgttcgtttcgtgttcggaggttattcggttcgtcggttgcggttgttgttcgatgtgcgttttgtttttgggcgtcgcgtgcggcgtggcgattgtacgttgcgttcggggatttagttgtcgcgcgttgtcgggggagtagtaatttttgtacgtttttattcgcggttaaggcgtttgcgtgtaggagtttgacgttttcgttttttatgttgtaggtattatagtttcgtttttgttttagtattttttgtcgttcgttttcgttcggtatttttcgtttttatttttttaattattgggtggggttgtagtcgggtaggggtttgtttataattagagtttgaaattagagtacgtagttggggaaggagtttgggttatttagtggagttcgtttattgtacggttttggtaggacgtgttttgggagaagaaggaagatgttttagggtatatatagtttagtggagatttaaggaggaagtttttatttggttttcgtagtttagagatttttagagatttagatagtaagagtagagggaggcggtggggttgttttcgtagttgggatgttattttgggttttttattagtttttttgttagtacgtgggtagttttagtggttggagtattcgggaaggtttaagaagggaattttttttgttggtttttttaggaggtgtttggaatgttttttgtaatatacgttttggatatagtatgtgttttttagatgtttatagaatataatgtgagagttgaggttaaaagttttatttttatttattgttatagaaaaataatgtttgatgtgtatgttgttttttaagaatatgataattaggtttttttttggatttaagtaggtatttgtttgtagcgggaagtggaggaaatgtttttttttttattttagtttttatttttttatttggattgtttgtacgttttgttttgtgttatttttggaggaattaggatttttatattttgatagggtgttagagtgagtgtgtgagagttagtgatttttttaaggagggaatagggattttttgcggattttttgttttttagaggaaatgaaagggagtcgttttattgatttttaaggagatggatttttatagggggttttttataggttagtgtgttgattttgtttatgtatttttggattttatttgtaagatttttttgttatgggggtggagggggtgttgtagagaagtttattaggacgtgggaaggtaggggttttaaaatagaagagggtagtagtttgggttaggagagttgtattttagattttatttttagatgaattgtattatttatttagggatattagtaaaatttttattttaaggatggagaagttgaggtttcgaggttttttattaatgcggttaggaattgaattttaattttggtttttttagggttgtttttaattttagtaaatgtatttgttgttttgtttttttgttgttttaaaagtagaaacgtggggtatttttgttaggttttgaaatttattattgttaggaatagagttggtatgttgttgggatataattttttttggaaattattataaggttttttatagtgagagttagtgaaaattaggttagggaatgtggttatttttatggtttagtttggttttgagggaaggaagtgattttttgggggttcgaaaggggtagatgttttgggagggtttatggggtttgtaatgttttttttttaga

SEQ ID NO: 970 - DNA, 7061 bp, Artificial Sequence
  chemically treated genomic DNA (Homo sapiens)
tttggaaaggaaatattgtagattttatgagtttttttaaagtatttgtttttttcgggtttttaggagattattttttttttttaaaattaggttgggttatgaggatggttatattttttaatttgatttttattgatttttattgtaaaggattttgtaatggtttttaggaagagttatgttttaatagtatgttagttttgtttttgataatagtaagttttagggtttggtaagggtgttttacgtttttgtttttaaagtagtaggggagtagagtaataaatgtatttgttgaggttgagaataattttaaagaagttaggattagagtttagtttttaatcgtattagtagggagtttcgaaattttagtttttttatttttaaaatggggattttattaatatttttgaatggatggtatagtttatttagaagtggagtttagaatgtagtttttttgatttaaattattatttttttttattttggggtttttgtttttttacgttttaatggatttttttgtaatattttttttatttttatggtaagaggattttgtagatagagtttaaaggtatatgaatagaattagtatattggtttataagggattttttgtggaaatttatttttttgaggattagtgagacgatttttttttattttttttgaagggtagagaattcgtaggaaatttttgttttttttttggaagggttattgatttttatatatttattttaatattttattagggtatggaagttttaatttttttaagaatggtataggataggacgtgtaagtagtttagatgaggagataggggttggagtagagaaagaggtattttttttatttttcgttataaataaatgtttgtttaaatttaggaaagaatttgattgttatgtttttagggggtaatatatatattaaatattgtttttttatggtaatgaatggaagtgaagtttttagttttaatttttatattatgttttgtaaatatttgggaagtatatattgtatttaggacgtatattataaaggatattttaaatattttttggggaggttagtaggagggattttttttttaggttttttcggatgttttagttattggggttgtttacgtgttggtaaggagattggtgggggatttagggtggtattttaattgcggaggtagttttatcgtttttttttatttttgttgtttgggtttttaaagatttttgggttacgagggttaagtgggagttttttttttgagtttttattaagttatgtgtgttttggaatattttttttttttttttagagtacgttttgttaagatcgtgtaatgagcgggttttattgggtgatttaagttttttttttaattacgtgttttggttttaagttttagttgtggataagtttttgttcggttgtagttttatttagtagttaggggagtgggggcgggaggtgtcgggcgggggcgggcggtaggaggtgttggagtaggggcgggattgtggtatttgtagtatggggagcggaggcgttagatttttgtacgtaggcgttttggtcgcgggtgagggcgtgtagaggttgttgttttttcggtagcgcgcggtaattgagttttcgggcgtagcgtgtagtcgttacgtcgtacgcggcgtttagaggtagggcgtatatcgggtaatagtcgtagtcggcggatcgggtgattttcgagtacgaggcggatatcggcgggtagagcgcgagtttttcggcggagtagggcgcgtattgttacggagcgtcggttgttacgtcgatttggatagttagtaggagtagtattagttagacgcgagtaacggggatttttgatatttttaggcgcgagtagtagataggggtcgatgttttttgggttggtggcggcgggcggtggtttaaattttgggtaagtgatggtggagcggtggttagtgttttttgggagggtggcggcggcgcggcggtagatgttcgttggatgggatggcggtggtcgatgttcgttggatatagcgcgtattttataaagggtataggtcgcgttatttgtattaggaggttaatgattggtagcgtcgtacgttaggagttgagtgtttaaaataagtttgttttgttagtgtatttaaggttttacgtaaatcgttggtgggaggagggtaaacggttttgattttatattgtttgtttcgttgttagggggtttaggtttttagttaaagtttagttttaataagtgtttagttgggagggggatgacgtttgtttttgttaaaaagatagtttaggtttagttggttaggttttttaattgatatagaaaaaagttttagagattttttgtaaagcgttttttgtaaaaatttaaaaattttgggtaatattagtttatttagtagtttttaaacgtagaaaataatgttttaggtgaggaaaggcgagatggggttagaatttaggtttttgcgagttttagtaggttatttgtggaaaagttcggaattgtttttttttttgtaggaaaaaggttttaatttgtaataaaataaaataaaaatatagtttattttagggttttgttaagttttttaattttattttatttttaagagttttttttttttttggaggggtagttaagaaggtttaataaggttttgttagtagtggagttagaattttagggtatttatgattttttcgtataggttagatatttattagtagtaaatgtaaaggttttttttttagttaaaatttttatttttcggatatttttttttataggaaagaagtcgaaagaaaaaaattttttaaagaaagttagaattaggtttatttttaggagttgtaggttttttttattattttttttatggttttttagtggagagttgtgattagggagcgtgttatgttttaggtttgttttttggttttttttgtgatttttaaattttatatttttttatttatttgttattatttttgttttttattttaggtataggtttagggttattttatttttaggtttgggttttttgttgtttttttagattttttaggagtggtgttgttaaattgggaaattggagatggtttgtttagttttttgttttatagaggagaatattgaggttagagaaggaaggttattgttaggttaaagttatagaggttataacggtggattttgaataagaatttatatttttgatgtttatatagttttgtttattgtaagtaagttttaagtaaatgtttttttttgtaatttggttaaaatattttaaaatagtagagtattgttgaattattttaagtgatagttatttttatatttaaggaaatgatttttgttgttttttttagggaaggtgtaagggtaggtgaaaataataattattttgaaattttgaagttggaggtagaatggtttgtgttaataatgttatttttagttgtttattttatagatgatgagatagacgtgagagattattttaaatttatgtgaaaaaatacgcgaattaatttttatttggaagttatattgtaagtaatttaaatgtttatttttaggtgttggatatataaattttggggtatttttttattggaagatagatagttattaataagaaagagtaattttgatttttttatagagaaaaatttttaaaagtaaagtgatttaattgaagtaaaattttttagttaagtataaatgagaaagtatagagtgtggtattgtttgtgtataataaaagtaagatgaatgtatgtaattgattttatatttattgaatgttttgggaggaatatataaattgatagtaatgtttttttgtgggtggtggtgaaaaatgtgattgagggatagatcggttttttttgtatatttttttttaattttttgaatttgtagatgtatttatattgtttgttatattattaatttaaagaataattaaggggttaggtttagtggtttatgtttgtaattttaatattttgggaggttaaggtgggcggattattagagattaggaattcgagattagattgattaatatggtaaaattttatttttattaaaaatataaaaattatttaggtatggtgttagttatttgtaattttagttatttaggaggttgaggtaggagaatcgtttgaatttaggaggtagaggttgtagtgagttaagattatgttattgtattttagtttgggagataagagcgagattttgatttaaaaaataaaaataaaaaaataattaagttgaaattaattgacgattttttttttttattatttttttgtttttgtggttttcgggaagtgatttggatttgttaagttggtttttgttttatttttaaagtttttaaagagtaatggttttagcgttttttgtaaaaattaaaataaggtagtgaggttattgtagttggaagtttatgattgtttgttattatttttttatagagtagagtttggtgtttggtaaaggaattgattaacggttttgaattttttgatattatttttagggtagatgtttaagtaatttgatttttagaagaagaatgtgtgttttgtattttttttttgatttttttagtttgtaattagtgtttatagttgaaatgtttttttaatgaaatatatgaaagaggtaattttttggtaaatatttagaggttatttgttgtgtgttaggtagtgtatttcgttttggatagttgtgtatttgtttagtattcgttttatttattttttttgaggttttatttgttttgtatgtagtgaaaatttttttttttaaggatcgattttttaaatgttttttttgtttgttttatagtaatagtaaattaaatagtttttaaattaagagagagttttttttttatttttgattttttgttaatatagatggagttaagtttttttttataggtttgtgtaggtcgattgtttattcgtttattttgtgtgggagtgagcggttttgttttggtaggttggagttatagtcgatgatgtgattgtttatatagttatttttgggaatatttatgaatttttaagttttattgttttttggtaggggttatagtttggtttgtttttggtggttttagtgttttgatttatagttgattggggaggttggggaagtgtttaggggagatatgaaaggaggtgtattttttagttttgggaagtgtagggtgggttttgggagagaggttttcggatttgttgtattttagttttagttggtttgattttaattttatgattttggttttgttgtttttagtgtttgaatttttattattttattatgtttattaagtttatggttttttttatttatttcggaaatttttttttgtaggattttattttgatattttttattttttgcggttgtttttttagaatgaattgtttttttttttagtttttttattttaagtttttaagtttttgtttgtatttttttttttatttaatagtgatcgtagtggagtggaagggaggtatttttttaatgtagggtaggtattgagttaggtgtgggggaaaggagtgatgggatgttttatattgagttatagttttgtttttatttagtaggaggatggtttgttaagggcgggttatttataatttgatttttaggataagtgaggtgggaagagatagtaggtttatttgtgtttgggtacgtttttataagttgttggttatggttggttttggagggtaagtggtttttttttaagtagtaaagggatggggtgtgtaatgtgggagaatagagatgatggtgggatgatagtagatagttgggaagagtgtagtgtgtttagggaagagttagtagttttttttgttgggagttggaataataggtagggagtggtaggggagtaggtaggggattaggtataaagaggtttggaggttgtgtaaaggggtttagattttttattagggtagtaggttattattataggggtataagtaggttaagagagtggatatttttagaaaggaggttttgagttaggtaaagtggtttacgtttgtaattttaatattgagaggttgacgtgggagaatcgtttgaggttaaggatttgagattagtttgggtaataaagtatgattttgtttttgtgaaaataaaaataattagttaggtatggtggtgtatgattgtagtttagttatttaggaggttgaggtgagagggttatttaagtttaggagtttgaggttatagtgagttatgattatattattgtattttagtttcggtggtagagtgagattttgttttaagagaaagagagagaggagagaaagaaagggagaaagaatggaggaaagggaggaaggagagagatggagagaaggaaggaaggaaggaagaaagagagagaaagaaaaagaaagaaagaaaaagaaagaaaagaaaagaaagaaagaaaaagaaagaaagatcggttttggaagattattagggagggagtcggcgtttggggattttttatttttgtattttttttgagtattaattagatatttagaagttgaggattagttatgaaggaggtagagttttatttttaaagatgtagagggggaaaaatagtaaataaatattttaataaatgtattgtagtttgtgattaatgtatgaaagaaagaaaagaatattaggaaggggagtatggaatgatgttttagatgggatggtttatatagtgattaaaattggtgagaggaagagttagagatagataagaaaagttagagagttatagacgaggtttatgtcgtagtttaaggtttttcggattttttggagttaattgtataattgtgtgttttcgtgtggtttttgggagtcgttatcgattttaatgggtttttgattatttaaaggttgaggattattttggttttag

SEQ ID NO: 971 - DNA, 5461 bp, Artificial Sequence
  chemically treated genomic DNA (Homo sapiens)
tttgttgtggggttaggggagaggggagggatagtattaggagatatatttaatgttaaatgatgagttaatgggtgtagtatattaatatggtatatgtatatatatgtaataaatttgtacgttgtgtatatgtattttaaaatttaaagtataataaaaataaataaataaaatttaaaaaaaaagaaaaaaaaaagaaaatggtgttattaagatgatttgttttaatggggtatttgagaattaaataaattaatatatagaaggtatttaaaatgatgtttaatttatgtgaattttatataatgtgttaatttttgattaatttattagaggggatgatatgagatttggttttgaaaggagttgttttggttttattatttgttgtttttttttttaatttattgagaagtaggtaaggtttcgagaggatgagtagcgtttttaaggttatagtttattgatggtagagttaggattttttatttagggttttttatacgcggaatttttcgaggaggaagaggggaaggggtcgtgggaggttaggagaaatcgagagttagttttattatgtgttttttttggggataatggaatttaggtttttcggggtttttttttagagttggttatacgtttcgttttcgggtgcgtttggtgtttacgtaaacgttatttttcgaatattttttcgtttatatatatatatatatatatagttttatatttttgcgtcggacgtattttttacgtttggtatagtacggtaattcgttgtttcgttgggaggattagttaataggggggcggacgggaaaagtgatataattgggtcgcggcgtttttcgcgttagttttttacgtagcgtagggcggatttcggtttttagaggggtgaggattggggttaaattgttcgggtttatttcgtcgttcgtaacgtttcggggtttcgcgcggagggaggtttgggcgcgggtcgtcgcggcgtattttttaggaacgcggcggtcgtaagtttgttaggtcgggtcgtaggatagtcgtcgtcgtcgttatcgttatcgttatcgtttttcgaagttagatgacggagttttgaaagatttttattaaatatgggtcggggttggaaacgttttgcgtcgcgcgtcgtcggaaatttcgatttttggtaatcgcggtgattgtgggcgcgcgggcggggtggtcggtagggggcggcggtagtagtcgggtaggcgcgttcggatgtttcgcgtttcgtattttttcgcggtgcggatttttttcgtttttttcgtaggggtttcggagtcgatcgtttttttcgcgcgtcggttatttagtttttgtcgtagttattaggattttggttttttggggtttttttggttgttaagttaaggggatgggggcggggaaatggtagaggagagaaatgggatggtacgggggcgttattttaaagtcggttttttgtagatattattaagttttgtttattaaggtggttttgaagagtggagttgtgaggttgggtgtgtagtcgaggatttatgaagatatatatatatatttttattataggtatttcggtcgtttagggtagtggtgtttagggtgtgattttcggattagtagtattaatattatttggggatttgttagaaatgtaattaattagaaattttggggtgggaatttagagaattatttattaattagttttttaggcgattcggatgtacgttagtttgagagtttttttagggttaggaaattggagtcgttagatttatcgttattattttcggttgtcgttagatagtgagttttttattaggtaatttaaaattttttggtagtagcggttgagagacgtttttattttttagttcgaagttaggagttgtagaagataagtagtttttttttcgtggattgtaatttaaggtagtttaaggaaataaggtagttcgttatttttttttggggtattcgtatggggagggtgaaggagaaattagtaaaagagttatatagaattagtattcgaagtaatatttatttataaatatttgtatatttcgttttttgttcgttaatttggattgatttgcggtttttagcggaggcggcgagaaggcgacgggaggttggggtttttggacggtttttgggtaggatttgaggagtcgttgttttttttgtttaatgtcgtcgattattagtaggcgtaatagtatatggtatatggagaggttgtgtatataggttattttagtgtttttcgtttttatattttttggttttgttgttttagttttttatttttattttataatatattttttgttttaaatgggtagttgacggtaaggttttttaaattttttttttggggtaaatttatttttaagattttttagttgaagtttagaaataaatttatatatttttgttaaaaaaattttaatgtgattttaaaggaatttttggaatggcgtgtgtttgaacgtagtgcggtagattggatttttgtcgttttttatttttaatttttaattaaggtatatacggttagttggatgatttattgtgtttttattttaaattatgatggatagattgcgtgaaaaataaggaattttaaagaattttttgttttgggaagagaagttaaatttatatttaataatatttgaagttgttaagaatgttttgtggttggataatagaggtagaaaaatgttaaaaacgtaggttattgttatatttaaatatggaaatattgttacgtttggtgtttgatttattatttggaaatatttataattatgaagttaaatagaaaagacgttataatagaagttaggaatttttttttttattttttttttagtttaattagtattgtttttgtatttttttttttttttttcgtttttcgttattttattaagaaggaaataataatgaaatgataaggtaggaaaaatagtgttttgtaaataataattgatgtattaatttgtgtacgtgttgggtttatattttttttattgtatttgtataatatttgataatttattgttttgaaaagttttttatttttaattttttaatagagttttagagattttattttttttagtaaatgttgtttttatttatgaaagggtattttggaatgaatgaaattgaatttttttttgtaagaattttttttattggagtgtgtttttattttgatagatttttattgtgtttattaggaaagttagtattagtattaagggtttttttaagtaagattgttaaattatgaagtttgaatagttttaaatattaaaaaggataagtagttattttagagtatatgagttttatatgataatttttattaaaattatgtaaaaagtttttgaaatttgtagggaaagtttattaattatattaatggtattggtgatgtttaagtaaattgttttgtggtggggttttttattgagtgtgttgtaagtagaacgggattttaaaatttgttgatatttttattgtaaaatattatattttaaattttttttttgtatttggagagaagggtattgtaatttatttaaaatgggaggtttttagtggtttttaggaaaggagttaaaaattttataaaatgtttagtttgaaggagtttgttttttttagagatttatagggtataatggttttggaatttggtttggttttgcggtttttgtaggtgatgattttaggttattttacggtggttttttgtatttttggttggttgtttggttagtatagttttttgttcgcggagggaggcgggaagggtttatttcgttttttgtattcgtgaggaagtataagttagtttttcggagaatttttcgcgttcgttttttttcggatttttaatttaggtagtgggttggaattaaagtgggaatttttaaaaataaataagtataatatatttaaaagagggaagggttggaggagtgggggagatttttgtttgggaatttgttagacgatgggtaagttttttttcgttttatttttttttcgttttttatttataaatgttattgtgggtattaatttgtaatttattgaattttgttaataaatattatgttaaagttttgggatttgtttcgaatacgtttttttgaagtttataaatatttttgatttagagatatatttttttttttcgttttatttttttaatagataatttgttttttattttcgttgtaaaaaagtaaatagtttattgttttttcgggtgagggttttagtggttgttcggttaattcgtattattaaataaaacgatttttgttttttttttttaggtttttttatttatttagtttaggtaaagttttgaattggtttttttcgttttttacgattttttaattattattattattattacgttttaaagaattttttttaatataagtcgtaatttaaggtggaaaaaacgaattgtttttttgacgggtttgggatatatatatatatatatatatatatatatatatttttcgaattgtttttttgacgggtttgggagatagatatatatatagatatatatatatatatatatatatatatatatatatatatatatatatatatataaaggtgtaatggagttaggggaggcgtttggtagtagttcgcgttaattagtatttttgagatgtttgagaattttggaacgcgtagatagagtcgacgttattgtaatacgcggcgttttcgtcggttcgtataaaaggcgggtttcggggcgtttgggtagatcgcgagcgagagcgttttcgagtagcgttcgcgtttttcgcgtttttttcgtcgggatttcgagcgaaagacgttcgttcgtcgtttagttttcgtttttttgtttatcgggtttatcgcgtcgttatttcgatttcgttgcgtacggtttgttcgttgtatattagtttgttggcgttttcgtcgtcgcgttcgtttcgggttatttttgcgcgttataatgagttttcgtatcgttagggcgttcgttttagtcgttatttttttttatttgattaggttggtgagttggattttttttttgttatttatttttcgttcgttttttagtttttttttttggttttagattgtttacggtaggaaaagttaaaaagttcgcgatcgtttgcgggtagtcgtttttttaagtatttttttttttttttcgaagacgtgtcgggattttttggtgggagtagtttttcgaggtggtcgggttggacgagattagaggtttttcgtcgatagggtcggagattttcgttttttattgcggtagtcgcggcgttttttttgcgtatcgcgtcgagttttacgcgtatttttttttttttttagg

SEQ ID NO: 972 - DNA, 5461 bp, Artificial Sequence
  chemically treated genomic DNA (Homo sapiens)
tttggaagggggagaagatacgcgtgagattcggcgcggtgcgtaggaggggcgtcgcggttgtcgtagtgagggacgggggttttcgattttatcgacggggagtttttgatttcgtttagttcggttatttcggaaggttgtttttattaagaggtttcgatacgttttcggggggagggggagagtgtttaaagaaacggttattcgtaaacgatcgcgaattttttaattttttttgtcgtgggtaatttgggattaggggaaggggttggagagcggacggggaataggtggtaaaaggagagtttaatttattagtttggttaagtggagaagggtgacgattaaggcgagcgttttggcgatgcgggagtttattgtggcgcgtaggagtagttcggggcgagcgcggcgacgaagacgttaataagttggtgtgtagcggataggtcgtgcgtagcggggtcggggtggcggcgcggtgggttcggtgggtagggaggcgagggttgggcggcgggcgggcgtttttcgttcgaggtttcggcggagaaggcgcggagggcgcgggcgttgttcgggggcgttttcgttcgcggtttgtttaggcgtttcggagttcgttttttatacgggtcggcggaggcgtcgcgtgttgtagtgacgtcggttttgtttgcgcgttttagaatttttaaatattttaggaatgttggttggcgcgggttgttgttaagcgttttttttggttttattgtatttttgtgtgtgtgtgtgtgtgtgtgtgtgtgtgtgtgtgtgtgtgtgtgtgtgtgtgtttgtgtgtgtgtttgttttttagattcgttaagaaaatagttcggggggtgtgtgtgtgtgtgtgtgtgtgtgtgtgtgtgttttagattcgttaagaaaatagttcgttttttttattttaaattacgatttatgttgggaagggttttttggggcgtgatggtggtgatggtagttggagggtcgtgaggggcgaggggggttagtttagaattttgtttggattgggtgggtgggaggatttgagagggaggaataaaagtcgttttgtttggtgatgcgagttgatcgggtagttattgaagtttttattcgggaaggtagtgagttgtttgtttttttatagcgaaggtgagaggtaagttatttgttgaaagagtagaacggggaagaggagtgtgtttttgagttaggaatatttgtggattttaaagaggcgtgttcggaataagttttaaagttttggtatgatgtttattagtaaagtttagtgaattgtaaattaatatttatagtggtatttatgaatgaaaagcggggggggggtggggcggggggaaatttgtttatcgtttggtaaatttttaggtagaggttttttttatttttttagttttttttttttttgggtatgttgtatttgtttgtttttggaggtttttattttagttttagtttattgtttgggttggaagttcgagaggaaacgaacgcggggagtttttcgggaggttgatttatatttttttacggatgtaggagacggggtaagtttttttcgttttttttcgcgggtaggaggttatgttaattaagtagttagttagaagtgtaggagattatcgtggagtggtttgaaattattatttgtaaagatcgtaaggttaaattagattttaggattattgtgttttatgaatttttgggaaaagtagatttttttaagttggatattttgtggggtttttaattttttttttagggattattggaagttttttattttaaatgaattgtaatgtttttttttttaagtatagaaaagagatttaggatgtaatattttgtagtaaaaatgttagtagattttaagatttcgttttatttgtaatatatttagtagaagattttattataagataatttatttgaatattattaatattattagtgtgattgataaattttttttgtaagttttaaaaattttttgtataattttaataaaaattattatgtaagatttatatgttttaggataattatttattttttttaatgtttaaggttatttagattttataatttagtagttttgtttgaaaaggtttttagtgttaatgttgatttttttgataagtataatgagaatttgttaggatgaaaatatattttagtgaagagaatttttgtaggaaggagtttagttttatttattttaaagtgtttttttataaatggaagtagtatttgttagagggagtgggatttttaaagttttgttagagggttaggggtgggagattttttaagataatggattgttaggtgttatgtaaatatagtgaggaaagtgtgggtttaatacgtatataggttaatatattaattattatttataaaatattgttttttttgttttattattttattattgttttttttttaatgaagtgacggggggcgggaggggggaggaggggtgtagggatagtattggttgaattagagagagaatggagaggagggtttttggtttttgttgtggcgttttttttatttgattttatggttgtaagtatttttagatggtgaattagatattagacgtaataatatttttatatttgggtatagtagtagtttgcgtttttaatatttttttgtttttgttatttaattataaagtatttttgatagttttaaatgttgttaaatatagatttaatttttttttttagagtaggaaattttttggaattttttgttttttacgtaatttgtttattatgatttaaaataaaagtatagtggattatttaattggtcgtatatattttaattggaggttggggatgggggacggtagagatttagtttgtcgtattgcgtttaaatatacgttattttagagatttttttaaaattatattaaagtttttttaataagggtgtgtgggtttgtttttggattttaattggggaattttgaggatgagtttgttttagaagagaaatttagagaattttatcgttagttgtttatttaaagtagggggtgtgttgtgggatgggggtgggaagttggagtaatagggttaggaggtgtgggagcgggagatattagagtaatttatgtgtatagtttttttatatattatgtgttgttgcgtttgttagtaatcgacgatattaggtaagagaaatagcggttttttaagttttgtttaaagatcgtttagaaattttagtttttcgtcgttttttcgtcgttttcgttgggagtcgtagattagtttaagttgacggataggaggcgaaatgtgtaaatgtttatgggtaagtgttgtttcgggtgttaattttgtatggtttttttgttagttttttttttattttttttatacgggtgttttaggaggaaataacggattgttttgtttttttgggttgttttggattgtaatttacggagaaggggttatttgttttttgtagtttttggtttcgggttgagagatggggacgttttttaatcgttgttgttagggaattttaggttatttaatgaagggtttattgtttggcggtaatcgagaataataacggtaaatttggcgattttagttttttagttttaggaaggtttttagattagcgtgtattcgagtcgtttggagggttagttaatgaatggttttttgggtttttattttagagtttttgattagttatatttttaataagtttttaggtgatgttgatgttgttggttcggagattatattttgagtattattgttttggacgatcggagtgtttgtagtaggggtgtgtgtgtgtgtttttatagattttcggttgtatatttaattttataattttattttttaaagttattttaatgaatagaatttaatggtgtttgtaaaagatcggttttaaggtggcgttttcgtattattttattttttttttttattattttttcgtttttatttttttggtttgatagttaggagagttttaggaagttaggattttggtggttgcggtaggaattgggtggtcgacgcgcggagagggcggtcggtttcgggatttttgcggagggagcggagagggttcgtatcgcgagagggtgcgggacgcgaggtattcggacgcgtttgttcggttgttatcgtcgttttttgtcggttatttcgttcgcgcgtttatagttatcgcggttgttaagaatcgaggttttcggcggcgcgcggcgtaggacgtttttagtttcggtttatatttggtgaaagttttttaagatttcgttatttagtttcggggggcggtggcggtggcggtggcggcggcggcggttgttttgcgattcggtttggtaggtttgcggtcgtcgcgtttttgaaaagtgcgtcgcggcggttcgcgtttaggttttttttcgcgcgggatttcggagcgttgcgggcggcggggtagattcgggtagtttggttttagtttttatttttttgagggtcgaagttcgttttgcgttgcgtgggaggttggcgcggagggcgtcgcggtttagttgtgttatttttttcgttcgtttttttgttgattagtttttttagcggggtagcgagttgtcgtgttgtgttagacgtagagggtgcgttcggcgtaagggtgtggggttgtgtgtgtatgtgtgtgtgtgggcggggggatgttcggaggatggcgtttgcgtggatattaagcgtattcgagagcgggacgtgtagttagttttggggaaaagtttcgaagggtttggattttattatttttagaagggatatatggtaaagttggttttcggttttttttggttttttacgattttttttttttttttttttcgagaagtttcgcgtgtggggagttttggataggaagttttggttttgttattagtaggttgtggttttggggacgttgtttattttttcgggattttgtttgttttttagtaaattgggaaaggaggtagtaagtagtaaagttagagtagttttttttagggttaaattttatgttattttttttaataaattagttagaaattaatatattatatagggtttatataggttgggtattattttaaatgttttttatatattgatttgtttaatttttagatgttttattgaagtaggttattttggtaatattatttttttttttttttttttttttttaaattttatttatttatttttattatattttaagttttagggtatatgtgtataacgtgtaggtttgttatatatgtatatatgtgttatgttagtgtgttgtatttattaatttattatttaatattaggtatattttttaatgttatttttttttttttttttgattttataatagg

SEQ ID NO: 973 - DNA, 6557 bp, Artificial Sequence
  chemically treated genomic DNA (Homo sapiens)
  unsure 5704: n is a or g or c or t
tttttttttataatttttatagtttgaggttttatatttaaatttttaatttattttgagtttagttttgtatatggtgagaggtaggggtttagttttttttttttgtatatggttagtaagttattttagtattatttattgattaggtattttttttattgtttatttttttaattttgtaatattatgtttgggttttttattttgttttattggtttatgtgtttgtttttgtattaatgttatgttgtttttgtttttgtagttttatagtatagtttgaagttaggtaatgtgatgtttttgattttgttttttttgtttaggattgttttgtttatttgtattgttttttggttttatacgaaaaatataataattagttaggtatgatggtggatatttgtaattttagttattttggaagtttaggtaggagaatcgtttgagtttgggaggtggaggttatagggagttgagattatattattgtattatagtttgggtaatagagcgagattttgtttttaaaaaataaaaaaataaaaataattgtttattgtaagtttttatttatgtgaaaatttatttacgttagtagaagttaggataatgtttatttttgtagagtatggggataataattagtaggggtatgaaaggttttttatatgttgttaacgtttttttttttattatttatttatttatatagtattttattttgttatttaggttggagtgtagtggtataattatagtttattgtagtttttattttttgggtttaaatgatttttttattttagttttttgagtagttgcgattataggtatgcgattataggtatgcgtaatatttggtttatttttttattttttgtagagacggggttttattatattgtttaggttggttttgaatttttgggttttagtgatttttttgtattagttatttaaagtgttgagattataggcgtaagttattgtgtttggttaatgttttttttgatttgggagttggttatacggtgcggttaatttgtggatatttatttggtttatttatttttttttgtatgtatattttaataaaatatttttaaaaaatattttttttttgatgatttagtggagaaaattttagtttgggtttgatttaatttgaatgttttttttaaattgttttattttttttaatttgggaagagtgtgttagttttagaagttttagtaggtaatagtatttagttcgaattaaataatattgttttgtttttattgtgttttatggttattatttatagatggttattaatattatatttttatttatggtagtgatatataattttttttaaaaatgatcgtaagtaaaaaaaaaaaagagtgaattgttttattttaaaaaaattatgtaaataatagtataggtggtatttagttacggtaaattatgtaagggtggggtttataaaacgtggttgagatggaaaaaggtagggattaaggggaagggagaaaattagttttagtttgtttttattttttaattaatttttattgttgggtatagataggtttttaagtttgaggatatatttttgtagaggatttatgagaaatttaaagtgaagaatgttttaggaataatgggatgggtaaagttagagataataagcggagaatttggatttatttaataaatattttttgagtatttttgtgtaggtatcgttttagttttgggtttatagtaataagtaaaatggttaagttgtaggttagttagtaattagttttgggttttgggttgagtttttttatttttttaggttttaatggattgaggatgttttgtgatttaagtttttgtagtagttggtttttggggagtgggattttgagtgaggtttaggagaggttaggaaaagttttaaaaatatgggattattttgttatgtgtttgcgtgtatttagggtggggaagggtaaaattggttattaatttgggaattaggagaaaagaattgggtgtggtttttaggtttattagaaagtgaaatattattgagtattttgtatttgttaagttagtattattttgtttgtttatttttattgtttttggttgaaagattaagaattttaaaaggaggtggaaagagaatgaattttaaaagataagtgagtagttgtatgggaatgaatgaattaatgttatttttagttttttaatagatttattatagttttttatttttagtttttgggtattgtaattaagatagaaagagaatgaggggttttgttaggaatattttgagagattgtattttttatttatttaataaatatttattgagtgtttatttggtgttaggtagtatttagatttgtgggttgtttaatttgatagttatttagttatatatggttattaaatatttgaattttggttattttaaattgaaatgtgttgtatagtatatatattagaatttgaggatttagtataagaaaaggaatgttaatttttttattaattttagtgttgattatttattgaaatgatagtattttggatatatcgttaaattaagaatattattaaaataaatgttatttatttttttttattatattttaatatggttattagaaatttataattgtatatgtgtttacgtttgcgatttgtagtagatttttattggatagcgttgtgttagattttgtgtttattttgtaggagtttagtgggtgggattaatagaaatacgttataaagtaggtaggagatattagggagaatgaaggtggaatgattatgattttttttgtgttttatttttattttttttagattggtattgtatatagtgttttttatttttttttttttttttttttagatcggtattttatatagtgttaacgatttttttttttttttattttttttttagatcggtattttatatagtgttaatgatttttagaagtttagttttgtttatttttttttttgtttaaatatggatgttgtatttttattgtttagtatattaagttaaagcgttatagttaattggattttttgttttttttgttgttttttgtaagtattttgtattttggttgaagtggattttttgatttttaaatttatttttttatttttttttttttttttttttttttttttttttttttttttttttgtgtgtgtgtgtgtgtgtgtgtgtgtgtgttttgagattgatttttattttgttatttaggttggagtgtagtggtgcgattttggtttattgtaatttttattttttgggtttaagcgatttttttgttttagttttttaagttgttgggattataggcgtgtattatcgtgtttggttattttttgtatttttagtagagatgggattttattatgttggttacggttggttaggttggttttgaatttttgattttaggtgatttatttgtttcggttttttaaagtgttggaattataggtgtgagttatcgcgttcggttttatttttgtgtttttgttttaggtggtttttttgtttgtgtttttgttaatcgtttattttttttggtagaattataagttttaattttagtttcgatttatttaagaaatttttttttttttaattattatattatttttttattaaaatattttttttttttaaagtttttgataaatatttatttatttattttttattttattaaagtttttttcgataattttttttagtttggcgttttaagattaggtatttgtttttttggaggtatttaggttatttttagagttaggtggttattgggttaattagttgttgaattgaattaaataggttttgagttttgaagttagaaagagttagagtggaggggtttggggggaagaggggcgttgaggtatagggagatgaaatttgcggtggaggtagtttaatggtttatttgttatttaaggaatttttttgataggggtttttgttagggttatattttaggagatggttgattatggttgagtttagtttggaatgatgggggttgggggtagtttgggtagatgatttagtaaattaaatagaataatgaaaggaggttatgtttgtttatttgtattattgaagatagttataaatggttttattttagagcgggtttgttatatttggagagttgatttgatttttttaagatttttgtaattgagtgttttgggatttgttttgtaataagtgtttcgagatttgtaggtgggggtttagggtgttaagggattattttagcgggcggagaagggagggggtttgtagacgaagggggtaggttttgcggggtatttagggtttttataggttgtagttacgagtttttaggtttggaaaattgtaatagttattaagattattcggggttgtttgggtttagtttggtttagacgggtttgaaatttcgtaggatttatttaataagaagttattgttttaagttacgtgttagtggtgggtgatattttaggatggaaggagttggtatgagtcgattgaaatttatttgaaggttaaaacggagttttatgttttttgtgttttttagcggttagttagtgtcggttataggggaagcgcgtaaacgaagttttcgcgaattgaattgagagtagataaaagtacgcgtttttttttatcgttacgtcggttttatttaaattcgcgagttattcgtatttttttttaggagttatagttaggttagaagagtgcggagggacggggttcgggaagagtagggaatttttagagttcgtagttaacgcggaggtgggcgagcgggcgtgcgttatttatttgtcgacgcgagggagtgtcgggggggaagggagtggtttttaaaagggggaggggagaaggtagggggcggggagaagtcggttttttaggattcggttgcggcggcgagagaggaggaagaagcggaggaggcggtttcgcgttcgtagagacgtgtatttgttcgttcgttcgttcgttcgttcgttcgtcgcgtcggttgtcgatcgttagtatgttgtcgagagtgggttgtttcgcgttgtcgttgtcgtcgtcgtcgttgttgtcgttgttgttgttgttattgggcgcgagtggcggcggcggcggggcgcgcgcggaggtgttgtttcgttgttcgttttgtatattcgagcgtttggtcgtttgcggttttcgtcggttgcgtcgttcgtcgcggtggtcgtagtggcggaggcgttcgtatgttatgcgcggagttcgttcgggagtcgggttgcggttgttgttcggtgtgcgttcggttggagggcgaggcgtgcggcgtttatatttcgcgttgcggttaggggtgcgttgttatttttattcgggtttcgagttgtttttgtaggcgttggttatgggcgagggtatttgtgagaagcgtcgggacgtcgagtatggcgttagttcggagtaggttgtaggtaacgcggtttggaataagtagttgggagaaatttggagggtagcggagaagttcgacgggcggttggattttacggacggttttaggggcggtagagtcgagattttggattaaattaagggggattgttgttagcgggacgganagttaggttcggggaggggaattggagttagagtaagtggaagagttttggtagtttatttggtggggatgaatggggagaggaaaggtatttttgttgttatagttttattcgcgtggaacggatttagatttttattttggaggagggatttgttgagaagggggtcggtggttagatttatgggagtaggaattcgaattttatttggggtattgtttgaggatttaagggttttggtgggatcgttgttgggaggcggaggttgcggggtgttagtgatattaggaattttggaagaggagagggagttaggaggaggtatcggcgttttaaggggtttttttttttattggggttgtgagttggaaagaaaggatttggtattttgtaggatgagtcgtttaggagaaaaatgaaaattattattattatttttttatagggaacgagtagggtttttgttattacgttgaatggaaaaataaaagggaggtatttggtaggcgaggggttttttagtagttgaattaatgtaatttaagttcgatcgtcggttgtattttttggacgggggtagttaggttgtgcggtttcgtatttgggttttagatcgaaaggtaggagagatgcgttgttattttttattttcgtttttattttaaattgagggatttttttttgtaggatagaatgaggattcgatattttttgtttaggggtttttattttttttaaaaagttatttgagggatataattaggttttaaggaggttatttttttttttttttaattacgaaagttttttgttttagtggtcgggaggaagttgtaattattttttttttttt

SEQ ID NO: 974 - DNA, 6557 bp, Artificial Sequence
  chemically treated genomic DNA (Homo sapiens)
  unsure 854: n is a or g or c or t
agaggaaagaaaataattatagttttttttcgattattggggtaggaggttttcgtaattaaaaaaaaaaaaaagtaatttttttagagtttggttgtgttttttaaataattttttgggagggatgagggtttttgaataaagaatatcgggtttttattttattttataggaaagggttttttaatttaagataggggcgggggtggggggtggtaacgtattttttttgtttttcgatttggggtttagatgcgaaatcgtatagtttggttgttttcgtttagggaatgtagtcggcgatcgggtttaagttatattgatttagttgttaggagatttttcgtttattaaatgttttttttttatttttttatttaacgtggtagtaagagttttgttcgttttttatggagaaatagtagtggtggtttttattttttttttaagcgatttattttataaagtattaagttttttttttttaatttataattttagtagaaggaagggttttttgggacgtcggtgtttttttttagttttttttttttttttaaggtttttggtgttattggtatttcgtagttttcgttttttagtagcgattttattaggatttttgggtttttaagtagtgttttaaataagattcgagtttttatttttatggatttgattatcggttttttttttagtaaattttttttttagaatagaagtttgggttcgttttacgcgggtaaaattatggtagtagggatgttttttttttttttatttatttttattaaatgagttgttagggtttttttatttgttttaattttagttttttttttcgggtttgattnttcgtttcgttagtaatagttttttttgatttggtttaaggtttcggttttgtcgtttttaaaatcgttcgtaaggtttagtcgttcgtcgggttttttcgttgttttttaagttttttttaattatttgttttagatcgcgttatttgtaatttgtttcgggttggcgttatattcggcgtttcggcgttttttataagtgttttcgtttatgattagcgtttgtaggggtagttcggagttcgggtggggatagtagcgtatttttggtcgtagcgcggggtgtagacgtcgtacgtttcgttttttagtcgggcgtatatcgagtagtagtcgtagttcggttttcggacgagtttcgcgtatggtatgcgggcgttttcgttattgcggttatcgcggcgggcggcgtaatcggcgggggtcgtaggcggttaggcgttcgggtgtgtagggcgggtagcggaatagtattttcgcgcgcgtttcgtcgtcgtcgttattcgcgtttagtagtagtagtagtagcggtagtagcggcggcggcggtagcggtagcgcggggtagtttattttcggtagtatgttggcggtcggtagtcggcgcggcgggcgagcgagcgagcgggcgggcgggtaggtgtacgtttttgcgagcgcggagtcgtttttttcgttttttttttttttttcgtcgtcgtagtcgggttttaaagggtcggttttttttcgttttttgttttttttttttttttttttggagattatttttttttttttcgatattttttcgcgtcggtaagtgagtggcgtacgttcgttcgtttattttcgcgttggttgcgggttttgggggttttttgtttttttcgggtttcgttttttcgtatttttttggtttgattatgatttttgaaggagaatacggataattcgcgggtttgggtaggatcggcgtggcggtggagaagagcgcgtgtttttgtttgtttttagtttagttcgcgaggatttcgtttgcgcgttttttttgtggtcggtattggttaatcgttggggaatataaaagatataaggtttcgttttgatttttaagtagattttagtcggtttatattaattttttttattttggggtattatttattattgatacgtggtttggaataatgattttttgttgggtgggttttgcggagttttagattcgtttagattaagttagatttaaatagtttcgaatggttttagtgattattgtagttttttaaatttgggagttcgtgattataatttatgagaattttaagtgtttcgtaaaatttgtttttttcgtttgtagattttttttttttttcgttcgttaaaataattttttagtattttgggtttttatttataaatttcgaggtatttgttgtaggatagattttagaatatttagttgtaggggttttggagaggttagattagttttttaggtgtgatagattcgttttggggtaaggttatttatggttgtttttaataatgtagatggataagtatgatttttttttattgttttgtttgatttattgagttatttatttaagttgtttttaatttttattattttaggttggatttagttataattaattattttttggggtgtgattttaataaagatttttgttagagagattttttgggtgataggtggattattaagttgtttttatcgtaggttttatttttttatattttagcgttttttttttttttagatttttttattttggttttttttgattttaaggtttagagtttgtttgatttagtttaatagttagttaatttaatggttatttggttttgaaggtgatttagatgtttttaggaaggtaagtatttggttttaagacgttaagttgggaagagttatcgggaaagattttggtaagataaaaaataaataaataaatgtttattagaggttttgaagaaaagaaatattttggtagagaggtgatgtggtggttgaggaaaggggagttttttgggtgagtcggagttgaaattgaagtttgtaattttattagaggaaatgggcggttagtaagggtataggtagagggattatttgaagtaaaaatatagaaatggggtcgggcgcggtggtttatatttgtaattttagtattttgggaggtcgaggtaggtggattatttgagattaggagtttaagattagtttggttaatcgtggttaatatggtgaaattttatttttattaaaaatataaaaaatagttaggtacggtgatgtacgtttgtagttttagtaatttgggaggttgaggtaggagaatcgtttgaatttaggaggtggaagttgtagtgagttaagatcgtattattgtattttagtttgggtgatagagtaagaattagttttaaaatatatatatatatatatatatatatatatagagagagagagagagagagagagagagagagagagagagagaaatgggaaaatgagtttggggattagaaagtttattttagttagagtgtaggatgtttgtagagagtagtaggggaggtaggaaatttagttgattgtggcgttttggtttaatatgttgggtagtaaggatatagtatttatgtttgagtagaggaagagatggatagagttggatttttggaaattattagtattatgtagagtgtcgatttgaaaaaaaagtaaaaaaaaaaaaaaatcgttagtattatgtagggtgtcgatttgaaaaaaaaaaaaaaaagaagtaaaaagtattatgtatagtgttaatttaaaaaaaataaaaataagatataggaaggattatggttattttatttttattttttttggtgttttttgtttgttttgtaacgtgtttttgttggttttatttattgagtttttatagagtaggtatagggtttagtataacgttgtttaatagaaatttattgtaaatcgtaaacgtgagtatatgtgtaattgtaaatttttagtagttatattaaaatatagtaaaaagaaatagatgatatttattttaataatatttttaatttggcggtatatttaaaatattattattttaatgggtaattaatattaaaattaatgagagagttaatatttttttttttatattaaatttttaagttttgatgtgtatgttatatagtatattttagtttgaagtagttaaaatttaaatgtttgatagttatgtgtggttaggtagttattaaattggatagtttataggtttaaatattgtttggtattaggtaagtatttaataaatatttgttgagtgaatgaaaagtatagttttttaaaatatttttggtagggttttttattttttttttgttttaattgtaatgtttaggagttgggaatgaaaggttgtgatgagtttattaagaggttaagagtggtattgatttatttatttttatgtagttatttatttattttttgggatttattttttttttatttttttttaaagtttttgattttttagttaagagtagtggagatgagtaggtaaagtgatgttgatttgataaatgtaaagtatttaatgatattttattttttaatgagtttgaaggttatatttaattttttttttttagtttttaggttaatggttaattttatttttttttattttaaatatacgtaaatatataataaaataattttatatttttaaggttttttttaattttttttgagttttatttagaattttattttttaaaggttagttgttatagaggtttgaattatagagtatttttaatttattgaagtttagagaagtagggggatttagtttagaatttagagttggttattggttggtttataatttaattattttgtttattattgtaggtttagggttagaacggtgtttgtatagagatatttaaagaatatttgttgagtgaatttaggtttttcgtttgttgtttttggttttgtttattttattgtttttggagtattttttattttagattttttatgagttttttgtaaaggtatgtttttaggtttgagagtttgtttgtgtttagtagtgaggattggttgagagatggggataggttaagattggtttttttttttttttttaatttttgtttttttttattttaattacgttttataaattttatttttatatggtttatcgtaattaggtattatttgtattattatttatataatttttttaaagtaaggtaatttatttttttttttttttgtttacgattatttttaaaagaaattgtatattattattataaatggaaatgtagtattgatggttatttatagatggtaattataaaatataatgaaaataagataatgttatttgattcgagttggatattgttgtttgttgaagtttttgaagttggtatattttttttaagttaagaaagatgagataatttagaagaagtatttaagttaagttaaatttaagttgagattttttttattaagttattaggagaggaatgttttttaaaaatattttattgaaatatatatgtaaaaaaaagtagataaattagataaatatttataaattgatcgtatcgtataattagtttttagattaagaagaatattggttaggtatagtggtttacgtttgtaattttaatattttgggtggttgatgtaagaagattattggagtttaagagtttaagattagtttaggtaatatggtgaaatttcgtttttataaaaaataaaaaaataagttaggtgttgcgtatgtttgtagtcgtatgtttgtagtcgtagttatttaggaggttgaggtgggaaaattatttgagtttaggaggtagaggttgtagtgagttgtaattatgttattgtattttagtttggatgatagagtgaaatgttgtgtaaataaataaataataaagaaaagaacgttgatagtatatggaaaattttttatgtttttattggttattatttttatgttttgtaagggtaaatattgttttgatttttgttggcgtggatgagtttttatataaatgaaaatttataataagtagttgtttttgtttttttgttttttggagatagagtttcgttttgttgtttaggttgtagtgtaatggtgtgattttaattttttgtaatttttattttttaggtttaagcgatttttttgtttgagtttttagagtagttaggattataagtgtttattattatgtttggttaattgttgtatttttcgtatggaattaaaaaatagtgtaaatagataaagtaattttaagtaaaaagaatagagttagaggtattatattatttgattttaaattatattataaggttataggaataaaaatagtatgatattggtataaaaatagatatatagattaatggaatagaatagagaatttagatataatgttataaagttgagaaaataagtaatggggaaagtatttagttaataaatagtgttgggatagtttgttagttatatgtagaagaaagaaattggatttttattttttattatatataaaattgaatttaagatggattaaagatttaagtgtaagattttaaattataagaattatagaagaaaa

SEQ ID NO: 975 - DNA, 8700 bp, Artificial Sequence
  chemically treated genomic DNA (Homo sapiens)
tagaaaggagattagcggtttttaggagataagaatggagaaaaggagggtttaagattatgaaaggttaagaagtttttgaggatgatggaaaggtttatttgtatgttagcgattttttaaatgtatatatatgttaaaatttattaaattatatatttttaatttgtgtagtatattgtatgttaattatatattaatgaaaaagaaaaatttatttttttgtttattaaattggagaggtattatggaatttgtggattatgatttaggaaatttagtaaaaagggtttgttttcgtttttttatttttagtgaaagggatagataataggatttttaggatttttttagttatgataggagagttattgggaatttttttttttttatttggttttgtaaagttggaaaaggagtttgaagtggtattaaagatgtttttgggtaaagatataggattgatattggtgtcggggataaattagttgaatgaaaagtgtttttaaaattttttttgtttttttttaagattttattgggtagggaaagattatattagattgttggttagtttgaagattgtatgttatgtttataggtagatttaattgttagtatgttgatatttgaattaaggagataaggtatgtgggttgtgtgttaggatttatttgagaataaaatttttaagattgtttaggtggttatgtgaatataaggatgaatttttattttttattttttaggtaatattgtgtttaagagtttatttttttattagtgttgtaagataggtattagtgtttttatttggttttagaattgagttgtagaatttgtttaatgttagaaagttattgagaggagaattgagtaagtagttaagaataaattttagtttattgtgattgaagtttttagttttttttattgttttgaagttttaattttgaagaaaagttggaagttagatagagttaggaattgtttttgtttgaatgattaggagatatagaggtaatttttattatgtaaatgattaattgtgtaggtaagggtgtgggtgtttatatgtagaaggtagtattattgtgagagaaagttatgataggagtattattgttttgagtagaaattttttttttatggggtgggtttttaatgtttaggttttttttttggagtatttatttttagattgtttgacgatacgggatagtattaattttgaggagtttttgtttttggattatggatttttattgttataggtattattgtttttatttagtatatttagttattttttttttttttttaaattttagaattatgttttttataggttatatgtataatgttaatattattttttttgagtttttttttcgtttttttaggtatatagaatgattttttgtggatgtttatattttttttttgtttgttttttttagttggatttttttatattgtttaagatttaatttaaatgttattattttttagaagttttttttgattatacggataggtttgttatttttttagtagggttataaatgtattcggtgaatttttttgttttttttgttgttatattgtttattattgtttggattttggtgagttattttagttagtttgtgaaattttgtagttggtatatggaggtgtttagtaattatttttggattaagtggatagatgaatttttaatgatgttatttgtgagtaaaagttatttgtagtgttgttagttatcgtgatgttggtagttgatggtttttaatgtatttttaagtttagtatatgtaatttcgggaggtttatttagtaggcgatttgatggagagaaaattagattttttgtttttattaatacgttttttaaaggggaaaaaaaatttgaagtttatagggtgagagttattgagttttagtaattgggtttttaatattgtttgtttttagaagtttggttttttttgttttaagtttattggtggttagtaagattgatagttatattttagaggatattgagaaatagtagtgttgttagaaggagagagattttagggtggtttgtttagttgggggttgagtagaagaaaagtaaaggagttagtattacgtagcgataaggtgttttttagtagtaggagtgggtttaaagaaatgagtggtttaggttatttggtgaaaataacgaggttgattaaaggaaatattaattataattaggttagttggatttcgttagtgaaaagagatttatgtagttttttgatttttattcggatggttattcgttatttttgtaatgattagtaattgtatgttaagtatttttatagggggtaaatattttttttattaaatattagtttatgttaaaaattataaatattagatgaattggaagtttaatagaattaacgagtatgttataaaattaagttttatttagtttaaattttttttgtaataattatgtttcgggaggggtagggagtttgtagttattaaataaaattggttaaataataaaatataatttttttcgtgttattgttttaaatttattttgttgttgtaagatgttatgataaaggtgatggtaatttatataaaatattgttattggaatagtttttgaaagttgaaatgtgatttagtttttacgtgtgtttcgtggtttttgaggtcgggttggacgtttggagttttggcgttttttagttattcggtattgaataagtttttttaattgtaatgcgagggaaaaaagaagagaattaagaataaaataaattttttaattttttttaaaaagatattgtttttgatttttttttgtttattttttagatgataaagttgaataaaaagtgttatattaattagtggttagtttaggttttgttgtaatattgtattaattagaattgtagatttgggattttaagaattgtatttgatgtcgaatttagttttaattttagagttaaggtttttgcgagtatttaaggaacggatgtaaatttgggggattcgttttgttttttttaattttttaatgaaattagagattttgtttttgggtgttaacgtagatattagaaggaggtgatataagagaaaggaaatagtaagcgacgattatggtacggttttttgtaaataaggttgagtgtagttatagtttgagtattgtgggagaagagtttataagaaaatgacggtgttgggttttcgttatttcggggtattttattgtttttgtttttggtttttttttatttgtagaggtttaattatttatttatttagtataagagggaacgaaattgatttttttattttaaaaggagagtatatatgtataaaaggaagttgtatagatatgggggaagaggtggatagggggaaaaggggagaggacgagagagagaaagggagggagagggataaggagagatattgggcgagagatcgattaggagagatagaaatgatgaatgaagattaattttatttaaggtttcgtgttggaggggaatggaggagtttttgatttgttattattattttaaattgtaaagggtttttttaagttatttatttattttttaaggtaagcgtttaattttaatagcgtttaggaaagttttttttcgcggaggttttatcgttttttattttatttttataaattttttggaaaagtgttttgaaaaatttaatttttaatttaattttggattattagcgttttttgttggttatcgaagggagggggtgcgtagataaaattgaagaaattcgagtgttagagaaggtcgataggagttatagcgattttagcgcgtaattgcgttttcgaattttattgaaaagtgtttagattgtagagataagttagaattttaacgtatcgagaatatagtaatacgaagtcgtttttaaaaaatgataatgaaaattgtttattaaaggattatttggttaattacgttttagtagtgtttagtttattgtttttattatttttttgtcgtgggtgtaaattttatttgaaaatataattagggagaatatttaagataagaagaatagttgttatttaaaatatttgaaaagttttgttttaaggacgtattcgtttgtcggtttatttttaattggagatttgcggtgtagtaatacgtgagagtttttttgcgttgagaagtaagtttggaaaggggcgaaggtttcgggcgtatttttagatgcgtatttgtgggtttttggggatataaatagtttagcgggtgtaaattaaatttcgtagtgttttggttttttgagatttaaatgtaagttagaaatgttttaagatttcgtttgttaacggaattaaattttagaaagttttacgaggtatatacgaatgcggagcgttgtatgttagttttttcgatatcggttcgtcgtagggagattttatttcgagagcggaaggggtaagggcggcggggttaaggagatcgggggtgttgagttggttaggagtgattggggtgatcgggggtgttgaggtggtttggagtgtcggggtggtcgggtatattttggtttttgtagacgataaggtgattcgggtttcgggcgtgcgtacgaggagtaggtgttcgggcgagtttcgagttgtacgttttcgagttcggtttcggttgtttagggcgaagtacgggttttcgtagtcgtgtttgcgtcgattcgttttttttttaatttttatttttgggcgcgtcgtttcggggcgtgttttgggttatttcggtttttatatagcggtcggcgcgttcgggtcgtttagatgcgagtattgcggttgggcgttgaggattagtcgttttttgtttggattttatagtttcgcgtcgtgtattgtcgttttatttttgcgcgtttagtttgttaagtagcgtgtttcggttgtaggcgttatgtagcgggcgcgatttacgttttgggtcgttgcgttgattttgttggtgttgtttcgcgggtcgtcggtggcgcgggttggcgcgagttcggcgggtttgggtttcgtggtgcgttgcgagtcgtgcgacgcgcgtgtattggtttagtgcgcgttttcgttcgtcgtgtgcgcggagttggtgcgcgagtcgggttgcggttgttgtttgacgtgcgtattgagcgagggttagtcgtgcggtatttatatcgagcgttgtggtttcggttttcgttgttagtcgtcgttcgacgaggcgcgatcgttgtaggcgttgttggacggtcgcgggttttgcgttaacgttagtgtcgttagtcgtttgcgcgtttatttgttgttagcgtcgttagttttaggtgagtcgttcgcgttaggtgcgttgcgtgtagtattcggcgtattggcgtcgaagggtttgggggttgttgggtgtcgttgcgggagatttcgtttttttttttattggagataatatgtggggaaattgaaggcgtttcgggaaaggtgaaggcggtcgtcggagggattttttttagtcggttttttatttgttcgattttttaagtgtagagtatttgtaaattgtaaagcgtttttagtgaaaatgggttaaaggttttcggagttgaggggagcggtatcgatgtttagttgttggaaagattttggatataggagatttttttcgtttcgtacgggggtgtatacggattgtaattttagggatgtttggggatggggggatataggcggatttggattaaggaaggtgggtaggtacgttgtaggaaatagtattttttttttaaaatattgattttgtatagttttttggtttgtaaagtaatgtttagtttcggtatgtttaaaaataagtaaagtggattcgggttttgatattttttgcggttggaaaatttgaagttgaaaaagaagtaattttttaaggttatttagcggttataatagagtgtaggtttgaatttcgcgtgttatttttagtattatattatttttataattcgggttatttttgtatttgcgtcgattttaaataaatttttaggtgcgtggtgggtgcgggtaatgtggattaagttaattttaatgatacggaagggaattggaattagttttagggttgtttttttttttaatttgaaatgggggggggaatgagatgttgttaaggggagttttagaagaggaaaaatgtaaatatttggtagagttatttttttggtttagttattattagtattaggtagatagcgattttggtaagggtattatattgtttttttaaaaaaaggagcgggggttgtttaaatggatttggtagttgtttttttaagtatttttagttagttttatttagttatatgagaaataaagtttttgttttgtatagttgaaggttgggagaattttttttattttaatttttttaattttttaacgattacgttggatagatgttattgggtaggtttttatttagggttagtaggatgaatagtttttttataatttatgtagttgtagagttttacgttcgggtgaagttattttttggttcggtaaggttggttttgtttatttttgagaaatgttggatttatggaaaggtaagatgtttgaaatatatattggttttggttagttgttaaagttgttggaggtatttgtttttcggggtaaagttatgttatttgttaagtgtcgtatattattgtgtattttggggtatttaaaaagtgattttagaaatattgatatatatcgttatttttgggttttagtaattattatgattattattttagtagtattgtagtataggttgatgtgagttataagattataaaaagatttaagtgatttttagaatttatttgataaaaaaaggtaaattttcgatagttaaaagttataattatttgttgtttaaatagaattgttttgtttttatgttttagtttgtagtttaggtattaagaagaaattaaggaaatttaagaaattatttaaggtttttagaaaagaagtataaatacgtttatttatatgtttttagagtatttatatttttagtattttttttattttagtatttttttgaaaaagaaagtaagttaagattaaaagaaattgaaattaaattttcgtaggtagggattttttttgtgaggttttgtgttggattttgggaatgtgtgttttttaaggtatgaaattttttggggaattttatagtaggattttagtgagttgtttggtaggtgaggaaattaagatttagagaggagagggatttttttaaggttttggtgagtgatttgttagtagttatttttaggggagagtagagtatttgtagttaaattattgtagttttaggtagttttttagaatagattgtggattagatgggttatttgagttttttgttagggttatatattatagttttgtttgttgtagtagagaaattttatgatttttaattgtggatttaagtcgatgtttttagattttggtatggtttataggttttgggagtatgggttttgaatgtagtttttgatttttatagcggttttatagtttttttaagtttattttgaagaaggaatggagtgagaattttggttgtagatttagttttgaatttagttatatatttaaaattttaatttaattgttaatattttagtatttattttaagtattagattttttttatttagtattttttattataaaagggagatttgttggagggggattttttttattttatttttatttagggaaggaaaagttttttggtatttagaagtttgagtcgtgagtgggattttggtattgtttgtatttatgtgttgttgtgtttattcggggtgaaaaggatttatttaggtaggtattagtaagatgtatagggtttgtgtagattttgagttttagagatgtaacggggatttagaaaataagttattaatatgtttgtatgattttgagtttttgaggtaaaacgttttgtaggtaataatttagtttttttatttgagttggatattaagtttttataagcgtgtttatttggtagtattgaggacggtattggttaattttggaatttttataagggtttgttataatttagattgttgtcgttattttagcgttttcggagtggagaatgtgtattttttttaagttttcgggttgtcgttgttttcgcgggtgggaggattatatttggagttgattgtaaaatttttgagtcggcgttgtagtagtttttcgtggtttaggtttgttttttgtcggtggaagatgaagtatattgtttttatttattgaggggtattgaagcgtttgtttgttttttttagttgtagttatttaggaagagtatttgttagattgatttttaaatagataattttttgaggtagagtaattattatgtagtgagtagtatgatggaataatattttatcgaggtattttaaaaaaaaaatttatttggattgttaattaatattgttatttatatgtgatttggttgtaacgttaagatttttaaaagattgtgatagatattgatgatttttatgtgtttgttttttttgggcgttttaagg

SEQ ID NO: 976 - DNA, 8700 bp, Artificial Sequence
  chemically treated genomic DNA (Homo sapiens)
ttttaaaacgtttaagagagataaatatatgagagttattaatatttattatagttttttaaaaattttaacgttgtaattaggttatatgtaaatgataatattagttggtaatttaagtgagttttttttttaaaatatttcgatgaagtattattttattatattatttattatatggtggttgttttattttaagaagttatttgtttgaaagttaatttgataggtgttttttttaagtagttgtaattaaagaaggtagataaacgttttagtgttttttagtaggtgaaggtagtatgttttattttttatcggtagggggtagatttgagttacgggaggttgttgtagcgtcggtttagaaattttgtagttaattttaagtgtggtttttttattcgcgggagtagcggtagttcggggatttggaagaaatgtatattttttatttcggaaacgttggagtggcggtagtagtttgagttgtaataagtttttatgggaattttaaggttgattagtatcgtttttaatgttattaggtaaatacgtttataagagtttggtgtttagtttagatgggaaaattgaattattatttgtaaagcgttttgttttaggggtttagaattatgtaagtatgttggtggtttgttttttaggttttcgttatatttttaaaatttaaggtttatatagattttgtgtattttgttggtgtttgtttaagtgagttttttttatttcgggtgaatatagtagtatatggatgtagataatgttaaagttttatttacggtttagatttttaagtgttaaagagtttttttttttttgggtgggggtggggtaggagaaatttttttttagtagattttttttttataataaaaagtgttaaatgaagaaagtttgatgtttaaaatggatgttggaatgttaatagttgaattggaattttaagtatatgattaaatttaagattggatttgtagttaggatttttattttattttttttttagaatgaatttggaggggttgtaagatcgttatggggattaaaggttatatttagagtttatgtttttagggtttgtggattatgttaaggtttggaggtatcggtttaagtttataattgagagttatgaaatttttttattataataaatagggttataatgtgtaattttagtagggagtttaggtggtttatttggtttatagtttattttagaaagttatttggggttgtaatgatttggttgtagatgttttgtttttttttggaagtggttattggtaggttatttattagggttttaggaaagttttttttttttttgggttttagtttttttatttgttaaatagtttattgaggttttgttgtaaagttttttaaggggttttatattttgggaagtatatatttttagggtttagtatagagttttatagaggaggtttttatttgcgaggatttggttttaattttttttaattttagtttgtttttttttttaaggaaatattgagataaaagagatattaagaatgtaaatattttaagaatatgtaaataaacgtatttatattttttttttaagaattttgagtaattttttaaatttttttggtttttttttaatgtttgggttgtagattagggtatgaagataaaatagttttatttaagtaatagataattgtgatttttgattgtcgaaaatttatttttttttgttaaatagattttagaagttatttagatttttttataattttataatttatattaatttatattatagtgttattaaggtggtaattatgatgattgttaaagtttaagaatgacgatgtgtattagtatttttaagattattttttgaatattttaaaatgtataataatgtacgatatttggtaaatgatataattttgtttcgagagataaatgtttttagtagttttaatagttgattagagttagtgtatgttttaggtattttgtttttttatgaatttagtattttttaggggtgaatagagttagttttgtcgagttagaaaataattttattcgggcgtggaattttatagttatataaattataaagggattgtttattttgttagttttagatgggggtttgtttagtgatatttgtttaacgtgatcgttggggagttgggggaattaggatggggagaatttttttagtttttagttgtgtaaggtaggaattttattttttatataattaggtgaggttggttaagaatgtttgaaagaatagttgttaaatttatttaaataattttcgtttttttttttaagggaataatgtgatgtttttattagagtcgttgtttgtttgatattgatagtggttaagttaagagggtaattttgttaaatgtttgtatttttttttttttggggttttttttaataatattttatttttttttttattttagattaagaagggagatagttttaggattgattttaattttttttcgtgttattgaaattgatttagtttatattgttcgtatttattacgtatttggaagtttgtttgaggtcggcgtaggtgtaggggtggttcgagttgtaagaatggtatggtattgaaagtggtacgcggagtttaaatttatattttgttgtggtcgttgggtaattttaagaagttattttttttttagttttaggttttttaatcgtagaagatattaaaattcgaatttattttatttgtttttggatatatcgggattagatattgttttgtaaattaaaaggttgtgtaaagttagtattttaaaagagaggtattattttttataacgtgtttgtttattttttttggtttaaattcgtttatatttttttatttttaagtatttttgggattgtagttcgtgtgtattttcgtgcggggcgaggagaattttttgtgtttaggatttttttaatagttaaatatcggtatcgttttttttagtttcggaaatttttaatttatttttattgaaagcgttttgtaatttataagtattttgtatttagagaatcgagtaagtagagggtcggttggggagggttttttcggcgatcgtttttatttttttcggagcgtttttagtttttttatatattatttttagtgagaagaaaagcggagtttttcgtagcggtatttagtaatttttaggtttttcggcgttagtgcgtcgggtgttgtacgtagcgtatttggcgcgggcggtttatttggagttggcggcgttggtagtaggtaggcgcgtaggcggttgacggtattagcgttgacgtagagttcgcggtcgtttagtagcgtttgtagcggtcgcgtttcgtcgggcgacggttggtagcgaaggtcggagttatagcgttcggtgtagatgtcgtacggttggttttcgtttagtgcgtacgttaggtagtagtcgtagttcggttcgcgtattagtttcgcgtatacggcgggcggaggcgcgtattgggttagtgtacgcgcgtcgtacggttcgtagcgtattacgggatttaagttcgtcgagttcgcgttagttcgcgttatcggcggttcgcggagtagtattagtagagttagcgtagcggtttagagcgtgggtcgcgttcgttgtatgacgtttgtaatcggggtacgttgtttggtaggttgggcgcgtagggatggggcgatagtatacggcgcgaagttgtggaatttaggtaggaagcggttgatttttagcgtttagtcgtagtgttcgtatttgggcggttcgggcgcgtcggtcgttatatagaagtcggggtggtttaggatacgtttcggaacggcgcgtttaggagtgggggttgggaggggggcgggtcggcgtaggtacggttgcgggggttcgtgtttcgttttgagtagtcggggtcgagttcgggggcgtgtagttcgagattcgttcgggtatttgtttttcgtgcgtacgttcggagttcgggttattttgtcgtttataagaattaaggtgtgttcggttatttcggtattttaggttattttagtattttcggttattttagttatttttggttaatttagtattttcgatttttttgatttcgtcgtttttatttttttcgttttcggggtgaggtttttttgcggcgagtcggtgtcggggaaattggtatatagcgtttcgtattcgtgtgtatttcgtggagttttttaaaatttaatttcgttggtaggcgaagttttgggatatttttgatttatatttgggttttagggagttaaggtattgcggggtttaatttatattcgttgggttgtttatatttttaggggtttataaatacgtatttgaagatgcgttcggggttttcgtttttttttaggtttattttttaacgtaagaagatttttacgtgttgttatatcgtaagtttttaattaagagtggatcggtaagcgaatgcgtttttaaggtagggttttttaaatattttaaatgataattgttttttttgttttgggtattttttttgattatgtttttaaatggagtttatatttacgataaaagaataataaagataataaattgggtattgttgaaacgtaattaattaaatagttttttaataggtaatttttattgttattttttgaaggcgatttcgtattattgtattttcgatgcgttgggattttagtttatttttgtaatttaaatattttttagtaaagttcgggggcgtaattgcgcgttgaggtcgttgtaatttttgtcggttttttttggtattcgagtttttttagttttgtttgcgtatttttttttttcggtgattaatagaggacgttggtggtttaggattggattgaggattaaattttttaaggtatttttttaaagagtttgtgggggtggagtgggaagcggtgagattttcgcgggaggagatttttttgaacgttgttgaaattggacgtttgttttaggaggtggataggtgatttgaaggagttttttgtagtttggagtagtaatagtaaattaggagtttttttatttttttttagtacgaagttttgggtgaagttaatttttatttattatttttgttttttttaatcgatttttcgtttagtgtttttttttgtttttttttttttttttttttttttcgttttttttttttttttttttgtttatttttttttttatatttatatagtttttttttatatatatatattttttttttagaatggaaagattaatttcgtttttttttgtattaaataaataaataattggatttttataaataaaaagagattaaagataagaataatggagtgtttcggggtgacgaaggtttagtatcgttatttttttatgagttttttttttatagtgtttaggttgtggttatatttaattttgtttataggaaatcgtgttataatcgtcgtttgttgtttttttttttttgtattatttttttttagtatttgcgttgatatttaagaataggatttttgattttattggaaaattgaaggaaataaaacgaattttttaggtttatattcgttttttaaatattcgtagagattttgattttgaaattagagttgggttcggtattaaatgtaatttttgaggttttaggtttgtagttttggttagtgtaatgttgtagtagagtttggattgattattggttagtgtagtattttttatttagttttattatttggagagtggataggggaagattagaaataatgtttttttggaaaggattaaaaaatttgttttatttttggttttttttttttttttttcgtattgtagttggagaaatttgtttagtgtcgaatggttagggggcgttaaagttttaggcgtttagttcggttttagggattacgggatatacgtaaagattaagttatattttaatttttaaaggttattttaataataatgttttatatagattgttattatttttattatgatattttgtaatagtagagtaaatttgaggtagtgatacggggagaattgtgttttgttatttagttagttttatttgataattgtaagttttttgtttttttcggaatataattgttgtaggaaggatttggattggataaaatttaattttgtgatatgttcgttaattttgttaaatttttaatttatttggtgtttgtagtttttaatataaattagtatttagtgagaaagatgtttattttttgtgaaggtgtttggtatataattgttaattattgtaaaagtagcgaataattattcgaatagaggttaggaggttgtatagatttttttttattaacggagtttagttgatttgattataattagtgttttttttggttagtttcgttatttttattaggtgatttaaattatttatttttttgagtttatttttgttgttaaagggtattttgtcgttgcgtgatattggtttttttgttttttttttgtttagtttttagttggataagttattttagggtttttttttttttgatagtattattgttttttagtgttttttggggtgtggttattagttttattgattattaatagatttagaatagaaagagttaaatttttaaaggtaagtagtgttggggatttagttgttaggatttagtggtttttattttataagttttaggtttttttttttttttaggggacgtattggtggagataggaaatttaattttttttttattagatcgtttgttgggtgagtttttcggaattatatatattgggtttggggatgtattggggattattaattgttaatattacggtggttaataatattgtaaatgatttttatttataaataatattattaagagtttatttatttatttagtttaagaatgattattaagtatttttatgtgttagttgtaggattttataggttggttggagtgatttattagagtttagatagtggtaggtagtgtgatagtagagaaaatagagaggtttatcgggtgtatttataattttgttggagggatggtaaatttgttcgtgtggttagaaaaaatttttgagaggtggtggtatttgaattgagttttaaataatgtgggagagtttagttgagagaggtaggtaagaagaaagtatgggtatttatagagagttattttgtgtgtttggagggacgaggggagggtttagaggggatggtgttggtattgtgtatgtgatttgtggaaggtataattttgagatttggaagagaagagaaggtaattggatatattggatggggatagtggtatttgtggtagtggaaatttatggtttagagataggggttttttagagttagtgttgtttcgtgtcgttagataatttggagatagatgttttagagaaggggtttggatattgggagtttattttatggaagggaggtttttgtttaggataatgatatttttgttatggtttttttttataatagtgttattttttatatgtgggtatttatatttttgtttatatagttagttatttatatgataagagttatttttgtgttttttggttatttaaatagaggtaatttttgattttgtttaatttttaatttttttttaaggttgaagttttagaataatgagagagattggggattttaattatagtagattagagtttatttttaattgtttgtttagttttttttttaatagttttttgatattgggtaagttttgtaatttaattttaggattaggtaagggtattagtatttattttatagtattgatggaaggatgaatttttagatatagtgttgtttggggaatgggaaataaaagtttatttttgtgtttatatagttatttgaataattttaaaggttttatttttaaatgagttttagtatatagtttatatattttgtttttttagtttaaatgttaatatgttaataattgagtttatttgtgggtatgatatatagtttttaaattggttaatagtttagtatggtttttttttgtttagtgaagttttaaaaggggataggaaagattttaggagtattttttatttagttggtttgttttcggtattagtgttaattttgtgtttttatttaagggtatttttggtgttattttaagttttttttttagttttgtaaggttagatagaaaggagaagatttttagtagtttttttattatagttagaagagttttgagagttttgttatttattttttttattggagatggagagacggaggtagattttttttgttggattttttagattataatttatagattttatggtgtttttttaatttgatagatagagagatagattttttttttttattgatgtataattaatatataatgtattatatagattggaagtgtatgatttgataggttttgatatatgtatatatttaggaaatcgttaatatataaatgaatttttttattatttttaaaaattttttgattttttataattttgagttttttttttttttatttttattttttggaagtcgttgattttttttttg

SEQ ID NO: 977 - DNA, 5951 bp, Artificial Sequence
  chemically treated genomic DNA (Homo sapiens)
atttgttaatttgttttgtttgttgtttttagattatttttttaggtttacgttatttttttgttttagttttttaagtagttgggattataggcgttaattattatatttagttaaattttttttttttttttttttttttttgagacggagtttcgttttgtcgtttaggttggagtgtagtgacgcgatttcggtttattgtaagtttcgttttttaggtttacgttatttttttgttttagtttttcgagtagttgggattataggtatttgttattacgtttagttaattttttttatttttagtagagatagggttttatcgtgttagttagggtggttttaattttttgatttcgtgattcgtttatttcggttttttaaagtgttgggattataggcgtgacgatcgtgttcgataagggaggtagatttttttttttttttttttttttttttttgtagttgtaagatttaatatagtgaaaatagagtttttatataaagggaagggatttaaagagggtagttattgtcggtttggatgttcgggtttatgtttcgattattgtttttttcgttgtgtttttaggcgatagatgattggttatttttttatttttcgtttttgtttaattagtattttagtgagttttttttattatttgattggtcgggtgtgagttaagttgtaagtttcgtgtttaaaggtatatgcggttatttttttagttaggtttagggatttttagttggtttaggaaatttagttagttttgttttttagttttcgtttttaataggaaaatttaagtgttgttggggaggttggtcgatgattgttttaatgggaggtagattttttataagattttgtaaattgtagaatgtattttttaaaatttatttgtataagtatatatatatatatatatatatatattttagtagtttttgtttgtttagatttttttgtagttaaagtgatgaaatttattgggcggagttttttaaaaagattattagggttttttgggttggtgtgtttttaaatttttggattttattattttttattttttttatttttttgtaataaaggttaggagaataagaatgtagaaaaaacgggttttggatgatatttgagtgtttgttttgggttttttgatgagtgagatagaaaataaaatataatttttttttttaaaagttatgtttatttaggtttttttttatttgtagttaaatatagaaatgagagaatattttggagtagggatggaagaagagaggtatttttttttttataattttttgattttttagtatattttttattggaaaaatttatttaaaattagtataataagtattgattagatgtttattatgtatttgggtttgagggtaaattggatttaggttttttggttttaagaagtttatagtgtgagagtggtatttgtgtttttttgaaatttataggattaaattgtgtttaggttgatattttatttatttataggtgtttgtttttttatttttttttttttatgggtttttgttttgtattaaaatttaaatttaaatttttttatatgtgagtgttggtatttatgttttagatatgatttatgggtttgggattttttttcgtggattttagtgattttttagatgaataggtatttttaaaaatttgagaaataggagttttgtttgttgtttttgttgttttgttaatataaggatatagggtttttatttaaatgtttatatttattttttgatagaaatattatgagatatattgatggagaagtcgttatttttatatgttaaatgaggatttgtattagggaatttgtttatggttttttttaattatttaaattttgaaattttgaaatgagagtggatagtaattttaaattaatggggaaagaattaaatttttagtaaatggtttgagataattagttatatattttagaataaataaagaagttagattcgggtcgggtatagtggtttatgtttgtaattttagtattttgggaggttaaggcgggcggattataaggttaggagatcgagattattttggttaatatagtgaaatttcgtttttaataaaaatataaaaaaaaataaaaaaatttagtcgggcgtggtgttaggcgtttgtagttttagttattcgggacgttgaggtaggagaatggtttgaattcgggaggtagagtttgtagtgagttgagattatgttattgtattttagtttgggtaatagagcgagattttgttttaaaaaaaaaaaagaagttagattttaattttaattttatttaatagattatagatgaaagaaaggtataaatggtttttatatattttttttttttttgatattttgtatgtgtgtgtgtgtgtatttatatatatattttatataaggaaattgaagggaggttgtttgtatttttgagttattttttttttttttttgaatgtttatttgtgtttagattatttttttagtttcgtattttttaggtttatagggtatttttttatgtttattttaagtatagttgatattttttaagggttagatttggtgttaagtattaagtacgtaaagattaataaaataatgttttgttttagggagtttaaagttgattcggtagggtatggtgtgtatatgaatgataattacgtagggttgtaggttttttagtgaggtaagtataaggtaagatgggaaataaaggaaggaggggtttatagttttatttagagtttagaatttttggtttgtttggtgtttatgttgagtttatttttggaatatttagtttagagagggtagttagatttgtaggttaatatagatatagtttagaaaatttagagtcgaggggaaggagaaaggtgtaagaagggaaatttaggttttggtttttttttttttgttttttggtagtagaatttagatagaatttttaagttagtttaagtttggtaggattagtaagttttgagttagttttatattagtttttagtaggtttttttttattttttgatttttaggtttttatattgatattttttgaagagttgggaagagatattatagttttttgattttgatttataggttatatagtagggatattttatagggtggcgtggtttttttattttttttttttatttattttatcgttggttgggtttaaggtgtttgtatttttgtagtgagtgattttttttagtgtagtaagtttagaatttgttgttattggagttgttttattgttgatgtagaaaggtgaagaattagtagaatattggaaatgttttttatttgggtttatggttatttaagtttaatgttttttggtaggtaggaggataggtgttattgttttgttgggatagatgaaaaatagatatagggaggatgagtgatttgttttgattatagagtggtagggtaaggtagagttaggtttttgtatttaggttagtgttttttttagttatagtttaaattggaatggtaggtaaagttttgtggaaggggaaggtgaaggtttaattaaaggatttttagagattttttagatatttgaagaagttttgatgttattgtttcggtttttttttaggtagagtaatatttttcgtcgtaatttaattggttttttttattttttatatatatatatatatatatatatatatatatatatatatatataaatttaagataatattattaaggtttttttgggaaggggaagtagggataggtaagaggaaagtaagggattttttatttagtttttatggaattttgattttttttttttgttattttaattttttttattttattttttaaattttagattttagttatagaagtttataattaaaagaaattttaaggttaatttaatttaaggttttattttatgtgttggagatggtgtatagtagggtgaggaaattaaatttttagttggtattggtgtatttttgtataggtgatgtaatatttttgtgttttagtttgtttattataaaatagagacggtaggggttatggtgagtattatttgattagtatataagaagtttttagtaagtgtagattatttttatttattttttttaagtatagttggggtgggggatagttgaagaggtggaaatatgtgtttgagaattttaatgaaatcggggtaaaggagtttggaatatattttgtgatttcgtttgtattgtaggaagttagtttttggaaagtaaaatggaagggttgtttgggaattttgaggatatttagtttatttttttatttttatttggggaaattaaggtttagagatttaaggtgattgtttaagttagtaaggagaagttttgggtatttattttaggttggggggatttaattattttttaattttattgtattttggaatgggtaatttgtttacgttattgtgatttaggaatacgcgaatgagaatttatagttgagggtttttgcgtatagaatagttgttttttttaggaaattaattttttttaattgagaagttaaaaaattattttaagagaggtagtttattttaaaaatagttgtaatgtagaagtttatgtttaattaattatttttgtttacgatgtaaaaattgaaaattaagtttattagagaggttagagaaggaggagttttaagtagaaaaaattttgtgtcgggaaattttgattgtggttttttaatgaatgaagaggtttttttgagtttataatataaaagggggatagagaggtgaaggtttatatattaggggtttgtttttgtaaaattaaattataagatagatttgtaaaagaaggtatgtatagtttagtattgttttgttgtttggtttttttgattggggtgagggttagtttaggttagggtatttagtttgagaatagttgtatttattttttaggtaatttgtttaatatgtttcgagattttcgagatgtttttagtagagtgaagattttttttgtgagtatgatttttttttgttttttttttttttttgggattgtttgaattagatatttttttggaattataagaattttttttttgcgtttttatttttatttttaatatttatttttttaaatttaaatttttaagagaattttagattaagttatgggtttggtgagttaagttaagttagatgatatagtaaatgtgtaggaaatttgttttataaagtaaatgcgttttttttcgtgttgagaaatttataagattttgttggcgttttatattttattggttaggagaagtaaagaaatgtttgattcgaggtgaagatgttttttatgttttgtagtagggaaatttaaattgtttttgtttagagcgtttttagatttgaaagattagtggtttagggaagtattttatatgagggaaatttgtattagaaggagttttttaatttttgggatttttttaagttaaattggatgtttatagtggggagaaagaaaagtagagaataggatatgaggggggtttaaggtttcgaagggttgatataggtgttttttaaagtcgaatgtagtttcgtagaaagaagattaggattgagttaagtttttgttttttttttaaaatcggttagattttttaaataatttgattttgaggaggaggatttgatttaagtgatggttttattattgttgaattttttgtttttaaaattttttttttgatttttttgggttagagttaattttatttaaaaaaaaaaatttttaaatgaaagggtattaaaaagatcgtattttagttatttttttaaattttaagtttattttttttttgttttttttgtagt

SEQ ID NO: 978 - DNA, 5951 bp, Artificial Sequence
  chemically treated genomic DNA (Homo sapiens)
gttgtaggaagaataaaaggagaatgaatttgaggtttggggaaataattgaaatgcggtttttttgatgtttttttatttagagatttttttttttaaataaaattggttttggtttaaaaaaattaaaaggggagttttaaaaatagaggatttaatagtgatgggattattatttaaattaggtttttttttttagagttaagttatttaaaaaatttggtcgattttgaagggaaagtagaagtttgatttagttttggttttttttttgcggagttatattcggttttaagggatatttatgttaatttttcggggttttgagttttttttatgttttgttttttgtttttttttttttttattgtagatatttagtttagtttggaaagattttagggattaagaagttttttttaatgtaggttttttttatgtagagtgtttttttaaattattggttttttaggtttggaaacgttttaagtagaggtaatttaaatttttttgttgtaaggtatggggagtatttttatttcgaattagatatttttttattttttttagttaataaagtatagagcgttagtaggattttataagttttttagtacgagagagaacgtatttattttataaggtaggttttttgtatatttattgtattatttggtttagtttaatttattaaatttatggtttgatttaggatttttttaagaatttaagtttgggggaataggtgttggggatggaggtggaggcgtaggaggagggtttttatagttttaggagaatgtttagtttaggtagttttaggaagagagaaaggataggaaggaattatatttataaagaaagtttttattttgttgaaggtatttcggagatttcgaagtatgttaggtaggttgtttgggaagtgggtgtagttgtttttagattgggtgttttggtttgggttggtttttattttagttaggaggattaggtaatagagtagtgttgagttgtgtatgtttttttttgtaagtttgttttgtggtttggttttgtaagagtaagtttttgatgtgtagatttttatttttttgttttttttttatattgtaagtttagggaggtttttttatttattaaaaagttataattaaggtttttcggtataggattttttttgtttagagtttttttttttttaatttttttaataaatttagtttttaatttttgtatcgtaagtaaaaatgattggttgaatatgaatttttgtattatagttatttttaggatgggttattttttttagaataattttttagttttttaattaaaaaaagttgattttttggggagaatagttgttttgtgcgtagaggtttttagttgtgggtttttattcgcgtgtttttaggttatagtgacgtggataaattgtttattttagaatataatgggattgagaaataattgggtttttttaatttgggatgaatatttaagatttttttttgttaatttaggtagttattttaggtttttgggttttagtttttttaagtaaaaatgagggggtgggttaaatatttttaaagtttttaagtagtttttttattttattttttagagattggttttttatagtataggcggggttataggatgtgttttaggtttttttatttcgattttattaggatttttaggtatatgtttttatttttttagttgttttttattttaattgtgtttgggggaagtgggtaagagtagtttgtatttgttgaaagttttttatatgttagttaggtagtgtttattatgatttttatcgtttttattttatagtgagtaaattgaggtatagagatattatattatttgtataagggtatattagtgttaattgagaatttggtttttttattttattgtatattatttttagtatatagaatgaaattttggattaaattggttttagagttttttttagttgtaagtttttgtggttggagtttaaagtttaaaagatggggtggaagaagttgaaataataaggaaaagaagttaggattttatggaggttggataggaggttttttattttttttttatttatttttattttttttttttaaagaagttttagtagtgttgttttggatttgtgtgtgtgtgtgtgtgtgtgtgtgtgtgtgtgtgtgtgtgtgtagaaggtaaggggagttagttgggttgcggcgaggagtgttgttttatttggggaaggatcggggtagtgatattaggatttttttagatatttggaaagtttttggggattttttgattgagtttttattttttttttttatagggttttgtttgttattttagtttagattgtaattgggaggaatattgatttaggtgtaggagtttggttttgttttgttttgttattttatagttagggtaaattatttattttttttgtgtttgttttttatttgttttaatagggtaatagtatttgtttttttgtttgttagggagtattgagtttaagtagttatggatttagatggagggtatttttagtgttttgttagttttttatttttttgtattagtaatgggataattttagtggtagtaggttttgagtttgttgtattagagaaggttatttattgtaagggtgtaaatattttgggtttagttagcggtgaagtgagtgggagggagggatgagagggttacgttattttgtgggatgtttttgttgtgtgatttatggattagggttaggggattgtggtgtttttttttaattttttagggagtgttaatgtagaaatttaagaattaggaagtgagaaagagtttgttagaaattagtatggagttaatttagaatttattggttttgttagatttagattggtttaagggttttgtttgagttttgttgttaggaagtagagagaaggggattaggatttgggtttttttttttgtattttttttttttttttcggttttgggttttttgggttgtgtttgtgttagtttgtaggtttaattgttttttttgagttgggtgttttagaagtggatttagtatgggtattaggtaggttaggggttttggattttgggtgaggttgtgaattttttttttttttgttttttattttgttttgtgtttattttattaggaaatttgtaattttacgtggttattatttatgtatatattatgttttgtcgaattagttttgagttttttgaaataggatattgttttattaatttttgcgtatttggtatttagtattaagtttggtttttggaaggtattagttatatttgggatgggtatagaagagtgttttgtaagtttggagggtgcgaggttaaggaggtggtttgggtataggtaagtatttagaaggagagggagagtgatttagggatgtaggtagtttttttttaatttttttatatgagatgtgtgtgtaaatatatatatatatatatataaaatgttagggagaagggaggtatgtaaaagttatttgtattttttttttatttataatttgttaaatagggttgaggttaggatttgattttttttttttttttgagatagagtttcgttttgttgtttaggttggagtgtagtggtatgattttagtttattgtaagttttgtttttcgagtttaagttatttttttgttttagcgtttcgagtagttgggattataggcgtttggtattacgttcggttaagtttttttatttttttttgtatttttattagagacggggttttattgtgttaattaggatggtttcgattttttgattttatgattcgttcgttttggttttttagagtgttgagattataggtatgagttattgtgttcggttcggatttgatttttttatttgttttgaaatgtgtagttaattattttaagttatttgttgaagatttgattttttttttattgatttgaaattattgtttatttttattttaaaattttagaatttaagtggttggagagaattatgggtaagttttttggtgtaagtttttatttagtatatggagataacggtttttttattaatatgttttatagtatttttgttaagagatagatatgaatatttgaataaagattttgtgtttttatattgataaagtaataagaataataaataggatttttattttttaagtttttgaagatatttgtttatttgaaaagttattggggtttacggggaaaagttttaagtttataggttatgtttgagatatgaatgttaatatttatatgtgaggagatttgggtttggattttggtataaggtaagagtttatgaagagagggaagtgagaaggtaggtatttatggatggatagaatgttagtttgggtataatttagttttgtgaattttaagaggatataaatgttatttttatattgtgagttttttgaggttaaaaggtttgagtttagtttgtttttaagtttagatgtatagtaggtatttaattaatgtttattatattgattttaaatgaatttttttagtgggggatgtattgggaaattagaaggttgtgggaaggggaatatttttttttttttatttttgttttaaaatatttttttatttttgtatttagttgtaaatgaaggaaaatttgagtaagtatggtttttaaaagagggggttgtattttattttttgttttatttattaagaagtttaaagtaggtatttagatgttatttaggattcgttttttttgtatttttgtttttttaatttttgttgtaaggagataggagagataggaggtggtaaagtttaaaggtttaaaggtatattaatttaggagattttaataatttttttaggaagtttcgtttagtaagttttattattttagttgtagaggaatttgggtaggtaagaattgttggggtgtgtgtgtgtgtgtgtgtgtgtgtgtttatgtaaatagattttggagggtgtattttatagtttataagattttataaagaatttgttttttattagagtagttatcggttaatttttttaatagtatttgggtttttttgttgagagcggggattgagagataggattagttggattttttagattaattaagaatttttaagtttagttgggaaggtgatcgtatatatttttaaatacggggtttgtaatttagtttatattcgattaattaggtggtaaagagagtttattaaaatgttaattaggtaaaaacgggaggtaaagaaatagttaattatttatcgtttgagagtatagcgggagggataatgatcgggatataaattcgggtatttaagtcggtaatggttattttttttgggttttttttttttgtatgggagttttgtttttattgtattaaattttgtaattataaaaaaaaaaaaaaaaaaaaaaaaaagaatttgttttttttgtcgggtacggtcgttacgtttgtaattttaatattttgggaggtcgaggtggacggattacgaggttaggagattgagattattttggttaatacggtgaaattttgtttttattaaaaatagaaaaaattagttgggcgtggtggtaggtgtttgtagttttagttattcgggaggttgaggtaggagaatggcgtgaatttgggaggcggagtttgtagtgagtcgagatcgcgttattgtattttagtttgggcgatagagcgagatttcgttttaaaaaaaaaaaaaaaaaaaaaaaaaatttagttaggtgtggtggttggcgtttgtagttttagttatttgggaggttgaggtagaagaatggcgtgaatttggggagataatttagagataataaatagaataggttggtaaat

SEQ ID NO: 979 - DNA, 6456 bp, Artificial Sequence
  chemically treated genomic DNA (Homo sapiens)
tttttggatagggagtttatattttttttttggatttgtttttttatttgtgaatagaggttagggagtggtgggagggagtcggttaaacggagattttgaagtttttatattgattttttttattattttttagtgattgagagaaaatttggtttttaagaagaggaaatcggaatggggggttgggttggaattataatttttagtgtattttaatttatttatttagttttgtagtatagtgaggagggagttttagttttttgggatagtttttgggttagaagttttgtatttgaaggaaaagggggttgtaaatttagatatttgtattagagggagaaggggttggagtttggatttttgggtttgagggaggaggggttgggggtttggattttcgggtttgagggaggaggggttagagtttggatttttgggtttgagggaggaggggttgggggtttggatttttgggtttgagggaggaggggttgggggttttttagatttttgggtttgagggagaaggggcgggagtttggatttttgggtttgagggaggaggggttgggggtttgaatttgtgagtttgggaggatggtttaggagttagattttattttttaggaagtttcgtggggtgatttttcgtgttatttattttttttgtaaatattttggtgggtattgagtgggtttcgggttgttttcgttagagatgatataggttagagggggttttgtagggggtcgggggtgagggttagaggggttgtggggttgaggtcgggtagttgttgatcgttttttgtgttaatattatttggatttattttttaattttcgggattttttagggattaaggagggggtggggggcggggtcgtttggttttggatcgcggtttgggattgggggggtttcgtcgttacggtttttatcgttaatgataggtttgggttgtttttgtggtcggtttgtttcgttattttttagaggttagacgggattttttagggattgatagacggatatatatatagtttgggatttgttgattttatattttgtcggttcggttttttttcggggtcgcgcgggagttaggattttttggttattttttatgttttcgaggtttttttttagtgtttgtgattattttagggtttgggttttggttgtttagtttgttttcgagtttttaagttggtttttagtttttattgggtttcgtggcgttggttgttttttggggtttttgttgtttttgtttttttagttttgtttgtttttgttatttgttatttttttgggattttttagttttgtttttgggtttttttttcgatttttattttttgttttgttttttttttttttttttttttttgtttgtatagaagtagtttaatgtgttttattttggtttgggtagatttaggagttgttagttatttttagtttcgttattttgtattcgttttatttatttgtattttttgtagttatattgcggggacggagtttgagtttataatttagggttggggatttagacgagataggaaattggtagcggttgggattttagatttgttttagatttattattttttttatatatgttttttaaagtgtagaagggttttaagatttttttttattttttttgaattagaatttagggtttggatttttgggtttgagggaggaaggtttgggagtttggatttttgggtttgagggaggaggggttgggggtttggatttttgggtgtgagggaggaggggttgggtttgaatttttgtgtttgaaggaggtaggggttgggtttggattttcgggtttgagggaggaggggttgggtttggatttttaggtgtgagggaggaggggttggggatttggattttcgggtttgagggaggaggggttgggggtttggattttcgggtttgtaggaggaggggttgggggtttggatttttgggtttgagggaggaggggttgggtttagatttttgggtttgagggaggaggagttgggggtttagatttttgggtttgagggaggagggtttgggggtttggatttttggatttgagggaggaatggttggggtttggatttttgggtttgagggaggaggagttggagatttggatttttgggtttgaaggggaaggggttgggggtttggattttcgggtttgagggaggaggggttgggggattgggttttggtttttgtaggtggacggggttggtattattagaattttttttttgttttttagttggttttaggttagttttttatattttcgggttagtttattttttaagttggtggtttgagttattttggttggtttcgtcggtttggggggggttacgttagttttttttttattgacgtagttttgggttttttatattgatttagtcggaagtaggttttttgaggggcggagattcggtggttagaggtttgggttttagtaggagttggtgttggggaaggtttttggggggttttgaaaggggtggttgtgatagattagagagagggagagagagtttttatttgaggcgatgaggttatgttttatcgtgggggggttgtgattttatttttttggggatttgagtagttgtttttttagtggtgttggattgggaaggggaagtttttaattagttcggtagtttcggaggttgatacgagggggtttgtatagagttttagagtttttattattttcgcgtttttagttttattttgtttttttttgttatttaggtttgggggttttcggggatatggtttggtatttttgtttttcgtttgttttgtggtgaatttcgggttttttttgtttttatgtttggggttggtttattgtgagtttgggtaggcgtcgttgttttttttttggtttgtgggtttttttttttttgtattttttttttgtttttatttttgtgcggtgacgtttagggttttggtttcggtggttttggttattgttttcgtgtttttattgtttcgtttttattttattttgtttttgttttatttttttcgaaggcgatatttttttttttgtgtttttgatgtgtttagaaaagttaacgaggggaataaggatggttagtattgattttgtgttttacgtgaatgagttcgttttatttttatcgtggtatttaggcggatgagggtgtattattaatttttttttatagatgaggaaattgaggtatagagggggagagtcgtatatggaggttttgtttttatggagtgttttagcgttttttggtttttagttttcgttttttttttttttttttgtttttatttgtttttttgagaaaggttttttaaaaggttaggcgtggtggtttatatttgtatttttattattttgggaggttgaggcgggaggatgatttgagtttaggagtttgagattagtttgggtaatatggtaaaattttatttttattaaaaatataaaaaatagttaggtatggtggcgggtgtttgtaattttagttatttaggaggttgaggtatgagaattatttgaatttgggaggcggaggttatagtgagttgagattatattattgtattttagtttgggtgatatagcgagattttgttttaaaaaaattaaaaacgaggttaggtacggtagtttatatttgttattttagtattttgggaggtcgaggtaggcggattacgaagttaggagttcgagattagtttggttaatatggtaagatttcgtttttattaaaaatataaaattagtcgggtgtggtggcgtatatttgtaattttagttatttgggaggttgaggtaggagaatcgtttgaattcgggaggtggaggttgtagtgagttgagattgtgttattgatcgcgttattgtattttagtttgggtgatagagtgagatttagtattaaaaaataaataaataaaaaataaataaaaaatgagaaaggtttttattttttgtttttattgttgagtttttaatattttagcgtttttgtttttttaatatttttgtttttttttttttgtttttggggttttttcgtttttgttattttgtttcgtgtttttgtttgtttggtgtttttttttagttgcggtattttttgttttagagttttggtgtttttgttttttttttttcggggtttttttgggtttttttaagttttttttgttgtttttttttcgttttttgatttttgatttttagaatttttttttttgtttttagggttgtttttttgattttttttgtttttttggtgtgtttttttggttgtttttatttttgtggatttttatttttttgtttttgttttagtttgttttttattttgtgtgtgtgtgtgttttttttttttttttttttttttatttttttttttttttgtttttatttttttaggtttttgttttgttttttcgttcggtttttttttgttttttcgtttttttgtttttttatttttttttgttagttttggtttagtcggatttttatttatagtcgggttttagcgtttgagtttgagtgtttgtttcggttcgtggaggtggagggaggggacgttaatgattttattagttttttttcgattatttttttttttttttttttaatttttttaattttttttttcgtgttttttttcgagcgcggcggcgtgagttttgtaaggtagtcgtttcgtttgaatggaaaaggtaggtagggagggtgagttaggatgtgtttaggtcgttttttttttgtcgtttgtttttcgttcgttcggcgtagttttttatataattttttaggcgtttatatttttttattgtcgcggttttgttgtttagggtatatgttttttttttttaggtcgcggtttagttgattttcggggtttttttttggtagcggatagggaagggttaaaggttttcggttttttgttttttgttttggggaatttttggtttttgtggggatatgaattgtaagttggtttatggggagggtggaggggatagggaggtagggaggagagggatttacggcgggggtgggagtagatttcgttgagtcgtatagagagggattcggagataggtagtcggggaggagagtagtttcggagataggaggcggcggaggagatgggtagagagagatatagataggagcggatggaggtagttaattagaggcgtcgtaggagggacgggttagatagggtttcgagagggagcgagacgcggagatcgagtaggggtagggacgtagggattggtgtcgggagggaggtgatttttatcgatttaggttttagggagttcgcggggatcgggagattttttgggatttcggtagagaggtttcggagggaaattgaggtagggttcgcggagagcggagtaagttagggagtagcgattttagtcggggggaggagagagattgggcgcggggggaaagcggggagagtcgggtagatgcggtcgacggaggcgcggatagatcgacggttggcgggttcggggggcgggttgggggtgtgcgaggcgcgggcggtcggggagcgttgattggttggcggggtggtcgggtgggcggggcggtcggggtgggttgcggggagcgagtttcggattcggggagcgagtttcggattttcgcgtttttcgcgttttttcgcgtttttcgtcgttagttttttcgttttcgcggttcggtcgggtttatggttttgttttttttcgtttaggtgcgttgcggttcgggtttttgtcgtttattcggcggggtttttgggagggcgtttaaggggtttttcgtgggagaggttcgtgtttttcgggtttcgttttggtttttggtttttttttttgtttttagttagttcgggttttcgcggttcggggagggggtaggttttggtttgtgttttttttattatgtttcgtttcggggtttagatttcggcgttcgggggcggacgggagacgttcggttcgtttattcgtttcgggtcgcgtttgtttcgacgggcggggtagttagagttagggagggagagggaagttcgtttggttttgcgatttgttcgcgggcgttttattttgggatttaagatttttagttttattttttttaaggtcgggagtttaggttttagattttttttttcgagatttaggagtttagattttaggttttttttttttagatttaggagtttaggtttttagtttttttttttttagatttaggaggagtttagattttagtttttttttttttagattcgggagtttaggtttaggttttttttttttagattcggagtttagtttgagttttttgttttattttgtttttagg

SEQ ID NO: 980 - DNA, 6456 bp, Artificial Sequence
  chemically treated genomic DNA (Homo sapiens)
tttgggggtaggataaggtagagagtttaggttggatttcgggtttgagagaggagggtttgggtttggattttcgggtttgagggaggaggaattggggtttggattttttttgggtttgagggaggagaggttgggggtttggatttttaggtttgagggaggaaggtttggggtttggatttttgggtttcggggaggagggtttggggtttggattttcggttttagggaggatggagttggaggttttaagttttagggtggaacgttcgcgggtaggtcgtagggttaggcgggtttttttttttttttttggttttggttgtttcgttcgtcggagtagacgcggttcggggcgggtagacgggtcgggcgtttttcgttcgttttcggacgtcggaatttgggtttcggggcggggtatggtgggggaggtataggttagaatttgtttttttttcgggtcgcgggagttcgagttggttgggagtaggggaaggagttagaagttaggacggagttcgggagatacggattttttttacgggagattttttagacgtttttttaggagtttcgtcgggtgggcggtagaagttcgggtcgtagcgtatttgggcggagaggggtagagttatgggttcggtcgggtcgcgggagcgggagagttggcggcggggggcgcgggggggcgcggggggcgcgggggttcggagttcgtttttcgggttcggagttcgtttttcgtagtttatttcggtcgtttcgtttattcggttatttcgttagttaattagcgtttttcggtcgttcgcgtttcgtatatttttagttcgtttttcgggttcgttagtcgtcggtttgttcgcgttttcgtcggtcgtatttgttcggtttttttcgtttttttttcgcgtttagtttttttttttttttcggttggggtcgttattttttggtttgtttcgtttttcgcggattttgttttagttttttttcggagtttttttgtcggaattttagggagtttttcggttttcgcgggttttttggggtttgggtcgatgggggttatttttttttcggtattagtttttgcgtttttgtttttgttcggttttcgcgtttcgttttttttcggggttttgtttggttcgttttttttgcggcgtttttgattggttgtttttattcgtttttgtttgtgtttttttttgtttatttttttcgtcgttttttgttttcgaagttgttttttttttcggttgtttgttttcgggtttttttttgtgcgatttagcggggtttgtttttattttcgtcgtgggttttttttttttttgtttttttgttttttttattttttttatgaattaatttatagtttatgtttttatagggattaggggttttttagggtagggggtagggagtcgggggtttttaatttttttttgttcgttgttaggggagagtttcgagggttagttgggtcgcggtttggggaggggaggtatgtgttttgagtagtagggtcgcggtagtgagggagtgtggacgtttggggggttatatagggggttgcgtcgggcgggcggggggtaggcggtaggggaggagcggtttgaatatattttgatttattttttttgtttgttttttttatttagacggagcggttgttttgtagggtttacgtcgtcgcgttcggaggagggtacggaaggaaaagttggaaaagttgaaaagggaaaggggggggtggtcggagaggggttggtgaggttattggcgttttttttttttatttttacgggtcggagtagatatttaggtttaagcgttggggttcgattgtgggtgggggttcggttggattaggattagtagagagagatggggaggtaggaggacggaaaggtagagaaaggtcggacggagggataagataggggtttggagaggtggaggtaggaggaagagggagtggaagggaaggagagagagagagatatatatatatatagagtgaaggatagattgagatagagatagggagatggagatttatagagatggaggtagttagagagatatattagagaagtaaagaggattagaggggtagttttggagatagagggagaggttttgggagttagagattagagagcgggaggaagatagtaggagggatttggggagatttagggagatttcgaggggaaaggaatagagatattaagattttgagatagaggatgtcgtagttgaagaaaggtattaggtaaatagagatacggggtagagtgatagggacggagaggttttagggatagaaaaggggagatagagatattagaaagatagagacgttgagatgttggggatttagtaatgggggtagagagtaaaagttttttttattttttgtttgttttttgtttgtttgttttttggtattgagttttattttgttatttaggttggagtgtaatggcgcgattaatggtataattttagtttattgtaatttttatttttcgggtttaagcgatttttttgttttagttttttaagtagttgggattataggtgtgcgttattatattcggttaattttgtatttttagtagagacggggttttattatgttggttaggttggtttcgaatttttgatttcgtgattcgtttgtttcggttttttaaagtgttgggatgataggtgtgagttatcgtgtttggtttcgtttttggtttttttgagatagagtttcgttgtgttatttaggttggggtgtagtggtgtgattttagtttattgtaattttcgttttttaggtttaagtgatttttatgttttagttttttgagtagttgggattataggtattcgttattatgtttggttattttttgtatttttagtagagatagggttttgttatgttgtttaggttggttttaaatttttgagtttaggttattttttcgttttagttttttaaagtggtgggaatataggtgtgaattattacgtttggttttttgaaaagttttttttaaagaggtaggtggagataggaaggaggaggagagacggagattgaggattaagaggcgttgagatattttatagaggtaagatttttatgtgcgattttttttttttgtgttttagtttttttatttgtgaaggggggttaatgatgtatttttattcgtttaaatgttacgatgaggataaagcgagtttatttacgtgaagtataaagttagtgttgattatttttatttttttcgttaatttttttgaatatattagggatatagagaaaaagatgtcgttttcgagagagatggggtaggagtaagatggggtgaagacgggatagtggggatacggagatagtggttagaattatcggggttagagttttggacgttatcgtatagaggtggaggtaggagaggagtgtaggggggaggggatttataggttaggggggaggtagcgacgtttatttaggtttatagtgggttagttttaggtatgggggtagaggagattcgggatttattatagagtaagcgaggggtagaggtattaagttatgttttcgagagtttttagatttagatggtagggaaggataggatgggattgagagcgcggaggtggtgggggttttgaggttttgtgtagattttttcgtgttagttttcgagattgtcgggttggttggaggttttttttttttaatttagtattattggaagggtaattgtttaggtttttaaggaggtgaggttatagtttttttacggtgggatatgattttatcgttttaggtaagagttttttttttttttttttggtttgttatagttattttttttagggttttttaggggttttttttagtattagtttttgttgggatttaggtttttgattatcgggttttcgttttttagggggtttgttttcggttgagttagtgtggggggtttaaggttgcgttagtgaggggagagttgacgtagttttttttagatcggcgggattagttaaggtgatttaggttattagtttgggggatggattagttcgagggtatgggggattggtttggggttagttggggagtaagaaaagggttttggtaatgttagtttcgtttatttatagggattagagtttaattttttagtttttttttttttagattcgggagtttaggtttttaatttttttttttttagatttaggagtttaggtttttagtttttttttttttagatttaggagtttaggttttagttattttttttttagatttaggagtttaggtttttaggttttttttttttagatttaggagtttagatttttagtttttttttttttagatttaagagtttaggtttagtttttttttttttagatttaggagtttaggtttttaatttttttttttgtagattcgggagtttaggtttttagtttttttttttttagattcgggagtttaggtttttaatttttttttttttatatttgggagtttaggtttagtttttttttttttagattcgggagtttaggtttagtttttgttttttttagatataggagtttaggtttagtttttttttttttatatttaggagtttaggtttttaatttttttttttttagatttaggagtttaggtttttaggttttttttttttagatttaggagtttaggttttaaattttagtttaagaaaggtagaggaggattttggggtttttttgtattttggggagtatgtgtggggaaggtaatgggtttgggataaatttggggttttagtcgttgttagttttttgtttcgtttgggtttttagttttgggttgtgggtttagatttcgttttcgtagtgtggttgtaggaggtataggtagatggggcgggtgtagagtgacggggttgggagtgattggtaatttttgggtttgtttaggttagggtgggatatattgggttatttttgtgtaaataagagaaagagagagagagagagatagagtaagagatgaagatcggaaaagaaatttagaggtaggattggggagttttaagaaaatgatagatgatagagataaatagagttggagagataggggtagtaaaggttttaggaggtagttagcgttacggaatttagtggaagttagagattagtttggaggttcggaaatagattgggtagttagggtttaggttttggggtggttatagatattgaggagaagtttcggggatatgggggatggttagggagttttggttttcgcgcggtttcggggggaagtcgagtcggtagggtgtgaggttagtaggttttaggttgtgtgtgtgttcgtttgttagtttttggggggtttcgtttggtttttggggggtgacggggtaggtcggttatagaggtagtttaaatttgttattagcggtgagggtcgtgacggcggggtttttttagttttaagtcgcggtttaaggttaggcggtttcgttttttattttttttttgatttttgaggaatttcgggaattgggaagtgggtttagatgatgttgatataggaaacggttagtagttgttcggttttagttttataatttttttgatttttattttcggttttttgtagagttttttttaatttgtgttatttttgacgaaggtagttcggggtttatttagtatttattaggatgtttataggagagatgggtaatacggggagttattttacggggttttttgagaaatggggtttggtttttagattatttttttagatttataagtttaggtttttagtttttttttttttagatttaggagtttaggttttcgtttttttttttttagatttaggagtttggggaatttttagtttttttttttttagatttaggagtttaggtttttagtttttttttttttagatttaggagtttaggttttagtttttttttttttagattcgggagtttaggtttttagtttttttttttttagatttaggagtttaggttttagttttttttttttttaatgtaggtgtttgagtttataattttttttttttttagatgtaggatttttagtttagagattgttttagggagttaagattttttttttattgtgttgtaaagttgaatggatgagttggggtgtattagggattatggttttaatttagttttttatttcggttttttttttttggaagttaagtttttttttagttattggggagtggtggggggaattaatgtggaagttttaggattttcgtttagtcgatttttttttattattttttaatttttgtttatagatggggaaataaatttaggagggaaatgtgggttttttgtttaggag

SEQ ID NO: 981 - DNA, 5394 bp, Artificial Sequence
  chemically treated genomic DNA (Homo sapiens)
tgaggttgtagtgagttattattatggtattattgtattttagtttgggtaatagagtaagatttcgttttaaaaaaaaaaaaaaaatgaagtttatgttattatttttggtagtttagtttttattttttttaattgttttttgttttttttttaggttgtagagagattaagggtattttttgaggtttattattatttggggtagaaggatagggagatagtaattatcgtttgattacgtcgattatagggttttgaatttttttttgtttttaatagttttgttgaattaagtagaaagggttttgaattttggtttggaatttgggtagatatagtattaataaaattgtgtattttaaatttttattatatattttaatattagaggagtgtgaatttttagagatttagggttaaaagttaaaggtatagttttagttataatttttttttgtttatagatgtgtaaaattttgatgtaaaaatttattttaaatttttgaataaaattaatatttagtattatatttagtttatagatttttttatttttggtgtaatgatagtatttttagtttaggaaattgttttaaaattttgtgttttggttgtggttgaggttttgggaaggttagagttttttttgttattatttttagggtgttagttttaagtttgggtttgagggtttgatggggagcgggtgagttggattttgattttagtggttagtggttagattttgggttgttggttagaattttggttttgtgagtggttgtagtttggttttgttttagtttataggggttaaaggggcgggtagggagtgtgtagggagcgtgtacgtggttttgtgtttttggtttttttagatttttatatgtgcgggtattatatatttttgttgtttttgtgttttaattattgtataaatagaaatagttttgatagagaagggattgttagagttaggaattttagggtttggaaggaaggtatggtttttagagtgatttggggtttatttagttttttttggatttgtttttttggtaacgttgtgggaataatagtttatgtaatataggagatttgatgttattggtgttttttaaattttaaggcgaaggtaggtattgtgaatgatgtagggatggttagaatggtttttgttttcgttttttttttaggggaattaagtttgtgggtggggaaattatattaaggttggatagtgattgaatttggtttaggagaaatttggttgtttgttttttagattagggttttttttttttgagattttggaggggaagtatttggaatttgggagtgttgttttggtttggaagatttgatagatatagtatgtatatatttttttcgagttttttatgattggggagtagatgagaattttgagtgggtggttggttttttgaggtatatatatattcgatatattttatatttttgatttggttgtattttggaattatttgggaagttttaaataatattggtgtttaggtttaatttttagagattttgatttaattggtatggggtggggttttgtagtttttaaattataatatttagtaaagtttgagaattattgttttatatagtttttttttttttttattttatttggagttaggggtatttttagtttttttaattatttggttagtggtttttgtttttagttttgttgttttagggtggataggtttttaggcggagatttaggaatttagttttagattttgttttaagtagtttttttagttcgggacgggataggaagtgttcggcggaggtgggggtggaggtgattggtagttggagtttttaatgggttaggagtttttttattttatttttttttttttattggcgtttgggcggagttattttcgttgcgggggtttagggcgggagggagtagaggtcggggtagagggcgagggcgagggtagagggcgttggcggtagcggtcgcggaaggtgaggtttggtgtagacgttaaagttttgttaggagtgggcggggtagggtgatgtatgatttgaaaggtcgggagtgattaacgattgttagtgtgtatgtgtttgtgaggttgtgtttgtgtgatagtattattgtgtgcgattttgagtgttatttggtgtagttgttagttaatgtgattgcgtgtgttagtgtgtatggagttggaggtgtatgtggttgtgtaagtgtgggattatgtgtgtatttgttaatgtatatttttggtgggattgggttgtgtgtttgtgtgagagggattgtgattatatgagggaatgtgttttgggaaggtttttgtggggtttgagattatgtttgttagcgtgagagtgggtggttggttttgtgtgtgttaatgtgtgattttagtagtagtagagtaaaagtgaggtttgtgattatgtgtgtgttttgggttttaatttaaatcgtgtgggagtatagttgtatttatgtattgggggatttattttaagagtttatgggattgattttttttttaagtgtttagtattgatagatatatttataatatacgtggtttttttttttttttttgtttaagaatttttagtattaggtttattgttttttattttttgtttttttgtttggtttagttttttttacgtgtcgttttttgtttttattgttgttttattagagatatttttgtgtgtttttttatagttttgtttttttggtttttttgtgtgggtgtatttttagttttgttttttttttttttttgtttttttttgtgtttttatgtttgttttttttgttgattttgatttttggttagttgggggtttgtaatagtgatgagatgcgggtttgtttcggttaagagttttttgagagagggggtttagattatgatgaagagttgtttttaggcggtgttgtgagttttggtaggggttgtgtgcgtgtgtgattgcgtgagtgtatgaatatgtgtaagtgtgtttgagtttgaggcggtgtggttgtgttcgtgtgattgtgagtgatcgtatgtgagagtgtatgagtttgagggtaattgtgggttttgtgtatttggtattaagggattaaaggtattttttggtgttggggtttaaagaatggagggggaggtgagaaatggttggaatttttaggggagggggaattggattttttggtttttttttatattttttaatttggggtttttttttttttggaagtatagttagttgtattttaaggaaatatttggtgaggagtgaaaagagggggagtttgtatttgattttttatttgattgtgtttacgtgtgtttaaaggtatgtttttttgttaattgtgttttttgagtttgtgtgtgaatgtgattgtgtttggttgtgtgaaaatatagggtattttttattgatagggatataagtattagttattttttttttttttttgttggttttggttgtgtttgtggttttttttttagatttgggggaggttttttttttttttagggttttgggtgggagggaaggagggaggaggtaggagtagggagggggtttggttaggggcggtagagttttagggtttagagggggcggggtagggaaggggaaggaggggatggttttggggttttagaattgagtggagtaggagacgggggttgtagttggtgagaggaagttttagaggttatggatattttgttgttgggattatcgaggtagggtggggttaagtagggtaagtgtggttgggtggttaggggtgagttaattggatatatttagatagatatatagataggtggaggttttgttttgttttatttttatttttgaagggttcgtgtttttttttttttggttttgtttttagagtttttttttcgtttgttttttcgttttttatttattttattattgtttttttttttttgtttttttttgtttagaattttttttttttagtattttttatttgttatatagatatattgttagttttttgagttttcgttgattttaatttagtttttttaatattttttatattgttttattattttttagttttgatttttgagtattttttggtgttgtggtttttatgtttgtttttgtaggtttttagttttttttagttttttattttttttttttttttttttttttcgttattttgtttttatttttatttgttggtttttcgtttatttttagtttttggtagtagttagggtatttggatttgtttaattatatagttttagtttgtattttagttttatttagttttataaattggagattaacgaagtgttaagagttaggtttagttgagtggtttaagtagttagattaaggagttaggtttaggcgagaagtttggtagttagggtaggggtgggttttagggtgggagtgtaggatgggtttagatttatgatgatattttttttttagggtgataaggtttgtttaggttaattagaggtagtgataagttttggattaggtgggggtaaatattagaatttttaatagttggattggaggggttaatgggagtggttgagttggtgttagtgtttggtgttaggggtgggcgttaagggtagtggagggggagttgttggtatagtttgttgttttcggtttttgttttgggttttaagtttaggattgagatggagggtgtgagggggtgtgtgtgttcgtgtgtgtgtgtgtgtgtgtgtgcgcgcgtacgtatatgtaaagtattgggtatatagtgggaaaggggattttaggttagttttcgtagtgatttttaatagttttattttatttggtgtattaattttttttttaggaagttttagttttggagaggaagagttaggttttagttttttattttaggggtcggggatttttgattttatttttttttatagatgagtagtagttgtttagggttgagtagggttttggtggtcgtggttatagttttggtgtttgttttttttttttgtttttaggtttggggttttttaggtgagaagaattttgttttataattttttaattttgatttgtgatttgttatttttattgtggtttttttttatgtttaatttgtgatattatttttgtttttgttatttaatttgggttttttttttattttgttttttgatttttgtttttagattataatatgatgttttgatttagtgagttttttattatttaggttttaatagtttgttttttatttgttatttttataaagtggggaggggggtaaaggaagagttttattttagaagtgttttttatagg

SEQ ID NO: 982 - DNA, 5394 bp, Artificial Sequence
  chemically treated genomic DNA (Homo sapiens)
tttgtggagggtatttttgaggtaaggttttttttttatttttttttttattttgtgagaatgatagataagaagtagattgttaaaatttgggtggtggggggtttattggattaaagtattatgttataatttggagatagaggttagagaatagggtagagagaggatttaggttggatgataggagtaggggtggtgttataagttaggtatgggaaggggttatagtgagggtggtaagttataagttagagttgggaggttgtagagtagggttttttttatttggggggttttaggtttgggggtagggggaggaggtagatattagggttgtagttacggttattaggattttgtttagttttgagtagttgttgtttatttgtggggagaggtagagttaaaaattttcgatttttgagatgggaggttaaagtttggttttttttttttaaaattgaggttttttaggagaaaaattgatgtattaagtggggtaaggttgttagaaattattgcgggaattgatttgaggtttttttttttattgtatatttagtgttttgtatgtgcgtgcgcgcgtatatatatatatatatatatacggatatatatatttttttatattttttattttagttttgggtttagggtttagaataaaagtcggaggtaatagattgtgttagtaattttttttttattgtttttggcgtttatttttggtattaagtattggtattagtttagttatttttattaatttttttagtttagttgttgggaattttggtatttatttttatttggtttagggtttattattgtttttgattaatttaggtagattttattattttgggggaagggtgttattatggatttgagtttattttgtatttttattttgaggtttatttttgttttggttgttaggtttttcgtttgaatttggttttttggtttggttatttgggttatttagttgggtttggtttttgatatttcgttggtttttagtttgtgaagttggatggggttagggtgtaggttggggttgtgtagttaagtagatttagatgttttggttgttgttagaggttgggggtgggcgaggagttagtagatggaaatggagatagggtggcggggaggggaggggagggaaggggatgagaggttgagaggaattgggagtttgtagggataggtatgggggttatagtattaagagatatttagagattaggattaggaggtgatggggtagtgtgggaagtgttggaaagattggattggggttagcggaaatttaaaaagttaatagtgtgtttatatggtaggtgggggatgttaggagagagagattttggataagggggagtagaaggaggaaggtagtggtgaagtggatggagaacgaaggggtaggcggggaaagggttttgggaataagattagaagaggaagagtacggattttttaggagtaggagtagagtagagtagggtttttatttgtttgtgtgtttgtttgagtgtgtttagttggtttatttttggttatttagttatatttattttgtttagttttattttatttcggtgattttagtagtagagtgtttatagtttttaggatttttttttattagttatagttttcgttttttattttatttagttttgggattttagagttattttttttttttttttttttgtttcgttttttttaagttttggagttttgtcgtttttagttaggttttttttttgtttttgtttttttttttttttttttttatttaaggttttgggaagggaagaggttttttttaagtttggaaaggaagttatagatatagttaaggttagtaagagggaaaggagggtggttaatatttatgtttttgttagtgagagatgttttgtgtttttatatagttagatatagttatatttatatatagatttaagaggtatagttaataaaagggtatgtttttgaatatacgtggatataattaaatgaaaaattagatataaattttttttttttttattttttattaaatgtttttttagggtatagttggttgtgtttttaggggaagggaggttttaggttgggggatataaggagaggttaaagagtttagtttttttttttttggaagttttagttattttttatttttttttttattttttgggttttagtattaggaaatgtttttggttttttggtgttagatatataagatttatagttatttttagatttatatatttttatatgcggttatttatagttatacgggtatagttatatcgttttagatttagatatatttatatatatttatatatttacgtagttatatacgtatatagtttttattagggtttatagtatcgtttaaaagtaattttttattatggtttaagtttttttttttagggagtttttagtcggggtagattcgtattttattattgttataggtttttaattagttagagattaagattagtagggaaggtaggtataggggtatagagagagatagagagaaaggaaaggtaaaattggaaatgtatttatatagagagattaggggaataaagttgtgaagaaatatatagaggtatttttagtaagatagtaatagggatagaaaacggtacgtaagggaaattgagttaagtagggaaatagaaaataaggagtagtagatttgatgttggggatttttgagtagaggaaggaggggaagttacgtgtgttgtgggtgtgtttgttaatgttggatatttaagagaaaggttagttttatgggtttttgaggtaggttttttaatatatgaatatagttgtatttttatacggtttaagttaggatttaggatatatatatagttataaattttatttttgttttgttattgttgaagttatatattggtatatataaagttagttatttatttttacgttggtagatatggttttaaattttatagagatttttttaaaatatatttttttatgtggttatagttttttttatataaatatataatttagttttattaaaaatgtgtattgatagatatatatataattttatatttgtatagttatatgtatttttagttttatgtatattgatatacgtagttatattagttgatagttgtattaagtgatatttagaatcgtatataatgatattgttatatagatatagttttataggtatatatatattgatagtcgttagttattttcggttttttagattatatattattttgtttcgtttatttttgataagattttggcgtttatattaggttttatttttcgcggtcgttgtcgttagcgttttttgttttcgttttcgttttttgtttcggtttttattttttttcgttttgggttttcgtagcgggggtggtttcgtttaggcgttaatggaaggagaggagtgaaataggggggtttttggtttattggagattttaattgttaattatttttatttttattttcgtcggatattttttgtttcgtttcggattgaagaggttgtttgggatagagtttggagttggatttttgggttttcgtttgaaggtttatttattttggaatagtaggattggaaataagagttattggttaggtgattggagaagttgaaggtgtttttgattttagataagataaagaagaaggagggttgtgtagggtagtggtttttaaattttgttggatattgtggtttgaaaattgtaaaattttattttatattaattaaattagagtttttggaggttggatttaggtattagtattgtttaaaattttttagatgattttaaaatgtagttaaattagaggtgtaaggtgtgtcgggtatatgtatgttttaagaaattagttatttatttagggtttttatttattttttagttatgggaagttcgagggaaatgtgtgtatattatgtttattagattttttagattagggtaatatttttaagttttaggtattttttttttaggattttagggaagaaaaattttggtttggaaggtaggtagttaagttttttttgggttagatttagttattgtttagttttagtgtgatttttttatttataggtttggtttttttggggaaagaacgaaggtaaaaattattttggttatttttgtattatttataatgtttgttttcgttttaaaatttggaggatattagtggtattaggttttttgtgttgtatagattgttgtttttatagcgttgttagggaaataggtttagaggggattgaatagattttaggttattttgagagttatattttttttttaggttttagggtttttaattttagtagttttttttttgttagagttgtttttgtttgtgtaatgattggggtataagggtagtagaagtatatggtgttcgtatatgtgagagtttggaggagttaaggatataaagttacgtatacgttttttatatattttttattcgtttttttagtttttgtgggttggagtagagttaagttgtagttatttataaagttagggttttggttagtagtttaggatttggttattgattattgggattaggatttagtttattcgttttttattaaatttttaggtttaggtttggagttgatattttaggggtggtggtaaagggggttttggtttttttaaagttttagttataattaagatataagattttaaaatagttttttaaattgggaatgttgttattatattaagagtaagagaatttataggttagatataatattgaatattaattttgtttagaaatttggggtagatttttgtattaagattttatatatttgtagataaagaaaagttgtagttggagttatgtttttagtttttaattttagatttttgaaggtttatatttttttgatattagagtatgtgataaaagtttgagatgtatagttttattaatgttatatttgtttaaattttaggttaggatttaaggttttttttgtttaatttagtaagattgttgaaaataaaaaaggatttaaggttttgtggtcggcgtggttaggcgatggttgttgtttttttgtttttttgttttaggtggtaatgaattttaggaagtgtttttagtttttttgtagtttggaaaagggatagggagtaattaaggaggataagggttgggttgttaagaatggtggtatggattttattttttttttttttttgagacgaggttttgttttgttgtttaggttggaatgtaatgatgttatgatgatggtttattgtagtttta

SEQ ID NO: 983 - DNA, 6171 bp, Artificial Sequence
  chemically treated genomic DNA (Homo sapiens)
  unsure 1747: n is a or g or c or t
gggatttattttattaatatatatttttttgtttgtgtttttgtataatgtgtattattttgaatatattatttttatttaagttaatagagtttcgtaattatttatttataatttttaaatttatatagttttggatattagaagtttttttttaaatttttaatagcgaaatttgattgaagcgataaggggttatttggggttttttagttatttaatgtaattatttttatgttttgttgcggaattattatgtttgattatgcgatgttattttttttttttttaaattttaagtattttgaattttaaaaataaatttgagtttttttattttttttttttttttttttttttttttttttttttttaagtgagatagggttttattttgttgtttaggttagagtatagtgatataattatggtttattatagttttgatttttcgggtttaggtgatttttttattttagtttatttggtaggtgggagtataggtatgtgttattatgtttgattaatttttgtattttttgtggagatggggaatttttatgttgtttaggttggttttaaatttttgggtttaagtaatttattttttttggttttttaaagtgtttggattataggtatgagttattgtgtttagttttaaagggttttaattgtttatttatatattatagagagagattttattttgtttttttgtttttatttagtattatatttttaatatatatttatgttattgtatgtatatttagtttattatttttaattgtcgtagaatattttatgaagtggatttttatattttatttatttatttttttagtaatgagtagttatattgtttttagttttttattattataaataatgatttaatgaatatttttatatatgtttttttgtggatttgtatgagaatttttataggatatatatttagggttaatagttgggttatgggtgtgaatatatttaatttggttaaggaatgttagaatattttttaaaatagttatgttagtttattggtatggtgtgatataatagattttgtagttttttatttttttaatatttattagtatttagtgtttttaatttgttagtttaagaggtgtaaagagatattttatttttttttttatttgtattttttgatataattgagtttttaggtatgtttattagtttttggggttttttttcgttaaattgtttatttatgagttttacgtattttttattagtgtttttgttttttttttgttgatttataagagttttttgtttttagatattgaaaatattggttttagatattgaaaaatatttttttttaatttgttagttgtttgtttatttggtttatgtatagaggaaatgtgtaaaatagaaatttttatttttatgtaatttaattgataggtattttgttttatggtttggagttttagaagttttaaaaaagttttttttatttataagtgataaagatagttttttatatttttttttattattgtaataattttattttttatatttggtttttaatttatttttaaatggatttatttttgttgttttagattggagtttagttttattttttattatacgttgaatattttttttttttaaaaaaattttttgtagggagtttttgtttagattgtttttgaattattgattttaagtaatttttttgttttgattttttaanagtgttgggattataggtgtgagttattatgtttagtttattgagtattttttattaaatattgtatgttttttttattgattagggaattatttgtattattttatatttaatatttaaatatataaatttatttataatttttttattttgttttaatggtttatatgtttgatttgttgtaaagattattattttaatttttatggttttaaattatgtttatatgtgatagggttagtttttttttttattatttttttagtatttttatttaaggttaggaatagtagtttacgtttgtaattttagtattttgggaggttaaggtgggtggattatttgagtttaggagtttgagattagtttaggtaataaaattagatttcgtttttataaaatataaaaataaaaattagttggatatgatggtgttgtttgtggtttaagttatttaggaggttgaagtgggaggattattttagtttaggaggttaaggttgtagtgagttgtgattgtgttattattatattttagtttgggtgatatagtaaaattatgttttaaaaaaaatttttttaatttagttatagattttattatatttgtattttagagtaggtttattattaagtttttgagaaaatttatttgtagtttgtattggaattatattgagtatgtgaattaacgaaaagaggtttaagttttttatatagagaaattttttatttaagggtatagaattatttaattaaattatattatatttttgattgaattttaaaatttttttttaaatattattttgtagttatttaagtttatgtaataattataataattttatattgtaggtatttttattattattatttaatagatgaggaaattgagtttagagagataaataatttatttaagaatatatagtaagtaagtagtagaatttggattaatatagtttagtttatatttttagttattatattgtttttgtatttatagttagttattttatagtttggttgtttttatgtatgttattttgtttttattatattttttgatggattgttgtagatataaagaaaatcggttgattttttttaagttgatatgtgtattgtatgatgttgttaaattttttttttagttttaatagtttattaattttttttttttttgtatattaattgtaaaaagtgatagttttatttttttttttttaatgtttaaagtttttatttttttttttttttttatagtattggtcgagatttttacgataatgttatatattgtgaagtagtgattgtgagttaagattgttatttatagaaaaattatgtatttttagaagaaggtttttattttattttagttagaggatatggagtattttaggaaattattttataaaaatgtaaattagaaattgtgtttggtagttaataatttatttttaatagtggttttgtgtttatttaagtaatagaaattatttttgtataggagatggtttttttaggggagaaatagtttagttgtgatatatttgtttttattttgattttaagtatatttaattttatattaaatttttgtggttataatatagttttgtatttgttatttgttttagataaattgttaaacgtaattgtttttgataatggattattttgtatttcgtgggggaatttttagatagtagtattagaaggggttttagagattaattattttttttattttatatatatttaaaattttttatagtcgtgttttattagtttcgagtagatgagttatttagaaggtagttttagttattaggttttagggtttgggtgtagttaggttttttggaagttttaagttagagattaaatatattttttttattatttacgtttagggtgattaatgtttgtgggaaaaataattgaattaaaaagttttataggaattttaaatttagtatatttaaaatggaattttttattattttttttaaatttagtttttttatatagtaatttttgtaaagttagaataatttttattttttatttttagggtttttttttttcgtttatttgaggagttattaagttttggtttataagttttttgagagttttttttgtttattttgtgttttttatattgaataaggatttggttatattttgttaatttttttttttgttttatttttgatttttggatttattttttatgttgtggttgaaggatttttttattatgtaaattttgttatatttttcgtttaaaatttaggaagattttttattatttttagtatagaaagtatattttttagtatggtattttttgtttttatggtatggttttatttagttttttagttttatattttgtaaggatatttagatttttattttttttaattttttatgattgcgtttttgatttttgttttttttggttagattttgcgtgttttttcgttggaagcgtttaatgtttgtttgtttttaatatttaggttggggtttttgtttgttttcgggagtttttgttgatttttggatttcgttgtttcggttgagcgtgggttttttttttaggtttttttttttaggattttgtgtatttattttatcgttaaattggattttttataagagtaataattgtagagttagttagtttttatttttttttaggttttagaaaagatttgtgaataaaacgttttgagtttgatttagtgtggtaatgttttaagggttttgttttttttgggtgttttgtatttggtgtaacgtcggtttggtatttagtgagttatttaaaggaacgatgatgagtgaatgatttgtttattttttttagtattaggttggaggtcgtggttagggtttatttttacgtaggatatgtaaagtgggaggtatttttttttttacgtcggtagggggcgttgtatagttgcggggcggggtagtttagatacggggcgttcggttaaggtcggggatttagggtggtgggcggggtgtttcgttcgtttgtggatttcgcgtagtaattgcgaatatttcgtttttattttgggtcgagttggaggcggcggggtcgtttcggaacggttgcggtcgggtatttcgggagttaattcgaaagcgtcgtaagtttcgcgggtcggtcgtatcgtacgtgttatcgagaagttgatgtagagagagatatagaaggagatagaaagtaagagattagagtttcgggaaagttttgtcgcgtttcgggataattataaaaatgtggttttttgggttagttttttagttatcgtttttatttgtcgcggttataggtttgtatttagcggttcgttttgtgtttttgtagtgtcggtttagtatgtgtttagcgcgtagtgagtatttagttcgttaggtttttggttcgttcgggtgcggaggggcggttgtttgggaagagtgggtagaaatttaagtttgtttaaggagagattggaatagtagtagtcgttttttgtaaagaggaataagaataggggttttatcgtgtgttaaatagggtatgtttttttttatttcgaaatagtttgatgagttattattatgtttatttcgtagaggagaaattgaggtttagcgtgggagattttttgtttttttgtttagggttttttagttataaatagaaggtagattttagttagttttaaagttaggtttggtcgggtgtaatggtttacgtttgtaattttagtattttgggaggttaaggcggatagattttttgaggttaggagtttaagattagtttgattaatatggtgaaatttcgtttttattaataaatatataaattagtcgagtgtggtggtgggtgtttgtaattttatttattcgggagtttaaggtagggaaaattgtttgaattcggaggtggaggttgtagtgagtcgaaatcgtgttattgtattttagtttgggttatagagtgagatttcgttttaaaaaaataaaaaaagttaggtttttttattttattgtttttaaaatattgggttttaagtttgatttagttattttattatttggtttgggtttttttgattaaaaatatgtaggttttttttgggtgagtgttgggtttaatatttttgtttaagtttatttttagatttttatagggagttggtttttagttttagaatagagtggcgttttgtaataattcgagttattttttaggtgttgaaggaaaagtgttggaaatgggttgagggaggtgggtgttaagtatgaatggatgggtgaaggtggttagaatggagggaaggtggtgtaggtaggttatttaggttgaagtttttttatttgttttttttttttttagg

SEQ ID NO: 984 - DNA, 6171 bp, Artificial Sequence
  chemically treated genomic DNA (Homo sapiens)
  unsure 4425: n is a or g or c or t
tttggaaggaagaggagtaggtggaggagttttagtttggatggtttgtttgtattattttttttttattttggttatttttatttatttatttatgtttggtatttattttttttaatttatttttaatattttttttttaatatttgagagatgattcgagttattataaagcgttattttattttagggttagaagttagttttttgtgagggtttagagatgagtttggataagggtgttgaatttaatatttatttagagaaagtttatatgtttttgattagggaaatttagattaggtggtgaagtggttgagttagatttgggatttagtgttttaaaaatagtggagtgagaaagtttgattttttttgtttttttaagacggagttttattttgtggtttagattggagtgtagtggtacgatttcggtttattgtaatttttattttcgagtttaagtaattttttttgttttagattttcgagtagatgggattataggtatttattattatattcggttaatttgtgtatttgttagtagagacggggttttattatgttggttaggttggttttgaatttttgattttaggagatttgttcgttttggttttttaaagtgttgggattataggcgtgagttattgtattcggttaagtttgattttagaattggttaggatttgttttttgtttgtagttgagggattttaggtaggaaagtaggaaattttttacgttgggttttagttttttttttacgaagtgggtataatgatagtttattaggttgtttcgagatgaaaagagatatgttttatttagtatacggtgagatttttatttttatttttttttgtaggagacggttgttgttgttttagtttttttttaggtagatttgagtttttatttattttttttaagtagtcgttttttcgtattcgagcgagttaaagatttggcgggttgagtatttattgcgcgttggatatatgttgagtcggtattgtagggatatagggcgagtcgttggatgtagatttgtggtcgcggtaggtgagggcggtggttgggaggttgatttagggggttatatttttataattgtttcgaggcgcggtaggattttttcgggattttggttttttgttttttgtttttttttgtgtttttttttatattagtttttcggtgatacgtgcggtgcggtcggttcgcggggtttgcggcgttttcggattaattttcggggtgttcggtcgtagtcgtttcgggacggtttcgtcgtttttagttcggtttaaaatgaaagcgaaatgttcgtagttattgcgcggggtttataggcgggcgggatatttcgtttattattttgggttttcggttttagtcggacgtttcgtgtttaagttatttcgtttcgtagttgtgtagcgttttttgtcgacgtagagagaggagtgttttttattttgtatgttttgcgtagggatgggttttaattacgatttttagtttagtattggaaggggtaggtaaattatttatttattatcgtttttttagatggtttattagatgttaggtcgacgttgtattaggtgtaggatatttagggagaataggatttttggggtattgttatattaaattagatttaaggcgttttgtttataggttttttttgaaatttgaaaagggatgagagttggttgattttgtaattattatttttgtagagaatttagtttaacgataggatgaatatatagagttttgggaggaaagatttagagaaagagtttacgtttagtcggagtaacggggtttaggagttagtaaaggttttcgggagtaggtaggggttttaatttgagtgttaaaaataagtaggtattagacgtttttagcgggagggtacgtagggtttagttaggggaaatagggattagaagcgtagttatgaagggttgagggaggtgggggtttaggtgtttttgtagggtgtgaggttggagggttggatggggttatgttatgagggtaggggatgttatattaaggagtgtattttttgtgttgagagtagtggggagtttttttgggttttaggcgggagatgtggtagaatttgtatgatggggggattttttagttatagtatgaaggatggatttaggggttaggagtagagtagagggaagagttgataaggtgtggttaagtttttatttagtatggagaatatagggtgggtaggagggatttttagagggtttgtgggttaaggtttggtagttttttaggtgagcgggagaggaaggttttgagaatggggaatggagattgttttagttttatagggattattgtataagaggattgagtttggaggagatggtgagaagttttattttggatgtgttgggtttgaggtttttgtgggattttttagtttagttgttttttttataggtattagttattttaggcgtgggtagtggggaggatgtgtttgatttttgatttggagtttttaaagggtttgattatatttaggttttaggatttaataattggagttgttttttgggtggtttatttgttcgaagttgatgaagtacggttgtagggagttttaggtgtgtgtaaaataagagaaatggttgatttttaaggttttttttaatgttgttgtttgagaatttttttacgggatatagagtaatttattgttagaaataattgcgtttagtagtttgtttagagtaaatgataggtgtagagttgtgttgtggttataagggtttagtgtggagttaaatgtatttaaagttaggatgaagataagtgtattataattgagttgttttttttttggaagggttattttttatataaaagtaatttttgttgtttagatgagtatagggttattgttaaaaatggattattggttattagatatagtttttaatttatatttttgtgaaatagttttttgaagtgttttatgttttttagttaagatgaaatgaaaatttttttttaggaatatatgatttttttataagtgatagttttagtttataattattattttatagtgtgtagtattgtcgtggaggtttcggttaatgttataaggaaagaaaaagaaatgagagttttaaatattggaaaagaaaaggtaaaattgttattttttatagttgatatataaaaagaaaaaaaattaatagattattagaattaagaagagaatttaataatattatgtaatatatatattaatttaaaaaaaattagtcgattttttttgtatttgtaataatttattagaaaatgtaataaaaataagatgatatgtatagaagtagttaaattataaagtaattgattgtagatatagaggtagtataatggttaagagtatggattaaattatgttaatttaggttttgttatttatttgttgtgtgtttttaggtgagttatttatttttttgggtttagtttttttatttgttaaatgatgataataaaagtatttatagtatagagttattatgattattatatgagtttggataattatagaatagtgtttggagaaaaattttaaagtttagttaagaatatagtgtgatttaattaaataattttatatttttgggtggaaggtttttttatatagaaagtttaagttttttttcgttaatttatatgtttaatgtaattttaatataagttataaataaatttttttagaaatttaataataagtttattttaaaatatagatgtaataaaatttatgattaagttaaaaaaattttttttgagatatggttttattgtattatttaggttggagtgtagtggtggtatagttatagtttattgtagttttgattttttgggttaaagtgatttttttattttagttttttgagtagtttggattataggtaatattattatgtttagttaatttttatttttgtattttgtagagacggagtttagttttgttgtttaggttggttttaaatttttgggtttaagtgatttatttattttggttttttaaagtgttgggattataggcgtgagttgttgtttttggttttaagtaaaaatgttaagggaataatgaaaagggggattaattttattatatatggatataatttaaagttatagaaattaaagtagtgatttttgtaatagattaggtatatggattattgaaatagagtagagaaattatagatagatttgtatatttgggtattaagtataagataatatagatgattttttgattaatgaggaaaatatgtaatatttagtagaaaatatttaatgggttgggtataatggtttatatttgtaattttagtattnttgggaggttaaggtaggagaattgtttgaggttagtagtttaagggtagtttgagtaaaaattttttataaaaaatttttttaaaaagagaaaatgtttagcgtatgatgaaaaataaaattggattttaatttaaaataatagaggtgaatttatttggaagtgaattaaagattaaatgtgaaaagtaaaattgttatagtagtagaagaaaatatagaggattgtttttgttatttataagtgggaaggatttttttaaaatttttaaagttttaaattataaggtaaaatatttattaattggattatataaaaatgaagatttttgttttatatattttttttatgtatgaattaaatgaatagatagttgatagattgagagaagatattttttagtgtttaaaattaatatttttaatgtttaaaaataaggaatttttgtaagttagtaagaaaaagatagaaatattagtaaaaaatgcgtaaagtttatgaataagtaatttaacgagaagaaattttaaagattaatgagtatatttggaggtttagttatattagaaaatgtaaatgaaaaaaagaatgagatatttttttatattttttagattgataagttgagaatattggatattggtaagtgttgggaaaatgggggattataggatttattatattatattatgttagtaggttgatatggttgttttgaagggtattttggtattttttgattagattaagtatatttatatttatgatttagttgttaattttgggtgtatattttatggagatttttatataggtttataaaggaatatgtatgaggatgtttattaagttattgtttgtagtgatggggaattggaggtaatgtagttgtttattattgggggagtgggtgagtggaatgtagggatttattttatggagtattttacggtagttagaagtaatagattagatgtatatgtagtaatatggatatgtattaaaaatataatattgagtaaaaataggaaaatagagtaagatttttttttataatgtataagtagataattaaaattttttggggttgggtatagtggtttatgtttgtaatttaagtattttgggaagttaaggaaagtggattgtttgaatttaggagtttgagattagtttgggtaatatagggattttttatttttataaaaaatataaaaattagttaggtatggtggtatatgtttgtatttttatttattaagtaggttgaggtgggaggattatttgagttcggaaggttaaggttatagtgagttatgattgtgttattgtattttaatttgggtaatagagtgagattttgttttatttaaaagaaaagaaaaaggaaagaaagaaaaagaaaaaaatgggggggtttagatttgtttttggaatttaaaatgtttggaatttagaaaaggaagaggtggtatcgtataattaagtataatagtttcgtagtaaaatataggaatagttatattgagtggttaaagaattttaagtaattttttgtcgttttagttagatttcgttgttaagaatttaagagaaaatttttggtgtttagagttgtgtaagtttaagaattgtgagtaagtgattgcggaattttattgatttaaatgagaatgatatatttaaaatagtatatattatataaagatatagataaaaggatatatattagtaggatagatttt

SEQ ID NO: 985 - DNA, 7597 bp, Artificial Sequence
  chemically treated genomic DNA (Homo sapiens)
ttttcggagaaagttaggttttttagtttggcgttcgaggttttagtttattattttatagaaatttagatttattgtgtttattttggtggtttttaaagtattttttttggatttttgtttttgttgtggtttttgtcggagatgttttgtaattttatatattttagtttaagtgttttttttttaggtagttttttttgttttattttagggtattcggtttttatttgtttttgattttaaggggttaggggcgtttgtgtttagttttttatttttttagttttgtatttttttttttcgatgtttttttagtagttgttaggtagaggttattggggaataataataatgattaattatattggttagcgggtggatagcgtttattgtaagttaagtttttttttatatttataaaagtttattttgtaggtgggaaagatgaggtttgagagggttaattttggtgcgggtgggggaagttttgaggtacggtttttattttggaaggggtaaaattatattttataaggggtggtttgaatttatttttttatttttagttggggttttaggtggtttgagtgtttttggatttagttttttaatttgtgaaataaggtaagtgagggattttttaggaattggtggagttgggagggttttaggatggttaggagggggttatgatttttttttgatttttatttattttttttattttttttgttattttttgagtagggttttgttttgtggtttaggttggagtgtagtggcgtaattagagtttattgtagtttcgatttttttggtttaagttttagttttttaggtagttgggattataggtatttgttattatgtttagtaaattattttttgtagagatggagttttattatgttgtttaggttgtttttgaatttttagtttatagtaatttttttgttttggttttataaagtgttggattataggtataatttattttgtttggttttttttatttttatgtatttttttatttttgtttttttttttgtttttgttttttttttaggttttatatatttattttttagttgattttggtttgggtttcggggttagagaaggttgttttgtatggggttatagggttttcgtttttattgtgttaggtttaggatattgagtttttgtttttaatttattgattttatagtttgttgggcgtttgattttggttagtttagttgtttttcggagttaggttttttgaaggagggatttttttttaggaagttgaatcgtattgtataattttggttatttgggttttagtttttatagatgtttatttttaggagagattttttttttttttttttttagtgtttttggattttaagaatattttttttttttgtagatgtattttacgtaatttaaaatttatttttttttttttttttgagatatagttttatttttttatttaggtgggagtgtagtggtgtgatttcggtttattgtaatttttgtttttcgggtttaagcgatttttttgttttagttttttgagtagttgggattataggtgtatgttattacgtttagttaatttttgtatttttagtagagattgggttttattgtgttgtttaggttggtttcgaatttttgattttaaatgatttatttggttcggttttttaagtgttgggattgtaggagtgagttatcgcgttcgggtcggaaatttattattttaaagtaaacgatttagtgatatttagtatatttagtgttgtgtaattattatttttatttggttttagaatatttgtattattttaaaaggaaatttcgtatatattagtagttattttttattttcgtttttttttagtttttgataattatttagttattgtttgtttttgtatatttgtttattttggatattttatataagtggaattatatagtgtgtgttttttttgtttattttcgtttatttagtatgatgggtttttttttttgtgtatgtgtgtttttttttttttgagatggagttttattttgttatttaggttggagtgtagtggtacgattttagtttattgtaatttttattttttaggtttaagtaattttttttgttttagtttttcgaatagttggaattataggtatatgttattaggtttggtaaatttttgtatttttagtagagatagggtttcgttttgttggttaggttggttttaaatttttgattttaggtgattcgtttatttcggttttttaaagtgttggaattatagatgtgaattattgtatttagtttagtattatgtttttgagggtttatttatatggtagtttggattagagtttttttattgatatttagaggttttgtcgatagtggggagggaggggtaggaaataaaatatttagaggttaagaaatggaatatgggggaaagattaagttgtattttttaaatttttttttttttttttttaagagataggattttgttttgttatttagattggagtgtagtggtataattacgatttattgtagttttaattttttgggtttaagttatttttttattttagttttttgagtagttgagaatatagatgtgtgttattacgattggttaatttttaatttatatatatatatatattttgagatggagtgttattttgttgtttaggttggagtgtagtggcgcgatttcggtttattgtaatttttattttttgggtttaagcgatttttttgttttagtttttttagtagttgggattataggtgtttgttattatattcggttaatttttgtatttttagtagagatagggttttattattttggttaggttggttttaaatttttgatttcgtgatttatttgttttggttttttaaagtattgggattataggcgtgagttatcgcgtttggtttaattttttattttttatagagatggggttttgttatgttgtttaggtagatttaaatttttggggttaagtgatttttttatttcgattttttaaagtgttgggattagaggggtgagtttaggtgtataaggttggagtttggtatgtggggaggtgggtattgtggagggttagtatgttgtaagttttttgtaataatttgttggaaggatgaaattaggttatttaagaatattgtttttttttagtttttgagttttagatttagaagttggcgagatggttcggtgcggtggtttacgtttgtgattttagaattttggtaggttaaggcggacggattatttgaattcgggagtttgagattagtttgggtaatatggtaaaatttttttttttaaaaaaaaaaaaatgtaaaaattagttgggcgtggtggtgtatgtttgtagttttagtttttggggaggttgaggtaggaggatggtttgagtttggggaggttgatgttgtagtgagtcgtgattgtattattgtattatagttgggttatagattaagattttattttaaaagaagaaaaaaagaatttggtagttaggtacggtagtttacgtttgttattttagtattttgggaggttgaggtgggtggattatttagggttaggagttcgagattagtttggttagtatggtgaaattttgtttttattaaaaatataaaaattagttcgatgttgtggtagttgtttgtaattttagttattcgggaggttgaggtaggagaattgtttgaattcgggaggtagaagttgtagtgagtggagattatgttattatattttagttcgggcgatagagtagggttttattttaaaaaaaaaaaaaaaaattggttagagagggttagagatttggttaagtgtatggaattataggtggtttatgggtttatggggttggtatttgggtgtttagtttaggtttggggttagtagggtagaattttttagaattttgatttgttttaaagttagatttgttttagagtttgtggtcgttattattattattattacggagttgattttttgggttttttttttattttgatttgttttagggatgggttgtgatattttatttttttttttttttttttttttttagttttttttttttgtttagttttaatgtgtttcggagtggggacggggtggttgaatttcgtaggtggtagagaggtttttttggggttgtggggttttacgtggattcgatggagtcgttggtgatttgggtggttttttttttttttttttttttgttgtttaggtagggcggtgagttttttgattttggtatggcggttttttttgttgggtggaggtacgtgtatgtgtggagagttgtgggtttgttgtgtgggttggttttatttttttgtgttttagttttttttgttgttaaatgggagatgggtagttatggtttttgggatcgaatttagatattttttttttggtttagatttttttttttgtgaaatgtattaaattttttttatttttcggagtttaatgagaaaaaaaattaaggaaggaataaaaagtaagtatgtatttaataggtatatatagtatagtattttatgtatgtagtttataatagatagatatatataatataatgtatatagttatttttatatttacggggtaatggttttaggattttttgtagatattaaaatttaaagatgtttaagtttttgatataaaatggtaaagtatttgtatataatttatgtatattttttcgtatattttatttatttatttatttatttatttatttatttatttatttatttatttattgaggtagggttttattttgtgttttaggttggagtgtagtggtttaattataatttattgtagttttgattatttgggtttaagtgatttttttgttttagttttttgagtagttgggattgtaggtgtatattattatgtttggttaatttttttggtgtatattttttatagagatagcgtttcgttgtgttgtttaggttggtttcgaatttttgggtttaaatgatttatttattttggttttttaaagtgtttagattataggtatgagttattatgtttagtttttttatatatttttaataattttaggttttgtacggtgatttatttttgaaaatttagtattatgggaggttaagatgggtggattatttgaggttaggagttcgagattagtttggttaatatggtgaaattttatttttattaaaaatgtaaaaattagttaggtttgatgatgggtatttgtatttttagttatttaggagttgaggtgggaggatcgtttgaatttaggaggtagaggttgtagtgagtcgagattgtagtattgtattttagtttgtgtggtagagtaagattttattttaataataataataataaataaattttttttttttgtatattggggattagcggggtgttgatttttttaatggtttttgagatgtattgagtgtttgtagaatgtttatagtagtgttggttatattttaaggttttagcgtttttaggggttaggtatggttggagattagtagtagggagggggcgagaggtagtttacgaggtattttggagatagtggtagtgagtggttagtttagggaaagggaaggaggatgggttttaggtttttaggggtgggtgggtgggtgggggttttgtgttattatagagagagatggaaggatggagagttttgtgtgttaagtatttttttttttttaaggttggatatttggggttgttttttggggtgtcgtttttttttttaaggtttttaatttgtttgtagggtttaggataggttttttttgtgggagtgagggcgtcggggtttttttgatttatttatggtggtattttttttttttttttatttagttttatatttagtagattgtggtaattttaaagggtacggggattttagtggttgagggaggtcgttgttttttggagaaatgttattaataattgttttgattgttagtgggttaagtgtgtttgtttgggttagttttggtaggtttttttttgttatgtattttttattgtttttttttatgttggttttagatattggtgttattttaggtatatttttatttttttttgttttttagattgttggttttattgtttttttttgtaggggtatttttcgagagtgttttttaaatatgtattttaatttttgaggattaaagggtggtggatgaatggatagataggtggatgggtgggtaaatgaatggatggatgaattaataaatatatgtatgtatgtatggatggatggatggatggatggatggatggatggatggttggatggatatatcggtaggtagataaatggatggatgggtgggtgtatggatgaatgaatacgtggatggatagatggatagattggtgattagatggatagatggatggttgggtgaatggataatggattaatgaatgtatggatgtatggataaatatatggatggatggatggatggatggattaatgaatatatggatggatgggtgaatgggtggatggtgggatggatggatggatggatggatggattaatatatggatggatggatgaatggacgaatggacggataaatgggtggatggtggggtggatgtatggattaatatatggattgatggatggatggatggatggatggatggatggatagatggatggggggtggatggatggatggatgaatacgtggatggatggacggatggtggggtggatggatggatgtatgaatacgtggatggatggatggtggggtagatggatggatgagtagatggatgaatgaatatatggatggatagatggatgggtagatgcgtggatggatggatgaatatatggatggataaatatatggatggatgggtaaatgggtggatggtggggtggatggatggatggatggatggatggatggatgggtagatgggtgtatggatggatgaatatatggatggatgaatatatggatggatgggtgaatgggtggatggtgaggtggatggatggatggatagatgggtggatggatgaatgaatatatggatggttggatagatggatgggtagatgagtggatggatggatgagtatatggatggatggatgggtagatgggtggatggtggggtggatggatgatggatgaatatatggatggatggatggatggatggatggatggatgggtgaatggatgaatttatgggtggatggatgggtagatggtggacggatgaataaatatatggatggatgggtagatgggtagataaatatatgggtagatggatggatgggtggtggtaggagggtgtatagatgggaaagtgggtgggtgggagggttgatgattatttgggtgtagattttaaggttgagtttttttttttatatagtgtaaggttaggaatgttattatgtttttattgtttttgtagt

SEQ ID NO: 986 - DNA, 7597 bp, Artificial Sequence
  chemically treated genomic DNA (Homo sapiens)
gttgtaaaggtaatgaagatataatgatatttttggttttgtattgtgtggggagaagggtttagttttggggtttatatttaagtgattattagtttttttatttatttatttttttatttatgtatttttttattattatttatttatttatttgtttatgtatttatttgtttatttatttatttatttatgtatttatttattcgtttattatttatttatttatttatttatgaatttatttatttatttatttatttatttatttatttatttatttatttatgtatttatttattatttatttattttattatttatttatttatttatttatttatttatgtatttatttatttatttatttatttatttatttatttatttaattatttatgtatttatttatttatttatttatttatttatttatttatttattttattatttatttatttatttatttatttatgtatttatttatttatgtatttatttatttatgtatttatttatttatttatttatttatttatttatttatttatttattttattatttatttatttatttatttatttatgtatttatttatttatgtatttatttatttatttacgtatttatttatttatttatttatttatgtgtttatttatttatttatttatttatttatttgttttattatttatttatttacgtatttatatatttatttatttattttattattcgtttatttatttacgtatttatttatttatttatttattttttatttatttatttatttatttatttatttatttatttatttattaatttatgtattaatttatgtatttattttattatttatttatttattcgtttattcgtttatttatttatttatttatgtattaatttatttatttatttatttatttattttattatttatttatttatttatttatttatgtatttattagtttatttatttatttatttatttatgtatttatttatgtatttatgtatttattaatttattatttatttatttaattatttatttatttatttagttattaatttatttatttatttatttacgtatttatttatttatatatttatttatttatttatttatttatttatcgatatatttatttagttatttatttatttatttatttatttatttatttatttatatatatatatatgtatttattaatttatttatttatttatttatttatttatttatttgtttatttatttatttattattttttagtttttagaggttgagatgtatatttgggagatattttcgggaggtatttttgtaggaaagaatagtaagattaatagtttggagggtagagagaagtggaggtgtgtttggggtggtattagtgtttgaagttagtatggggaaagatagtagagggtgtatggtagggagaggtttgttagggttggtttaggtaagtatatttggtttattagtagttagggtaattattaataatatttttttaggaggtagcgattttttttagttattgggattttcgtgttttttgggattgttatagtttgttaggtgtggaattgggtgagagaaggagggggatgttattatggatgggttaggaagatttcggcgtttttatttttataagaaggatttgttttgagttttgtaggtagattggaagttttgggggagaaggcggtattttaggaaatagttttaagtgtttaattttgaggggggaaagatgtttaatatataaggttttttatttttttatttttttttgtgatgatatagaatttttatttatttatttatttttgagagtttaaagtttattttttttttttttttttggattgattatttattgttattatttttaggatatttcgtgggttgtttttcgttttttttttgttgttggtttttagttatgtttggtttttgaaggcgttgggattttgaggtgtggttagtattgttgtgggtattttataggtatttagtgtattttaagagttattgaaaaagttagtatttcgttgatttttagtgtatagagaaggaaagtttatttattattattattattgagatagagttttgttttgttatataggttggaatgtagtgttgtaatttcggtttattgtaatttttgttttttgggtttaagcgatttttttattttagtttttaagtagttgggagtataggtgtttattattaagtttggttaatttttgtatttttagtagagatggggttttattatgttagttaggttggtttcgaatttttgattttaagtgatttatttattttggttttttatagtgttggatttttaggagtgagttatcgtgtagggtttgagattattaaaagtatatgggaaggttgggtatggtggtttatgtttgtaatttgagtattttgggaggttaaggtgagtggattatttgagtttaggagttcgagattagtttgggtaatatagcgagacgttgtttttgtaaaaagtatatattaaaaaaattaattaggtatggtagtgtgtatttgtagttttagttatttaaggggttaaggtaggaggattatttgagtttaggtggttaaggttgtaatgagttatgattaggttattgtattttagtttgggatatagagtgagattttattttagtaaataaataaataaataaataaataaataaataaataaataaataagtaaagtatacggaaggatgtgtataggttatatgtaaatattttattattttatattaggaatttgagtatttttggattttggtatttgtagagggttttggaattattgtttcgtaaatatggaaatgattgtatatattatattatgtatgtttatttattgtaaattatatatataagatattatattatgtatatttattagatatatatttgttttttattttttttttagtttttttttttattgaatttcgggaggtggaaaaaatttagtgtattttatagaagagaaaatttagattagaggaaagatgtttaagttcgattttagaagttatgattgtttattttttatttgatagtaggaaagattgaggtatagagagatgaaattaatttatatagtaggtttatagttttttatatatatacgtgtttttatttagtaagaggagtcgttatgttagggttaggggatttatcgttttgtttggatagtaggaagaggaagaggagggggattatttaggttattagcggttttatcggatttacgtagagttttatagttttaggggagtttttttgttatttgcgaggtttagttatttcgtttttatttcggaatatattgaagttgagtaaggagaaaagattgaaaaaaaagaaaaaagaaaaaaagtaaagtgttatagtttatttttaaggtaagttaaagtgaaagagaaatttaggaagttagtttcgtggtggtggtgatggtggcggttatagattttggagtaagtttgattttggagtaagttagggttttagggggttttgttttgttggttttagatttgaattgaatatttagatgttagttttatgggtttatgggttatttgtggttttatgtatttggttaggtttttggttttttttagttaatttttttttttttttttgagatggagttttgttttgtcgttcgggttggagtgtggtggtatgatttttatttattgtaatttttgtttttcgggtttaagtaatttttttgttttagtttttcgagtagttggaattataggtaattgttataatatcgagttaatttttgtatttttagtagagatagggttttattatgttggttaggttggtttcgaatttttaattttaagtgatttatttattttagttttttaaagtgttgggatgataggcgtgagttatcgtgtttggttgttaaattttttttttttttttttgagatagggttttgatttgtggtttagttgtagtgtagtggtgtaattacggtttattgtaatattaatttttttaggtttaggttatttttttattttagtttttttaggaattgggattataggtatgtattattacgtttagttaatttttgtatttttttttttttaagagagggggttttgttatgttgtttaggttggttttaaattttcgggtttaaatgattcgttcgttttggtttattaaaattttgggattataggcgtgagttatcgtatcgggttatttcgttagtttttgaatttgagatttaagagttgaaggagggtagtgtttttggatggtttaattttatttttttaataaattgttataaagagtttgtagtatgttggttttttataatgtttatttttttatatgttaagttttagttttgtgtatttgggtttatttttttaattttagtattttgagaggtcgaggtgggaggattatttgattttaggagtttgggtttatttaaataatatagtaagattttatttttataaaaaataaagaattaggttaggcgcggtggtttacgtttgtaattttagtattttgggaggttaaggtaggtggattacgaggttaggagtttgagattagtttgattaaaatggtgaaattttgtttttattgaaaatataaaaattaatcgggtgtggtggtaggtatttgtaattttagttattgaggaggttgaggtaggagaatcgtttgaatttaggaggtggaggttgtagtgagtcgagatcgcgttattgtattttagtttgggtaatagagtgatattttattttaaaatatatatatatatataaattaaaagttagttagtcgtggtggtatatatttgtatttttagttatttaggaggttgaggtgggagaatggtttgaatttaggaggttgaggttgtagtgaatcgtgattgtgttattgtattttagtttgggtaatagagtaagattttgttttttaaaaaaaaaaaaaaaaaaatttaagagatgtaatttagttttttttttatgttttattttttagtttttgagtattttgttttttgtttttttttttttattgtcggtaaagtttttaaatgttagtggagaagttttgatttaagttattatgtggatgaatttttaaaaatataatgttgggttgggtgtagtggtttatatttgtaattttaatattttgggaggtcgaggtgggcggattatttgaggttaggagtttgagattagtttggttaataaggcgaaattttgtttttattaaaaatataaaaatttgttaggtttggtgatatgtgtttgtaattttagttattcgggaggttgaggtagagagaattatttgaatttgggaggtagaggttgtagtgagttgagatcgtgttattgtattttagtttgggtgatagagtgagattttattttaaaaaaaaaaaaatatatatatataaaaaaaaaaatttattatgttgggtggacgaagatggataggaaaggtatatattgtatgattttatttatataaaatatttaaaataggtaaatgtatagaggtagatagtagttgagtggttgttaggggttggggggaggcgggagtgagaagtgattgttgatgtatgcggggtttttttttggggtgatgtaaatgttttggaattagatagaggtggtggttgtataatattgaatgtgttaaatgttattgaatcgtttgttttaaaatgatgaattttcggttcgggcgcggtggtttatttttgtaattttagtatttgggaggtcgagttaggtggattatttgaggttaggagttcgagattagtttggataatatagtgaaatttagtttttattaaaaatataaaaattagttgggcgtgatggtatgtatttgtaattttagttatttaggaggttgaggtaggagaatcgtttgaattcgggaggtagaggttgtagtgagtcgagattatattattgtatttttatttgggtgagagagtgagattatgttttaaaaaaaaaaaaaaagatgaattttaggttacgtgagatgtatttatagaaaaaagaaatatttttagagtttaggggtattgaggagggagaaggagagggttttttttggggatgagtatttgtggaaattgaggtttaagtggttagggttgtgtaatgcggtttagttttttgggaggaggttttttttttaagaagtttggtttcgaggggtagttgagttggttagggttaggcgtttagtaggttatgaggttagtgagttagggataaagatttagtgttttgggtttggtatagtggggacgggggttttgtgattttatataggatagttttttttggtttcggggtttaggttagggttagttgggggatggatgtgtgaggtttgggggaggggtagagatagagaaagggatagagatagagagatatataaagatggaggaggttaggtagggtggattatgtttgtaatttagtattttgtgaggttaaggtaggaggattgttgtaggttaggagtttaagagtagtttgggtaatatggtgagattttatttttataaaaaataatttgttgggtatggtggtaggtgtttgtagttttagttatttgggaggttgaggtttaagttagggaggtcgagattgtagtgagttttaattgcgttattgtattttagtttgggttatagagtaagattttgtttaaaaaataataagaaaggtggaggaaataggtagagattagaggaaagttatggtttttttttgattattttgagatttttttaattttattaatttttggagagttttttatttgttttattttatagattgggaaattgagtttaggggtatttagattatttgaggttttagttggagatgaagagatggatttaaattattttttgtggagtatagttttgttttttttagagtggagatcgtgttttagggttttttttattcgtattaaggttggtttttttaggttttattttttttatttgtaaaatgggtttttgtgagtatgaaggagggtttggtttgtagtgagcgttgtttattcgttggttagtgtgattagttattgttgttgttttttagtggtttttgtttggtagttgttggaaaaatatcgagggagggagatatagggttggggaggtgaaaagttggatatagacgtttttagttttttgggattaggaatagatggaggtcgggtgttttgaagtggagtagggaggattgtttggaggagggatatttgagttagaatgtatagaattatagggtattttcggtagaggttatagtagaggtaaaagtttagaggaggtgttttggggattattaagatggatatagtgggtttgggtttttgtggggtgatgggttggggtttcgagcgttaggttaaagggtttggtttttttcgaggg

SEQ ID NO: 987 - DNA, 17967 bp, Artificial Sequence
  chemically treated genomic DNA (Homo sapiens)
agattttcgtaaaattattatttgggaaggagagattggaggggaaaggaaatattattaatatttgatattattttgtagtgtttgatttgtagaaaaggatatttaattgagattttttttgtttttttagtagaggttttataggttaaaataaaaaaattaatgtatttattattgaagatagtggtattttggattagtgatttttggtgtgttatatgtttttttgttttttaagttgagtatttattgtttttgttttattattttatatttttggagcggggtagggcgaggtgggaggtgtaggtaatttgggttttttatttgtttgtttataggttgtggatttagaggaggtatattttattaggtagttattattgtttattttttagagagtttggattttagttggatgttatgattggataggattttgggttgttttatttgggaaattagagtattttttatgtatgagaagtatggaaaaaaaggatatttgaagttagaagagtggaatgtagaaaagaattttaatgattatatatttatattttagagtattttttatagggtttttgttgatgtattttataataaattaaaaataaataaataataacgataataaaaatgaggaatatatgtgtggttttatgtgggaatgtttgtgagaaatttgttttttatgtaaattatttttttttttataagaatttgttaaagttttgtattattaaaagttttggttttgatgattaggtaattagttatgatatgatggaatttgtgaattttgtaatatatgtttagatttagttgttaagaatagtagagttagtttgtgaataaagtttatgttgtgtaggattttgtagttattatagttttaaatttattttatgttttattttattttttaatttttatgtttatttaataaggtatttagtaatttaaagattttttaaaaacgtattgttgttttttaagatatggtaatttttatgtggtttgtttattttttttttttttttttttggatagagttttgttttgttgtttaggttggagtgtaatggtgttattttggtttattgtaatttttgattttcgggtttaagttatttttttgttttagttttttgagtagttgggattataggtgagtgttattatgtttggttaagttttgtatgtttaatagagatgggatttttttattttggttaggttggttttgaatttttgattttaggtgatttatttgttttagttttttaaaatgttgagattatatgtatgagttattgagtttggttagtttgtttttttataaataatgtttgtgtttgttaaatgttagttgtggagaaggtataagtttatattttaagaattatggagattatttataatttgagaatttggtattgtattattttaattttatataaatttttttaatatataatattataaatatatttaggagttatgttgttgttttataagtttaatattttggagagatgagtaaaattaataaagtaataatttttagaaatgaaatttttataaaatgaagtagttaaggttgaatagttaattttagattttgagtttttttattataagtaaaagtttaaaatgatgttaaaatcgttttattaagtttaacgagtgttagtatttatttgatgttttaaatgattatgttagtaattattttttagtatttattttgataagtgatattttaggaaaagtatattttagttatttatagaatagtgtgattacgtatttttagggtgtttggtattagtaatgaattaaattagatatttaaagtaatggaattatattagaaatggaaattgaattagtattttttagaaaagattttgttattgttattgtggttatttatttaattgagtttttgatttataagtatatttatttatttaatagttatatagaagattatattatatttatagatttaaaaatgattatattaataattatagttgatattttgggttgtatattaggtttttgttttattaggtatcgtttattatttagggtttattttttagaaagtatagaagcgagtttgtttttgttgttatttttgtttttattgttatttttgtttttgtttttttttttaattagataggtaattattgataaaagttatgtttgtattagtgaaatttttagatattaataggaggagaaggtcgaaaaaagaagtggggaaatagaaaggtttttatagatggtgattttatatagaaaggttatcgatttgttaagaaaaattatatttaattttttaattaatttttaattgtcgaaaagtgtgaagattgaataatatttataatttcgttgaattggttaaaaagaatgggatttttttagaataagttagtttaatttagtaaatatttattgattatttgttttgtattatttagtgtgttagatgttgaagatgagggatttttgcgtgtatagagtttataatttagggagtatgtaggataagagaattattgttattaatggtaattagtgtaagtttttatttgataatgtaagtttaagttaaataatatattgatggatttagagtatgataattttttaaataatatttatgtaagagttgttattttttgatttttttttttttgtatttagggaaaagaagagaataaagaagattattattgttatttgtattttattgtatttttataatttgttgtgtttgtttaataattagatttaagttttttttttaatagtttttatttgtttttttaaagaatatgttttagatgtatttgagatattattttgtgtttgatttttgtaattttgtaagatgttgttattagaagttaatagagtagtggttttttaatattttagatggtatatttttttagaaaaaaaaaaaaagtatttttgagaaatatttttaatatatgtttggttgtttttttatttttttgaaaaatatatgtatgtcgggcgcggtggtttacgtttgtaattttagtattttgggaggttgaggtgggtagattacgaggttaggagtttgagattagtttggttaatatggtgaaattttatttttattataaatataaaaattagtcgggtatggtggcgcgtgtttgtagttttagttatttaggaggttgaggtaggagaattatttgaattcgggaggtggaggttgtagtgagttgaaattgtgttattgtattttagtcggggtaatagagtgagacgttgttttaaaaaaaaaaaaatagaaaaatatatgtatatttatatgtgtgtatatatatatatatatatatgtatatataaatatataaattaaatttttaaatgagatagagtaaaatgtatttttgaaattattgatttattaataaaattaaaagtttttttttttattaaaaagtgttgaaaaatttatgaattatgtaagattgttataatatttggttattataattttatttttgatattaattagtttttaaagtaatgagaagttgttgtatttttatattttttaataaatggatttaaaatttattgaattgtttaattaaaagattgaaataaaatagtaaattgttttcgagtttttaaaagtattttttgtgatgataattataaaatttttagtaagaaaaatatataataatgggaatatttcgaaatatttgtttttaaatcgtttttttataataacgtattatttggtgtgaaaattattttgaagaaataataaataaatttttggggttttttgttttttaaaaagatttattagataatatgtattgagagttatatattaatatagaaaagattagtaaatttaggatatttggggtttttttgtaaaaataaagaaaataatttattttaagataatttttaaaatttttgttataaatgatttttataattatgtattattttattataaagtaatattaagattttagattttacgatttaaaagattttagtaaaattatttatgtagataaattattaaagtatgtaaattatagtatgttataattttataaagataatttattgtatattgttgattttaagatgtatattttttatatttaatattttaaatattgagagcggttttaaggtaatgtttagaagcgtggtatgtagttgtttatttttgcgggtttagtaaatttgtattgggtttagtggattagaagaaaattttagagataacggggtgggggagggggggggatttaaaaaaaaattcgatagataatatatatatgtttaaaatttaaattttatttagagatatttaaataaaatttttaaattaaataaaattttagtttaaaagattttaaatgttgagaaagtattgttattgtttatttggtagttttttttattttttattagcgtataaataatggtatattttataattaaggaagttttagatttaaagaaatttaagttgacgggtgtagaggtttaggtttgtattttttgtattttgggaagttaaggcgggaggattgtttgaggttagaagtttgagattagtttgggtaatagagtgagagtttgtttttataggtttaaatatagtttttttttaagtaatattgttataaatattatgttatgaatattatgtagagttgtcgatttttttgtattttgggtagtttttttttttgtttgagaatattatttataatacgggatttatacgggagtggtgatacgttatttgtttaagtttaattttttttttattttttagatagtaaatataaatggaagttttagtatgttttgttcgtattttagtgggcggttttgtgtatagtttatttgggaggtttcggcgtttaggtgtggtaagagttgggcggtgtagagtatagagaaaggatatttgcgaggaaagttttttgatggttgttaataaagtgttacgtttttatggttgtgaacgttgagtatacgattttatcgcgtttattatattttggtgtataaacgtattttatttcggttaatttttgtttcgttttatgagataggttttattattcgtattttatatgaggggaaattgacggtggagagagaattattttgtttaaggcgatatagtagagtttataggtggtagaattttattcgagttcgtttcgattcgcggggtggaaattacgggcgttcgttcgcgtgcgtttttagagttgaattgagaagcgagtttttttcgttttgcgttatcgtttagtttcgattttcgtttcggttcgatttttattcgtcgttagtttttcgcgtttatttcggagttggtggcgtagaggcgggaggcggaggcgggagggcgggcgttggtatcgggaacgttcgagcgtcggtagagagcgcggagagcgcgatacgtgcggtttagagtatcggggttattcgttttcgtaggttcgggattcgcgttcgttggtaggcgatacgtggtgagtgattagtgattcggggtcggggatagagagagttttaggatttcggattagcgggggtgtttgcgtgttcgggatttcgtgtttcgcgtttttcgagggggtttcggcgacggtttttttttttatatatatatatgtatatatatatttttaaagttttttaatacgattcgaaatggtttttttttattatagttttaacgttttgggtatagatgtttatttggaggtattgggtggtggtttggttggatggaggggagggagcgcgcggattgagtttttaaggtattttttgggtcggggtatagagtggtgggtttaaacggaagggaggggacggcgattggaaaagggtagagggtatttttgagggtttagttttggtttaggtttatagacgtggttttcgttgtttgaaaatgtattaaatgtgagtaagatattggggggggtttttcgtagtttcggatgagggtgaattaattttgttttagtagttttttttgtggtttttggattgatttcgagtttttgtttggttagttattagtaagatgttttggtgtaagtaaattggttagttttagtttttttttttgtgaaatgtttttttttttgtgaattatgaggttttttttatttttttaggatatattaaatattagtgttagtattgtacgggattatgtatttgtattattagatttaggttttataaatagtaatttaaaagtatataaatagattttgtttaagaatagggtttcggtacggtcgttacgtttgtaattttagtattttgggaggttaaggtgggtagattatttgaggttaggagtttaagattagtttggttaatatggtgaaattttgtttttattaaaaatacgaaaattagttgggtatgatgacgtatatttgtaattttagttattcgggagattgaggtaggagaattgtttgaattcgggagatagaggttatagtgagttaagatggggttattgtattttaatttgggtaatagagcgagattttgttttaaaaataaatatatatatatatatatatatatatatatatatatatatatatatatatatatatatataaagaataaagttaaattagtttttttttttttatttttaaaattttagataattgttataatttgttatgtgtgtgttttgtgtagatgaatatttttgttgagtatttattatgtatttggtttttggatatatattatttaattttttaaaaatatggtgaaattgttattagtatttttattttatagatgtggaaatttatatgttttatatagttagagagttataggtttttggtttaaaattgtgttttttttgtttttatttttttggtttagaattttataattatttttatttgaataaataaacgttggatttttattttttattaataggaatggtatagtgttttatttttttgtttaatatataattaaaaggattttagtggttaagagttaatattttttttttttattttaatgtgaaatttttaatatattatattatttgttaggtataatagtttttagaaaagtttgtaatatgtttttttttatatgttatgttttttgaatgttatgtttattatataggttgataaatttttaaattttgataaacggaattttttttgtattagaatgagttttagtgtgaaaaaaaattcgaaagtatatatgtaatttttaaggtagaagaattcgttaagtatagtaggtattgggtattattttttagttgtggatttatttttgtattgttgtatttgttttgttttttattaaattatttgttatttttgtaattacgtttatagtattgttgttaatttttataaataaatttgtgtagaatggcgggatacggtgttttatatttgtaattttagtattttgggaggtcgaggtggggggattatttgaggttaggagtttgagattagtttgattaatatggcgaaattttgtttttattgaaaatataaaaattagcggggtatggtggtatatattatgtggtatggtaattttagttattcgggaggttgagataggagaatcgattgaattcgggaggtagaggttgtagtgagtagagattacgttattgtattttagtttgggcgataagaatgaaattttattttaaaaaaaaaaaaaaaaaaaaaaaaagttaaattttaaaggaagttttatataattttttttgtttttggaagtttttagtgtttttcgttagtgtaatagtggtttgtttttgtttttgttttttaaataagtattgaatatgtatattatggttagtgtatttgttggatttagatttagtgaatataaagaaatgtaaggtttagtttatgatttacgaagttaaaattgtttgggaaaattttgagaatatttaatatgttttaaatgataggtggtatgaagttaggaggtatggaatttagttttaattaaattagttttttagtgttaaattagatgaatgggtaaagagaggagttaaaagtaaggttatttaatttaattttcgtagtgttattgaaaagaagtaatattgtttttttttttataataatagtaggtaatattgattgagtttttgttatatattaggtattttgttaatagtttgttatttaatttttttaataattttgtgagataggtgttggttttttgtttgtttgttttttgtttttgagacggagttttgttgtcgttaggttggagtgtagtggtgcgattttggtttattgtaatttttgtttttcgggtttaggtgatttttttgttttagttttttaaatagttgggattataggcgtatattagtatgtttagttaatttttgtatttttagtatagacggagttttattatgttggttaggatggtttcgattttttgatttcgtgatttgttcgttttagttttttaaagtgttaggattataggtgtgagttattacgttcgtttagtaggtgttgtttgtattttttttttatagatgaaggaatttaggttgagtggttaagtgatttgttataggttatatagttggaattattcgagttaagatttaggtgttttgggcggatttattgttttttttattattattatagttgtttaggaggtttttttgggagtttggattgaggtgatgagcgtaaatatggtttaatgttttttggaggtagtagttttgtgggtttaatatgggagttttgaggtatgttgagaataaatgagaggggtaagtttgtttttgtagaatttaaatcgatagaagagggaaagtagttagattaatagagtattaagtttggatttttattttttaggtgtttatggagaagggaagtatagaatgtaattcgaatttaattttggatttatgtgtggtttttttgggttattttggttaatttatagatttttttatttgtagaataggatattaattattattttatgtatttgattaaatattaataattaaattatatgttttgtatagtgataaattattaagtaaatgtttataaaagattgttaaaattagaattttaattaatttttattttgtaatgatatgtaggaaaagtaatatattaagtaaaatattaggagatattgagatggagggttgttagtgtagagattttagttgaatttttaatttatatgagaaatttggggaaatattgtggtatggtgattattatttttagttttttaattttttttttaagtgtgtttttaattattttaagataattgtgaaatttttagaaaatttttaaaataatgtaattattttaatatgttaatgttttgtagtattttatgaaaatatttagtggttgtttataaggtgaagtaaaatttggttaggattttgtaatatttaagatttaaagataaattttttgttattgtttataaatagagatttttagattgaggatgttaaagaaaaaatttttttaatatattaaggaagaaaagttagtgaaagaggtttagtttttttaataaaggttaattgttatttttaaaataaggaaaggaggttttgaagtatgaagttatttgttatggtgatagaggtagaaatggaggaattaaggatggtgttcggggtttttttttagtatattattttttttaatagaagatagtttattttatcgataggtttagtaggatatagagagtgaattagagaaggttggagttttcgaagttttattgaatatttgttatgaaagttttaggtttatgggagttatttaaagaaagaaaagaggttatgtagtttatttgaaagtgttttgtttttttaagattttattcgtattttgtttttttttttttttttattgttatattggagaaatgtttgtttaatttataggataaaatagtttttagtatagatgattgaggggttggggtgggataaatttattttaattttgatttgtttacgtataatattttaggagtttattatgttaaatgggatgtatttaaaatggaaataaagataaatagaattgatagaaataatattttagaaaaaataggaaaagaagagagaaaagaataaaggaagttaagaaaaaaaaaaagttataaagagggaaaggagaaaatatattgaatttaaaaaaaaaaaaaaaggaataaaaattcggaagttttttgaatttgagtaagaaaagaaagtttttgtatttgggtgaaattaaagaggaattataggatagtaaatgtttattaatgaaattagagaaaattttaggtagtttcgttagttgtataaaaaggaaaataagtgtgtgtgttaaatttggtttatgtaaatagtgtttggattattgaatagaaagaagaaaaagtagaaaaggttatgtattttatttttttttttttttaagttatttattatgatattatgaatggggtcggtttgatgatggggtttgatagacgggtttttgtttatgtaatggtttgttatatttttttattaaatggtagatttggaatgaaaaatagtttatttttatgattataatttaggaaattttatgaagaagagaaggttagttaattggtaatttgatttgattatttttttttattattatagtggaatagtattagatacggttatatattgtatgtgcgttgagttttgttgttttatttttttttgagggaggtgggttttagaagtaatgagttaattttttgaagagtaaagtattaggtattataaatgttttattagatagatattataaagattgtatgtaaggtgtttagtatcgtgtttgaaatatagtaagagattaaaaaattgtagtattagtattagtatagtgttaagattagtattatttttagtattatgttgttattgttgttattgattataagtagttttatatttagaagtgatgttggattagaaattaggagattggtcgggtacggtggtttatgtttgtaattttagtattgtgggaggtcgaggtaggtagattatttgaggttagtttaagattagtttggttaatatggtaaaattttatttttattaaaaatataaaaattagttagttaggtgtggtggcgtatgtttatagttttagttgtttaggaggttgaggtaagagaatcgtttgaatttaggaggtggaggttgtagtgatttaagatggtgttattgtattttagtttgggtgatagaacgagattgtattagagagaaagagagagagagagagattgaggttttgatttggattttgttattaatgtgaatttgagtaagttttttttttttttttaggttacggtgatttatttgtaaagtcgggaataaatgatttttgaagtgttgtttgtatattgatttgttattagtaaaatatatttttgtaagtagttttgtaggtagaagggaagaattttgttttttgttttatttagttatttgattattaacgatatttatttatatgataattagttttgaggtatatttgaaataattatttggttgtttgtggtagtttagattgaaatgttagttgttggaggggaagggagtagtagggtatagtagttattagtaattcgtgtagttttttttttttttgattttttaagttttttgatggttttaggaattaagattttttttatttggtttaataaaatatataattttagtatattgaaaattatatgtgatttagtaaagaaatataaacgagggaattagtaggggaaataggaattagttttagtggggtttttattttgtgttaagtatttttatgaatttatgatattatggattgtttataataattttgttttaatcgttatcgtaattttgtcgagttaggtattattatatttattgtaaggtatgaggaaatggtgtttttatagttaatagtatatagtagaattgagatttatttattttttttttttttttaatattattattttttttgattttaatatagtgttatagaagaaaaataatttggaagtagaaagtttttttgttaatatgagattattatttgcgaaaggaaatttaagagtttttttttttttagtttagtataatataattttgaagtagttttatgttttgtgtttttttttagagtaatggggaaagaggttggttagggagtaattgttgtttttgtttttttatcggtcggtgtatttttggtttgttttcgtttattttatttttattttcgatttgagacgttgtttttattatttggaaattgttataatttgagtgatgagttaatgatatagtatattttttgattttttgatttaagatagagttgttgttttaatatttattttttaggtagggtatgtgaaggatgtttatagttatagtaggttttattttattggaagatattttatttatttgaaggtttttggggattttgaattttttataaaaggagaagttatttttatttggtagttagagaaaatgagtaagtttgtgtttggattaatgtattattatataaatttaaatttattttttattttatttattttatataaatatgtatgtttatataatatatatatatattttaatttatttaataataggatataatatatatgaaaatatattttatatatatttatttttttaaatttttataattattatatgagtattttattatttggagaatgttatagttttataaattttgatttatgttgaaaatttttataaaggggcgttatagatattttttgtagttaggaagtagaaatttatttaatttttatgtagttatttatttagttattttttagtttaatttataattttatttatgttagaatattttaaattttaatgtagtagttaatatagttattataggggtagaaaaatttcgttttatttttttagggttttggttgagtttgaggattaaattgatattagattaataggaaaaaaataatataaatttatttaataaatattatgggatatgggagatatgaaaaaatgaagatttaaagaagtagagttagttatttaaatattggattgagtaaagaatagtaatttataaaaatgtgattaaattatgtggggatgttaaagtttgtataaaatttttttggttttaattttttatttttgaagataaagatgttgttgattttttagtatagggagtgttttttatatgggagttttattttttgattttaagaaatagtagggaagttaaagtgatttttttgtttttgttgttttttaagtgtttttaatttaaatagttaatatgttagaagagtatattttaatatttttattaatataataaaaaatttaattataatgtagtagaataagatttaatgtaagtagttttaatgtagttgtattaaattaaattagaagtaaaatagatgaatatatatatataatttaagttttatttaggatagtatatgtttattatgtttataaattgtgtttttgtttttgaggagtttgtaaggtaatggaggagatagataggtatttaaataaattagttttttttaattatggtacgtgttaagataggaagatgttagggtgttttgaggatattggtaggagggtttattttgatttgaagatataagtaaggttttttgaaatttgaatatttttttttattgttattataatatttgaggattacgttattattattttatttgtgtttttgtagttattttttaattggtttgtttgtatttattttagtttttagagtagtgtgtgtgtgtgtgtgtgtgtgtgtgtgtgttaatgttattcgtagttcgttatatttttaattaaaatttaattaaaataagtaaaatttttaattaaatattagtggttttttatatatttgagagtaaaatttaggtttttttttttcgtaaataagtttatagtaaatttggtttttgatgttttttttaattttattatatattattttttttgtagttattttttttaatagttttgattttatttttgtattttttttttggtaagttcgtttttttgtttttaggttgtgtatttattatttttttgtgaggaaaagtgtttttataattttagttggttagtattaattttagtttaagtttcgttttttgtaaacgtttttgttgataagtttttattttttttagggtttttttttttttatgttttttttttattattatttgaatttattagtttgttgtttatatttttgttttttgtttgtttattttaggatgttgtttttatgagagttaaaattttttttgttttgttttttatcgtattttaaggatttggtatttagtagttgtttaatatatatttattgaatgaataattgaatgaaaggtgtttgaattgagtttagatggatgaataagatttatttagtttaaaaatagtgggaaagtaaagagaatagtatgaagggaagatatagaggtatgaataggtatgggacgggtaggagtataagtagtttagtgttattagatggtagtgttagtagagagtggtggatgtggttggtgataaagatagaaattagtttatagaggttattgtattttatgattttggattttttggtttagagatagggagatttgtagattttggtttaaatttgtgttttttaaatattttaatagtgatttataagaaatatattttatgtatttgaattgagatttatttttagtttttagaagttgttatatttattggttcgtggttttttttattattttagagttagtagtagtagagcgagtttttggtattttatatttttttgatttatttttttgttttttttgtatatttttaagggtttttgtgattatattgggtttatttggttaatttagaataatttttttattttaaggtttttaattttaattacgtttttaaagtgtttttgttatgtagggtaatttgtttatagattttgggaattagggtatggatatttttggtgggttatttttttgtttattatagggatgtttatagggagttttttaaagattatatttttttttttttttcgtattttttttttaatagatatttgttgagtatttattgttttttagtgttaagtgttggtatttaatagtgagtaaggtagttaatgtttttgtttttatggggtttatattttagtatagaagatagatgataaataagtaattaagtaaaggaataaggtagttatagattgtgttatgaagatagtaataaggtgatgagtaaaaaattaattggggaagattatattggttagggagggcgtcggagggatagagatagtggttagggaggggttgtttggggaagtaatatatgaattgaaatttaaagggtgtaaatatgttagttatacgaagacgtaagggaagaggattttagtagaggatatggaaaatgtaaagttttttaggtagtaaagggtattgtttaaggaatagtttgaaggttagtgtgaatggagtagagtgaattaggtaaaaatgtaagcgatgatggtaagatgggaagaagtgaggttatgtagtggttgagagattgtgtgtggtatgggttgtggatatttttttaatagtagtagggattcgttgaagggtttttaatagtggtggtgtgtagggggtaatatgatttgatttatgttttttaaagatagttggttttgtgaaaatggtttagaaagggtaaggatggtttggaaagatatgttgacggttagaatagattaggggagagatgatagtggtttggattagggtgaggggatagttggaatggagagaagtgtattgatttgtaatatattttggaggtaaagttgatgggattagagatggtttagttgtaggagatgagaaaaaggttagaattaaagatgatttttaggtgtttttagttatttggggtaagaatattattcgttgagatagaaaaggttgaaggaagaatgaatttggagaaagggtgttaagaatttaaattgaatattttaatattgagaatttgttagatatttaagaggtaatgttaaggagatagatggatgagattggagtttagggggatgtgtgagttgatttattttgaaatttttagttagtagatgatatttagagttaggggattaggtgaaattttttatagagaaagtagaaatggaaaaaaaaaaaatattttgagtgagttaaggttttttaagagttaaaaattaagaggaaaataaagagtagttagtaaagatttatgttaatattatttagggtttttttgaatgatggttaggttagaggtagaggaaataaagggcgtttttttagatttttatagggataggagtgttttgtttttagtatttagtgtgtttagtatatgaaaggtagttatttatattgaatgaataagtgaaattttttgaagttttttaatattttttggtatatgtttaggtatggggttaagaggtaaatttttgttttgtattgattattttttagtggtttgatattatagaattttttagtttattttatgaatttttggtttatttttaatagaatttaaagaatttgttattgattagtagagttattttttgggtttgaatttgaaatagattagaaattgttagtttatgttttttgatttatttaagataaaattattttgtaaaataagtaattaaaaaataaataagtaaataagtttttttataaaatttaaataatttttggaattttttttttattgttaaagagattaattttttattaagttttagatgggttatgagttatttttcgatttattgattttagaattatttgattggattagaaatttttattggttaaattattttgtatggtatgatgatgaagttttgtttagaaggaaaagaaaaagaaaagtgttgtgtgggattaagttttagataggttaagtaatttgtatatggttttaagtatttaaatttagttttaaaggattttaaagtttattgttgtggtttgaatgtttatgttttttttaaatttatatgttaaaattttaatttttaaggtgatgatattaggagatggggtttttgggaggtgattgggttatgaaggtagaatttttacgaatggaattagtgattttataaaagagattttagagagtttcgttgttttttttattatgtgaggtcgtagtaagaaggttttatttatgaatcgtttatgaagtggatttttattagattttgaatttgttgattttttgattttgaatttgttagtttttagaattgtgagaaataaatttttgatgtttattatttatttaggttatggtattttgttatagtagtttaaatgaattaagatatttaaattttttttttaattttttgttgattttaagaagttttattgagatgggatttggaaggtggttaagatattcgatttattagttttaaaggtatatgttattttttaaaataataagattttaataaggtggagaaaaataaagcggtatttgaagtttttttgagttattttggttttggtattttttgaatatatttaatatgaatgaatttgtttttttttgtaagg

SEQ ID NO: 988 - DNA, 17967 bp, Artificial Sequence
  chemically treated genomic DNA (Homo sapiens)
ttttgtaaaagaagataaatttatttatgttaaatatgtttagaaaatattagagttaaaatagtttagaagagttttaagtgtcgttttatttttttttattttgttgagattttgttattttaaaaaatgatatgtatttttaaaattagtaaatcgaatattttagttattttttaaattttattttagtgagattttttggggttagtaaaggattagagaaggaatttggatgttttagtttatttgggttgttgtaataaaatattatgatttgggtaggtaataaatattagaaatttgttttttatagttttggggattggtaagtttaagattaagaggttagtagatttagggtttggtgagggtttattttatagacggtttatagatggggtttttttgttgcgattttatatggtggaagggataacggagttttttgggattttttttataaggttattagttttattcgtaaaaattttatttttatgatttaattattttttaaagattttattttttaatattattattttgagagttaggattttaatatataaatttgagggggatataaatatttagattatagtaataggttttggggttttttagaattgggtttaaatatttgagattatgtgtaagttgtttaatttgtttgagatttagttttatataatattttttttttttttttttttttaaataaggttttattattatattatatagagtagtttgattagtgagagtttttgatttagttaagtgattttggaattagtagatcgaaaaatggtttataatttatttggaatttagtaaaagattgatttttttggtagtaaaaaaggaattttaagggttgtttgggttttgtagagaagtttgtttatttatttgttttttaattatttattttatagaatgattttattttgaataggttagaaaatataagttggtaatttttgatttgttttaaatttaaatttaaggaatggttttattggttagtaataaattttttaaattttattaaagataggttaaaaatttataaagtaggttgggaagttttgtgatgttaggttattaaaaagtagttagtgtaaagtaaaagtttattttttaattttatatttagatatatgttagaaaatattgaagagttttagaaaattttatttatttatttaatatggatggttgttttttatgtgttaggtatattaagtgttagagataaagtatttttgtttttgtgggggtttaggaaagcgttttttgttttttttatttttagtttagttattatttaggaaaattttaaataatgttagtataagtttttgttggttattttttgttttttttttgatttttaatttttggaggattttagtttatttaaggtattttttttttttttatttttattttttttgtaggggattttatttggttttttagttttagatgttatttgttagttaaagattttagagtagattaatttatatatttttttgagttttagttttatttatttgtttttttggtattattttttagatgtttaatagatttttaatattaaggtgtttagtttaaatttttggtattttttttttaaatttattttttttttagttttttttattttagcgaatgatatttttattttaggtggttaaaaatatttagaagttatttttgattttaattttttttttattttttatagttaaattatttttagttttattaattttatttttaaaatatgttatagattaatgtatttttttttattttaattgtttttttattttagtttaaattattgttattttttttttagtttattttagtcgttaatatgtttttttaaattatttttgttttttttaagttatttttatagagttaattatttttgaaaaatataaattagattatgttattttttgtatattattattattggaaattttttaacgggtttttattgttgttagaaaaatatttatagtttatattatatataattttttagttattgtatggttttatttttttttattttgttattatcgtttatatttttgtttggtttattttgttttatttatattggtttttagattgttttttgaataatgttttttgttgtttagaggattttgtattttttatgttttttgttagaattttttttttttgcgttttcgtgtggttgatatatttatattttttagattttagtttatgtgttatttttttagatagtttttttttgattattgtttttattttttcgacgttttttttgattaatgtggttttttttagttgattttttatttattattttattattgtttttatggtataatttgtaattgttttatttttttatttaattatttgtttgttatttgttttttatattagaatataagttttataagagtaggaatattgattattttgtttattgttgaatattagtatttaatattgggaaatagtaagtatttaataaatgtttattgaaagaaagatgcgaaggagggaaaggaatatgatttttagaaaattttttataaatatttttgtggtagataggaaaatggtttattaaagatgtttatgttttaatttttagaatttgtgaataggttattttatatggtaaagatattttggagacgtgattaaagttaaggattttgagatgggaagattattttggattaattaagtgggtttaatatagttataggagtttttaaaagtgtataagaaaggtaggagagtgggttagagagatatgaggtattaaggattcgttttgttgttgttggttttgaagtggtggaaggagttacgagttaatgaatgtgatagtttttaaaagttggggatggattttagtttagatatataaaatgtgttttttgtgagttattgttaaaatgtttgagaagtatagatttaagttaaaatttgtaggtttttttgtttttaaattaaaaagtttaaggttatggaatataatggtttttgtgagttaatttttgtttttattattagttatatttattattttttgttgatattattatttaatgatattgagttgtttatatttttgttcgttttatgtttatttatgtttttgtgttttttttttatgttattttttttatttttttattatttttagattgggtgagttttatttatttatttaaatttagtttagatattttttatttagttatttatttaataaatatgtattaagtagttgttaagtgttaagtttttgggatacggtaaagaataagatagaagggattttagtttttatggaaataatattttggagtagataggtaaaaaataaaaatataagtaataaattggtgagtttaggtaataataaaagaaggatataaaagaggagggattttggggaggatagaaatttgttaataaaggcgtttgtaggaggcgaagtttgggttaaaattggtgttggttaattgaagttgtgggaatatttttttttatagaggaatggtgaatgtatagtttggaggtagaggaacgagtttgttaagggagaggtatagaaataaggttagggttgttggagaaagtgattgtagggagaatggtatgtgatgaaattagagaagatattaggagttagatttattatggatttgtttgcgaaaaaagggagtttagattttatttttaaatgtatgggaaattattggtgtttaattaggaattttatttattttaattgagttttaattgagggtgtaacgagttacgagtgatattaatatatatatatatatatatatatatatatattattttggggattagggtggatgtaggtagattagttaggaaatgattgtagaggtataggtaaaatgatgatgacgtggtttttaggtgttgtagtggtaatggaaagaagtgtttagattttaggaagttttatttatgtttttaggttagagtgaatttttttgttagtatttttagagtattttggtatttttttattttagtacgtattataattaaagagaattaatttatttagatatttgtttattttttttattattttgtaagttttttaggggtagaggtataatttgtggatatagtaggtatgtgttgttttggataaaatttaaattgtgtgtgtatgtttatttattttatttttagtttagtttaatgtaattatattaaaattatttatattaaattttattttattatattgtggttggattttttgttatattagtaaaggtgttaaaatatatttttttgatatattgattatttgagttaaaggtatttgaaaaatagtaggggtaagaagattattttgatttttttgttgttttttaaaattagaaggtgaaatttttatatgaaagatattttttgtattagaaagttaataatatttttatttttaaggatgagaaattgagattaagagaattttgtatagattttggtatttttatataatttagttatatttttataggttattattttttgtttaatttaatatttaagtaattgattttatttttttgggtttttatttttttatgttttttatgttttataatatttgttgagtaaatttgtattattttttttttgttaatttaatgttaatttaatttttagatttaattaagattttaggaggatggagcggagtttttttatttttatagtagttatgttagttgttgtattaaaatttggaatattttggtatagataaaattatggattgaattggaagataattgaatgaatggttatatagggattaagtaggtttttgttttttaattgtaaaagatatttatggcgtttttttgtagaaatttttaatatggattaaaatttatgaagttataatattttttaaatagtaaaatatttatatgataattataaggatttaaaaaaatggatatatatgaaatatgtttttatatatattatgttttattattaaataggttaaaatatatgtgtatattatataaatatatatatttatatgaaataggtaaaatggaagataaatttgagtttatataatggtatattgatttaaatataaatttgtttattttttttgattattaggtaaaaatagtttttttttttatgagaagtttagaatttttaaagatttttaagtaaatgaggtattttttaataaaatgaaatttattgtaattgtaaatattttttatatattttgtttagagggtaaatattaaaataataattttgttttgaattagaaaattaaagagtgtgttatgttattgatttattatttaagttgtgatagtttttagatggtgaaaataacgttttagatcggggatgggggtggggtgggcgggaataagttagaaatatatcgatcggtaggaagatagagataataattattttttgattagtttttttttttattgttttagagagaagtataaagtatgaagttattttaaaattgtattgtgttaggttaggaaaaaagaaatttttaagttttttttcgtaggtgataattttatgttggtagaaaaattttttatttttaaattattttttttttgtagtattgtattaaggttaagggaaatagtggtattaaggaaaagaaaaaggtgaatgaattttagttttgttatatgttattgattgtgagagtattatttttttatgttttatagtaggtatagtaatatttagttcgataaagttacggtgacgattaaggtaaagttattgtgaatagtttatggtgttatggatttatgagaatatttagtataaagtaagaattttattgaggttggtttttattttttttgttgattttttcgtttgtatttttttgttaaattatatatgatttttagtgtattagagttgtatgttttgttaggttaggtaaaaaaaattttaatttttaagattattaaagaatttaaaaagttaggggaggaaggagttatacgagttattagtaattattgtgttttgttgttttttttttttttaatagttgatattttagtttgggttattatagataattaaatgattgttttaagtgtgttttaaggttggttgttatataaatgaatgtcgttaatgattaggtgattaaatgaggtaaagaataaaattttttttttttgtttgtaaagttatttatagagatatgttttattggtagtagattaatatatagataatattttagaggttatttattttcgattttataaatggattatcgtgatttagaaaaaaagaggggatttgtttaagtttatattaatagtaaaatttagattagaattttagtttttttttttttttttttttttttgatgtagtttcgttttgttatttaggttggagtgtaatggtattattttggattattgtaatttttattttttgggtttaagcgatttttttgttttaattttttgagtagttgggattataagtatgcgttattatatttggttagttaatttttgtatttttagtagagatggggttttattatgttggttaggttggttttgaattgattttaggtgatttgtttgtttcggttttttatagtgttgagattataggtatgagttatcgtgttcggttagttttttgatttttaatttaatattatttttagatgtgaggttgtttgtaattaatagtaatagtagtagtataatattaaaaataatgttaattttaatattatattaatattaatgttgtaattttttgattttttattatgttttaggtacgatgttaggtattttatatataatttttatgatatttatttagtaaagtatttataatgtttaatgttttattttttagaaggttgatttattatttttgaggtttattttttttaaaagaggatgaaataataaaatttagcgtatatataatatgtaatcgtatttgatgttattttattatggtgatggaaaaggataattaaattaagttattaattagttaatttttttttttttatgaaattttttgagttatggttatgaaaatgaattgttttttattttaagtttattatttggtgaaagaatgtaataagttattatatgggtaaaagttcgtttattaggttttattattaaatcggttttatttataatgttatggtaaatggtttgaaggggaaggaaagtaaaatgtataattttttttatttttttttttttttatttaatagtttaagtattgtttatatgagttaaatttaatatatatatttgtttttttttttgtgtagttgacgaggttgtttggaattttttttaattttattggtaagtatttgttgttttatggtttttttttaattttatttaagtataggaattttttttttttgtttaaatttaggagattttcgaatttttgtttttttttttttttttttaaatttaatgtgtttttttttttttttttttatggtttttttttttttttaattttttttattttttttttttttttttttttattttttttggaatgttgtttttgttaattttgtttgtttttatttttattttagatatattttatttgatataatagatttttgaaatgttgtgcgtaaataaattagagttgaaatgaatttattttattttaattttttaattatttgtattgagaattattttattttatagattgaataagtatttttttaatataatagtaaaaagaaagaaagaaataagatacgaatggagttttggagaaataagatatttttaaataaattatatgattttttttttttttttgaatagtttttataagtttaaaatttttatggtaagtgtttaataaagtttcggaaattttagttttttttgatttattttttgtattttgttaggtttatcgataaaataagttgttttttattgggaaggatgatgtgttggaaagaggtttcgggtattatttttggtttttttatttttgtttttgttattatggtaggtaattttatattttaaagttttttttttttattttaaaaatagtaattgatttttattgagaaaattaaattttttttattaattttttttttttagtgtattggaaaggttttttttttgatatttttaatttggaagtttttgtttgtggataatggtaggaggtttatttttggattttgggtattgtaaagttttggttaagttttgttttattttgtaagtaattattgagtatttttataaagtattataaggtattaatatattaagataattgtattgttttgagaattttttaagaattttataattattttaagataattggaggtatatttgggaggggaattaaaaaattaagggtagtgattattatgttataatgtttttttaggttttttatataaattaagaatttagttgaagtttttatattaataattttttattttagtattttttgatattttatttaatgtgttgttttttttgtatattattgtaaaatagaggttaattaagattttaattttaataattttttgtaggtatttatttagtagtttattattgtgtaaagtatataatttagttgttaatatttggttaaatatataaagtaatgattagtattttattttatagatagaaaaatttgtaagttgattaagataatttagaaaaattatatataaatttagaattggattcgaattatattttatgttttttttttttatgagtatttgagaaataaaaatttaagtttgatgttttgttagtttaattgtttttttttttttatcggtttaaattttgtaggaataggtttattttttttatttatttttagtatgttttagggtttttatgttaaatttataaagttattatttttaagaggtattgaattatgtttacgtttattattttagtttaagtttttagaagagttttttgagtaattgtagtagtaatgaaaagagtagtggattcgtttaggatatttaagttttggttcggataattttagttatatggtttgtgataaattatttgattatttagtttaagtttttttatttgtaaaaagggaatataaatagtatttattggacggacgtggtgatttatatttgtaattttagtattttgggaggttgaggcgggtagattacgaggttaagagatcgagattattttaattaatatggtgaaatttcgtttgtattaaaaatataaaaattagttgggtatattggtgtgcgtttgtaattttagttatttgggaggttgaggtaggagaattatttgaattcgggaggtagaggttgtagtgagttaagatcgtattattgtattttagtttggcgatagtaagatttcgttttaaaaataaaaaataaataaataaaaaattagtatttattttataggattgttgggagggttaaatgataagttgttagtagagtatttggtatatagtaagagtttaattaatgttatttgttattattataagaaaaaaggtagtattatttttttttagtgatattacgagaattaagttagatggttttgtttttgatttttttttttgtttatttatttgatttaatattgaaagattgatttgattaaaattagattttatattttttaattttatgttatttattatttaagatatattaagtatttttaaaatttttttaaataattttgatttcgtaggttatgaattgggttttatatttttttatatttattaagtttaagtttagtaaatgtattgattataatgtatatgtttaatatttatttggaaaataaaaataaaaataaattattgttatattagcgaagaatattagaaatttttaagggtaaaggaaattgtataagattttttttgggatttggttttttttttttttttttttttttttgagatgaagttttatttttgtcgtttaggttggagtgtagtggcgtgatttttgtttattgtaatttttgtttttcgggtttaatcgatttttttgttttaatttttcgagtagttgggattattatgttatatggtgtgtgttattatgtttcgttaatttttgtgtttttagtagagatagggtttcgttatgttggttaggttagttttaaatttttgattttaggtgatttttttatttcggttttttaaagtgttgggattataggtatgagatatcgtgtttcgttattttgtataaatttatttgtaggagttgatagtagtgttgtgagcgtaattataaagatgataaataatttggtagagaataaagtaggtgtagtaatataaaaataagtttataattgagaaatgatgtttaatatttattgtatttggcggatttttttattttaaaaattatatgtgtgttttcgaatttttttttatattaaaatttattttaatatagaaaagatttcgtttgttaaagtttgggaatttattagtttatgtaatgaatatgatatttaagaggtatgatatatggaaaagagtatattgtaaatttttttggaggttgttgtgtttaatagatagtgtaatgtattgaggattttatattaaaatagggaaggaaagtgttagtttttagttattaaggtttttttagttatgtgttggatagagaaatagggtattgtattatttttattaatggaaaatgagaatttaacgtttgtttgtttaagtggaggtggttataaggttttgagttagagaggtggaaatagaaggaatatagttttgagttagaaatttgtaattttttaattgtgtgaaatatgtaagtttttatatttgtaaaatgggaatattaataataattttattatgtttttaaggaattagataatatatatttaaaaattaaatatatagtaggtgtttaataaagatgtttatttatatagagtatatatatagtagattataataattatttagagttttaaaaatggggaaaaaaggattaatttagttttattttttatatatatatgtgtatgtgtgtgtgtgtatatatatatatatgtatatgtatgtatgtatttatttttaagatagagtttcgttttgttgtttaggttggagtgtagtggttttattttggtttattgtaatttttgtttttcgggtttaagtaatttttttgttttagtttttcgagtagttgggattataggtgtgcgttattatgtttagttaattttcgtatttttaatagagatagggttttattatgttggttaggttggttttgaatttttgattttaagtgatttgtttattttggttttttaaaatgttgggattataggcgtgacgatcgtgtcgggattttgtttttagataaggtttatttgtatgtttttaggttattatttgtaagatttggatttaatggtatagatatataatttcgtataatgttgatattgatatttagtgtgttttagggagatgaggagggttttatagtttataaaggaaggggtattttatagaagagaaaattgaggttggttaatttgtttgtattagagtattttgttagtaattggttaggtagggattcggggttagtttagaggttataggaaagattgttgagataaggttagtttatttttattcgggattacggaaggttttttttaatattttatttatatttgatatatttttaagtaacgggagttacgtttgtgggtttgaattaaggttggatttttaggggtgttttttgtttttttttagtcgtcgttttttttttttcgtttgagtttattattttgtgtttcggtttagagagtattttggaggtttagttcgcgcgtttttttttttttatttagttaaattattatttagtatttttaagtgaatatttgtgtttagggcgttaggattgtgatgaagagaagttatttcggatcgtattggaagattttaaaaatatatatatatatatatatatataaagagagaagtcgtcgtcgaagttttttcgggagacgcgagatacggaatttcgggtacgtagatattttcgttggttcgggattttggggttttttttgttttcgatttcgagttattggttatttattacgtgtcgtttgttagcgggcgcggatttcgggtttgcggggacgggtggtttcggtgttttgggtcgtacgtgtcgcgtttttcgcgttttttgtcggcgttcgggcgttttcggtgttagcgttcgttttttcgttttcgtttttcgtttttgcgttattaatttcggggtgggcgcggggagttggcggcgagtgaggatcgggtcggggcgggggtcggggttgggcggtggcgtagggcggagaggattcgttttttagtttagttttggaagcgtacgcgggcgggcgttcgtggtttttatttcgcgggtcgaagcgggttcgggtgggattttgttatttgtgggttttgttgtgtcgttttgagtaagataattttttttttatcgttagtttttttttatataaaatgcggataataaagtttgttttataagacggagtaagggttgatcgaggtgaggtgcgtttatgtattaagatatgataggcgcgataaaatcgtgtgtttagcgtttatagttatagagacgtggtattttgttgatagttattagggaatttttttcgtagatgttttttttttgtgttttgtatcgtttagtttttattatatttgagcgtcgaggttttttaagtgggttgtgtataagatcgtttattggagtgcgggtagaatatattggaatttttatttgtatttgttgtttaaaaaatgagaaaaaagttaaatttgaatagatggcgtgttattattttcgtataggtttcgtgttataagtggtgtttttaggtaagagggaaaattgtttagagtatagaggggtcggtagttttgtataatatttatgatataatatttatgataatattatttagaaaaaaattgtatttaaatttgtaaagatagatttttattttgttatttaggttggttttaaatttttggttttaagtaattttttcgttttggttttttaaagtgtagggaatataggtttgagtttttgtattcgttagtttagatttttttaaatttaagatttttttaattataagatatattattatttatgcgttagtaagaaataaaaagaattgttaggtaaataataataatgtttttttaatatttagaattttttaaattaaaattttatttagtttagagattttatttagatatttttaaataaaatttagattttaaatatatgtatattatttatcgaatttttttttaagttttttttttttttttatttcgttgtttttggagtttttttttagtttattgagtttagtataggtttgttgagttcgtagaagtggataattgtatattacgtttttgggtattattttaaaatcgtttttaatgtttgagatgttaaatatgaaaaatgtatattttggaattaataatgtatagtagattgtttttatgggattgtgatatattgtagtttatatgttttagtaatttatttatatgaataattttattaaaattttttaaatcgtagaatttagaattttaatattattttgtaatgagatgatatataattgtagaaattatttgtaataaagattttaaaagttgttttaaagtgagttattttttttatttttataaaaaaattttaaatattttaaatttgttgattttttttgtattgatatatggtttttagtatatgttatttaatagatttttttgaagaataaaaaattttagaggtttatttgttgtttttttaaggtaatttttatattaagtgatacgttgttatgaagagacgatttgaaaataaatatttcgaagtgtttttattattgtgtgttttttttattgaagattttatgattgttattatagaaaatgtttttaaaaattcggaaataatttgttattttgttttaattttttaattgagtagtttagtggattttaaatttatttgttaaaaaatataaaaatgtagtagttttttattattttaaaaattgattgatattaagaataagattatgatagttaaatgttataataattttgtataatttatggattttttaatattttttagtgagaaggaaggtttttagttttgttaataaattaataattttaaaaatgtattttattttattttatttaaaaatttaatttatatatttgtgtgtgtatatgtgtgtgtgtgtatatatatatatataaatatatatatgtttttttgtttttttttttttgaaatagcgttttattttgttgtttcggttagagtatagtggtataattttagtttattgtaatttttatttttcgggtttaagtgatttttttgttttagttttttgagtagttgggattataggtacgcgttattatgttcggttaatttttgtatttatagtagagatggggttttattatattggttaggttggttttaaatttttgatttcgtgatttgtttattttagttttttaaagtgttgggattataggcgtgagttatcgcgttcggtatatatatgttttttaaggaaataaaaaaataattaaatatatgttggggatgttttttaaaaatgttttttttttttttttgaaggagtatattatttaaaatgttgaaagattattgttttattaatttttaatggtagtattttataaaattgtagaagttagatataaaatggtgttttaaatgtatttaaggtatattttttgagggaatagatgagagttgttgaggaaagaatttgaatttggttgttaagtaagtataataaattatgagaatatagtaagatgtaggtagtaatgataattttttttattttttttttttttttagatgtaagaaaaaaaaagttagaagatgataatttttatataagtattatttgagaaattattatgttttaggtttattagtatattgtttaatttagatttatattattaagtgaagatttgtattgattgttattgataatagtggtttttttattttgtatgttttttggattataaattttatgtacgtaaggattttttatttttagtatttggtatattgagtggtatagggtaggtagttaataagtatttattgagttgaattgatttgttttggagagattttattttttttggttagtttaacgggattgtaggtgttgtttaatttttatatttttcgatagttaaaaattagttggaaaattaaatataattttttttagtaagtcggtaatttttttgtatgaaattattatttgtagaggtttttttatttttttattttttttttcggttttttttttttattaatatttgggagttttattaatataggtatggtttttgttagtggttgtttgtttagttagagaaaaaaataaaaataaaaataataatgaaaataaaaataataataaagataaattcgtttttgtgttttttaaagaataaattttagatggtagacgatgtttgatgaagtaagagtttaatatataatttaaaatgttaattgtgattgttaatgtaattatttttaagtttatgggtatgatatggttttttgtgtagttgttaggtaaatgaatgtatttgtaaattaaaagtttaattaagtggataattatagtgatagtgataaagttttttttaggaaatattagtttagtttttatttttggtatagttttattattttaaatgtttaatttggtttattgttgatattaaatattttgaaaatacgtaattatattattttatgaataattgagatgtgttttttttaaagtgttatttgttaggataaatattaggaggtggttgttaatatagttatttagggtattaaatgaatgttggtattcgttaaatttggtaagacggttttaatattattttaaatttttatttataatgagaaaatttagaatttaagattaattgtttaattttaattgttttattttgtaaaagttttatttttaaaagttattattttgttagttttatttatttttttaaagtattaaatttataggatagtaatataatttttgaatatatttgtagtgttatgtattgaaaaagtttatataaaattaaaatagtgtaatattagatttttagattatgaataatttttataatttttaaaatgtagatttatattttttttataattgatatttaataagtataaatattgtttatagaggaataaattggttaggtttagtggtttatatatataattttagtattttgggaggttgaagtaggtggattatttgaggttaggagtttaagattagtttggttaaaatggagaaattttatttttgttgaatatataaaatttagttaggtatggtggtatttatttgtaattttagttatttaggaggttgaggtaggagaatggtttgaattcgggagttagaggttgtagtgagttaagatggtattattgtattttagtttgggtaatagagtaagattttgtttaaaaaaaaaaaaaaaaaagatgaataaattatatggaaattgttatgttttggagagtagtagtgcgtttttgagaggtttttagattgttggatgttttgttaaatgaatataaaggttaaagagtaaagtgagatatgaggtaaatttaaagttgtgatagttgtagggttttatataatataaattttatttataaattggttttgttatttttagtagttaaatttaaatatatgttataggatttatagattttattatgttatggttggttatttgattattagagttagaatttttggtggtgtaaaattttggtaagtttttataaaaaggagagtgatttgtataaaaggtaaattttttataaatatttttatataaaattatatatatgttttttatttttgttgtcgttgttgtttgtttgtttttggtttgttgtagagtatattaatagaagttttatgagaagtattttgaaatgtggatgtataattattaagatttttttttatattttatttttttggttttaaatgttttttttttttatgttttttatatatagaaaatattttgattttttaaatgagataatttaaagttttgtttagttatggtatttagttgagatttaagttttttgaaaaatgagtagtggtggttatttagtgagatatgttttttttgggtttatagtttataaataaataagtaaaaaatttaggttatttgtattttttatttcgttttgtttcgttttaaggatataaaatggtggaatagggataatgaatgtttagtttaggaaatagagaagtatgtgatatattagaagttattggtttaaagtattattgtttttagtggtgaatgtattagtttttttattttggtttgtaggatttttgttaaagaggtaggaagaattttaattaagtatttttttttataaattaaatattgtagagtagtattaaatgttaataatatttttttttttttttagttttttttttttaaataatagttttacgagaattt

SEQ ID NO: 989 - DNA, 6246 bp, Artificial Sequence
  chemically treated genomic DNA (Homo sapiens)
ttttgtatatttgtattttatataataatattttgtgtaatttttttttaaatgtagaatattgatattggagaatgttttttatatattttaagtgaaaaaggagtaaaaattatataatgtattattttatttttttaataaaatgtaaatgtgtatagtaaagatatagaggtgttatagtgttagggaaaaggggtgtaagattagtgtttgttttttattttttgttttgtttataaattttttatattaaaaatataaattttaaatgaaaataatggaataaatataaatttttattttataattaattaaaatgatagtaattgaattttttaaagttttaaatttattaaaatgggagaaatggatgatagtattagcgtttgaaaggtggaaagtggagggacggtgggtagattatttggttgatttaagaaaattgaattttaggttagttgagatttatgttgatttatagaattttaagaatgtttaggaattgggagaagattaaggatattagaagagaagggggtgaaaataaggaaagttgttgaaatttagtttaagaaatagttagatatttatttttgtttattaaagtcgagtgatttttttgtagtagggtttttttcggataggatatttggattaagaaatattagatatagtagagggcggtcgaaatatgttgaaattaggaatagttaatagatgttgaggtttttattttagttttttttttatttttgttgttggaatgttggagatagggagaattttttttgcgcgagttgatttgtttgttaaaaaaacgataaagaaattgttataggaggttttttaagtgaaaatagttagttatttgttttataggaaatagtttttttttatataattatttttagagatttttgttttaatatgtgtaggtaatttaggattatttaacgtgtaaggaaagtttataagatggaaaaaaaattttttttgaggtagggtttggttttgttatttaggttggagtgaagtggtgtgattataatttattgtagtttcgatttttgagtttaagtgatgtttttatatagttttttaagtagttgggattataggtatgtataattatgtttggttaagttttttttatgttttgtagaagtaaagtttttttatgttttttaggttggtgttaaatttttgggtttaagcgatcggttttttaaagtgttggaattataggggtgagttatcgcgtttagtttaaaataattttttaaagaaaatttgtagaaaataaagattatgtatgaaaaaggaaatttagaagatattaatgaaataagaatatagtgttgttagcgtgtatgtgtatatgcgtatatatatataaagaattaaatatttttaggaagataaagttatgagaatattttagagaagagaaattttttaaatggaaaatagaataaaaagaaaattaaaggataagtttaagaggtatatagttaaaaaaaatggtagttttaataagagagaataaagaagaaaagttataaaatgttttaatttaagtgtgaatataaaaatatattatttttatagtaagtgagaaaaatagggtgtaaaaggtgtatatgatgttattttatatgtagggataagggaaaataagattatatatttatagttgtttgtatttatataaattaataggatattaaaaaaaaaaaaaaataatatttaagaaaaatagttatttgtgagggaaggtggagattttattgaattttttatatatatagttgatttttgaatagtaggttttgaattgtatagatttatttatttacggatttttttttgtttttgttatttttgagatgataagatcgattttttttttttttttttttcggtttgtttaacgtgaagatagtgacgttgaagatttttgtgatgttttatttttatttaatgaataggaaatatatttttttttttttttttgtgatttttttaataatttttttttttttttttttttttttttaagacggagttttatattgtcgtttaggtttaagtgtagtggcgcgatttcggtttattgtaagtttcgtttttcgggtttacgttatttttttgttttagttttttgggtagttgggattataggcgtttattattacgttcggttaatttttttgtatttttagtagagacggggttttatcgtgttagttaggatggttttaattttttgatttcgtgattcgtttatttcggttttttaaagtgttgggattataggcgtgagttatcgcgttcggtttataaataatttttaaaagatagtaagggatatagtagggtagtaagtgttttatttataagaggagtagtaatgttagaggtttatagagtacggatttttagcgttgtcgttttatataattagtttttttgatttttaaaattatttgtattcgtaatttttttaaaaataaaaatttaaaaaattaaatttttttatttataaaaataatttttttaggttttattttttttgattgggtattatgtttttgttaacggagatttagagtttagagaaattcgaaaaagtaattttagtttttttaggatgagttggtcgggaggaagggaggttttaattttagcgtttcggggttagagtaaagcgaagaggttttttatggttataagcgggcggtttacgtagcgtattgtaggtaggtgcgagttatatgcgttaagtgttcggagcggttttttggtagttagtgttaattaaaattattcgtacgggagtggattttcgttgataatttagaaataagtaatagattttttgatgtagttatttgtgtcgcgttttttcgtatcgttcgttacgttttggtttttggagattattttttagggtaggggttgtcgttcggtcgggttcgcggggtttttcggtttgatatggtcggtgttggagcggtacgtgcgcgtttcggtttttcggtcgttttcgtttttcgtcggtgcgtatcggcgttcggggagtcgttggttcgggtgtttagtcggtttttgttttgtttggcgttcggatcgttatttttgtcgttttttcgttagttttcgtagtttttagattggtcggtttgcgcgtttatttttgtttttcggatcggttatcgtcggaggtcgcggaggagggttcggtcgcgtagatttcgtttatcgggtttatttttcgttatataaggttatttttttattttcgcgggttatcgtcgtcgtaatcgtcgcgttagcgtttttttttacgcgcgggggcgtttttgtttatcgttttcggtagggtttttggtggttatgggggataaggggcgttgatttattcgggcggggtttcgggagttgtatagattaaggtagtttttcgtttttttttttattacggagattttgtgggagatgtcgtgggttttttattatagattaggaaataggttcgtagaggggttatacggttaagtagcggtattttaggtattgggggttttcgaggggaaggggtagatttttgggagttagagttagtagttgggttgggaagtttcgagtgtggatagagagggtgggaatgacgttttttgtgggaagagagggtgggtaagtttgggatgtttttgagcgggaatttagtatgttttgtgaggagggttataagtatatttttgtgaggaggttgagttttatcgaggataggacggagggagtttgagtaggtagagagggggtttggggaggcgttggttcggggaggaagtgggtaggggagaaattttgatattaatatttaataggtaaatgtcgtggtttttgttgtgggggtttttggaggatttttaggaaaacgagggaagagtaggaaaaggcgatatggttgtaggggttaagtttaggagtcgttttttatagtatttattttgtagaagggaaatttgaggtttttagacggtaggggttgattttgtagagattggtgagtaaaggggattattttaagttttagtggtattaggaatatttataatttttgatttggattaaggttgttagtttggtttagttaagagttttttagaaggatggtttatatattttaaattaaaggggttagatacgtgtatattatttttagttattttggaagttgaggtggggggatcgtttgagtttgggagttggaggttagtttaggtaggtaatatagtgagattttatttttaaaaaaataaaataaaataaaataaaaaaatattaaaaaagtttttagaaagatttttgaatttttttggattttttagtggagatttggaaatttgaattttgataattttttttatagtggggttaaggaggaattaggtaagttaaaagaagtgaattttatttttttattgtttgtttgaattttgtatttaagtaagtgttatttaagtaatttaagagattggtttatcgaaaaaataaaattttttaaatttttatagttggtagattgtggttatagttatagtgtattaagattatttgtttagtatttttggtgatttaaaagggtttgaggataggagtttagagttgggttagttgtttaggtatttagggttgttataggtaaaattgttggaatttagggtagtattgtaaatgttacgtcgtttttagggttttttgtttgtcgttggaattaaatttatttagattttggaaattttgttttggattttttttaataagtttatgagaaattaaatttttttttttatgcgatattggattttttataaagtaaaattaagatgagtaaagatgtggtttttagatagtgtttgaaaaagtagagattatggtgttaggcgttattatttgggtttataaaagttgttataagacgttaaggttataagttatttagtttatgtattcgttttttaatttttttttgttggtattgggttttatggcgtttttgttgattacggttattgtttttatttgttttggcggttttgtttttttaggttttgtgtttttttttatagtttttagggagtttattgaggagttggttaatattatttagaattagaaggtgagtgtcggttagttagggttttagttatgagggttttagggtgggtgatttttaagatgaggttatgagtaggttgggtttggttttaagatgtttgtaggttaggaaaaatttttatggattaaggttcggtttagttatgagggagagaggagttgggttggggggtttagtattgtggatggatttatggaggtgtttggtagattttttagggattatttgtttttttggtttggttttgtttgttattgttagtttttatttagttatttttgaatagaggatagtagagaagggttagtatttttttagaattatgtggtatttgttaattggattttgattataataatgtagttattttttttagtattattataggttcgtttttataggaggattttttagtagagttcgttttttgttttattagtaatagtttatatgtttgagtattgtttatattaggtttggtgtacgtgttttatgtgttattttattattgttagttattttaagaggtaggtacgatgaatttattttgttaaggtttagtgaggttaagtgatagaggttggatttaagttaggtttggttaatattagagtgtttatgtttttaattgtagtgtttttttattattagaaggtagggtatttaatatattagatttttatcgttttttatttgatttgttttggttaatagtggtttaggttatttttattttattcgtttttattttggtttttttcgtaggtttttgtttttttgttttgattatggtaagttttgtatgtagtttgttttttattagtggtgttaattttttttttttagttttaagattttaaatagtgggattttatttttatgtttgttgtttaaagtagaaaacgaagtttaggaatgttgaggggttgttaggtttgtttttgtgttatattagggatgtttgtggggtttgtgttggggtagatttggtttgggttgttagggtaggtttataatttttgttagtattttgtttattgttattttgtttttatagg

SEQ ID NO: 990 - DNA, 6246 bp, Artificial Sequence
  chemically treated genomic DNA (Homo sapiens)
tttgtgggagtaaagtgatagtgagtagagtgttggtaggggttgtgggtttgttttggtagtttaggttaggtttgttttagtataggttttataagtatttttggtgtggtatagaggtaggtttggtagttttttagtatttttgagtttcgttttttgttttgaatagtaggtataggggtgaggttttattgtttagggttttggagttgagagaaaaaaattgatattattagtaagggataagttgtatgtaaggtttgttatagttagggtaggaggataggggtttgcgggaagggttagggtggggacgagtgaagtaggagtggtttgggttattgttgattaagataaattagatgggaggcggtggggatttggtgtattaaatgttttgttttttgatggtgagggaatattgtagttaggagtatggatattttggtgttggttaggtttggtttgaatttagtttttgttatttaattttattgaattttagtagaatgggtttatcgtatttgttttttgaggtggttggtagtgatgaaatgatatataaagtacgtgtattaggtttggtgtaagtagtgtttagatatgtgagttgttattagtggggtaaggagcggattttattaaggaatttttttgtaagggcgggtttatgatggtgttggggagaatggttgtattgttatggttaaaatttagttggtaaatgttatatggttttgggagggtgttggtttttttttgttgttttttgtttaggaatggttgagtaggagttggtagtggtagataaggttaggttaggagagtaggtagtttttggggagtttgttagatatttttataggtttatttatagtgttgagttttttagtttagttttttttttttttatggttgggtcgggttttggtttatggagattttttttgatttataggtattttaggattaggtttagtttgtttatgattttattttgggaattatttattttggagtttttatagttaggattttggttagtcgatatttattttttggttttgggtgatgttgattagttttttaatgagttttttgagggttgtagagggaggtatagggtttggggaggtaaagtcgttaaggtaagtgagagtaatgatcgtggttaataaaagcgttatgaggtttagtgttaataggagaggattgaggagcggatgtataggttgggtggtttgtggttttggcgttttgtggtagtttttataggtttaagtggtgacgtttgatattatggtttttgtttttttaggtattatttagaaattatatttttatttattttgattttattttgtggaaaatttagtgtcgtataaaggaaagagtttgattttttatggatttattgagaagggtttagggtagagtttttaagatttgggtgggtttaattttagcggtaggtaaggggttttgagagcggcgtggtatttgtaatgttgttttgagttttagtagttttgtttgtgataattttgagtatttggatagttgatttaattttgagtttttgtttttagatttttttgggttattagaagtgttgagtagatagttttagtgtattgtggttgtgattatagtttattagttatgggaatttggggagttttattttttcgatgaattagttttttaaattatttaagtaatatttgtttggatataaaatttaaataggtaatagaagagtaaagtttattttttttggtttgtttaatttttttttggttttattgtgagagggattgttaaagtttagatttttaggtttttattgagagatttagaaagatttagaggtttttttgggagtttttttggtgtttttttgttttgttttgttttgtttttttggagatggggttttattatgttgtttgtttaggttggtttttaatttttagatttaagcgatttttttattttagtttttagagtggttggaagtagtgtgtacgtgtttggtttttttaatttaaagtgtatgggttatttttttgggaaatttttaattgggttaggttggtagttttagtttaggttagagattgtaagtgtttttagtgttattggggtttggggtgattttttttgtttattagtttttgtaggattaatttttgtcgtttgggggttttaaattttttttttgtagaatgagtgttgtggagggcggtttttgggtttggtttttgtagttatgtcgtttttttttgtttttttttcgtttttttagaagttttttagaaatttttatagtagaggttacggtatttgtttgttgggtgttgatgttaagattttttttttatttatttttttttcgaattagcgtttttttaggttttttttttgtttgtttaggtttttttcgttttgttttcgatggggtttaatttttttataagggtgtgtttgtgattttttttataaggtatgttggattttcgtttagaggtattttaggtttgtttattttttttttttatagggaacgttatttttattttttttgtttatattcgaagttttttagtttagttgttggttttgatttttagaagtttgtttttttttttcgagggtttttagtgtttggagtgtcgttatttggtcgtgtgatttttttacgggtttgttttttaatttgtagtagagggtttacggtattttttatagggttttcgtgatgggggaaggagcggggaattattttggtttgtgtaattttcggagtttcgttcgggtgagttaacgttttttattttttatggttattaaaagttttgtcgggagcggtgggtaggggcgttttcgcgcgtgggagaaggcgttggcgcggcggttgcggcggcgatggttcgcggagataggggggtggttttatgtaacgggagatgggttcgataagcgggatttgcgcggtcgggttttttttcgcggttttcggcggtggtcggttcgggaggtaggggtgggcgcgtagatcggttagtttggaagttgcggaggttggcgagggggcggtaaaggtggcggttcgagcgttaggtagggtaagggtcggttggatattcgggttagcggtttttcgagcgtcggtgcgtatcggcgaggggcgggagcggtcgaggggtcgaggcgcgtacgtgtcgttttagtatcggttatgttaggtcgagggatttcgcgggttcggtcgagcggtagtttttgttttggagggtggtttttagggattaaggcgtggcgggcggtgcggagaggcgcggtatagatggttatattagagggtttgttgtttgtttttagattgttagcggggatttattttcgtgcgggtaattttaattaatattaattattaaagggtcgtttcgggtatttggcgtatgtggttcgtatttgtttgtaatgcgttgcgtgggtcgttcgtttatggttatggggagttttttcgttttgttttggtttcgaagcgttgggattgggatttttttttttttcgattagtttattttgggaaagttggggttgttttttcgggtttttttggattttgggttttcgttggtaaagatatgatgtttagttaggaggagtaaggtttgagagagttgtttttgtaagtgaaaggatttaattttttagatttttatttttaggaaagttacgaatgtagataattttaaaaattaagaaggttgattatgtaaaacggtagcgttgggaattcgtgttttatgggtttttggtattgttgttttttttgtgagtgaggtatttattgttttgttgtgttttttattgttttttaaaggttgtttataggtcgggcgcggtggtttacgtttgtaattttagtattttgggaggtcgagatgggcggattacgaggttaggagattgagattattttggttaatacggtgaaatttcgtttttattaaaaatataaaaaaattagtcgggcgtggtggtgggcgtttgtagttttagttatttaggaggttgaggtaggagaatggcgtgaattcgggaggcggagtttgtagtgagtcgaaatcgcgttattgtatttaagtttgggcgatagtgtgagatttcgttttaaaaaaaaaaaaaaaaaaaaaaaaaggttgttaagaaaattataaggaaggaggaaaaaatatattttttatttattaagtggaggtggaatattataaaggtttttagcgttattgtttttacgttgagtaggtcgaggaggaagaagaggaggggtcggttttgttattttaggggtggtagaggtaggagagaattcgtggataagtggatttgtgtagtttagaatttgttgtttaagggttaattgtgtatgtaaaaaatttagtggaatttttatttttttttataagtaattattttttttaggtgttgtttttttttttttttggtattttattagtttatgtaaatataagtaattgtgaatatatggttttatttttttttgtttttatatgtgaagtggtattatatatattttttgtattttgttttttttatttattataaaaataatatatttttgtatttatatttagattgggatattttatgattttttttttttgtttttttttattggaattgttattttttttgattatatattttttggatttgttttttaattttttttttattttattttttatttaaaaaattttttttttttgggatatttttatagttttatttttttgagggtatttgattttttgtgtgtgtgtgcgtatgtgtatatgtacgttaatagtattatgtttttgttttattgatattttttaagtttttttttttatatataatttttattttttgtaagttttttttaaaaaattgttttgaattgggcgcggtggtttatttttgtaattttagtattttggggggtcgatcgtttgagtttaggagtttgatattagtttgggaaatatagggagattttatttttataaaatataaaaaaaatttagttaggtatggttgtgtatatttgtgattttagttatttgggaggttgtgtgggagtattatttgagtttaggagtcgaagttgtagtgagttgtgattatattattttattttagtttgggtgatagagttagattttgttttaaaaaaaattttttttttattttataggttttttttgtacgttaggtaattttggattgtttgtatatgttaaaatagggatttttgagggtaattgtgtgggagggggttgttttttatagggtaggtggttgattgtttttatttggggaattttttgtggtagtttttttgtcgtttttttggtaggtaggttagttcgcgtagaaaagattttttttgtttttagtattttagtagtaagggtggagagagggttggggtgggggttttagtatttgttgattgtttttgattttagtatatttcgatcgttttttattgtgtttagtgttttttggtttagatattttattcggagaaaattttgttgtaggagagttattcgattttgatgaataaaaatggatatttaattgttttttaaattgagttttaataattttttttatttttattttttttttttttgatgtttttggtttttttttagtttttgagtatttttgggattttgtaaattaatataggttttagttggtttaggatttagtttttttgggttagttaagtagtttgtttatcgtttttttattttttattttttaaacgttggtgttgttatttattttttttattttggtgggtttaaaattttagaaaatttagttattgttattttagttggttataaagtgggagtttgtgtttattttattgtttttatttggaatttatatttttaatgtagagaatttataaataagataagaaataagaggtaaatattagttttgtattttttttttttggtattataatatttttgtatttttgttatgtatatttatattttgttagaaaaatgagataatatattatatagtttttattttttttttatttaaaatatatgaagagtattttttaatgttagtattttgtatttaaaaaaagattatataaaatgttattgtgtaaagtatagatatgtaaaa

SEQ ID NO: 991 - DNA, 5311 bp, Artificial Sequence
  chemically treated genomic DNA (Homo sapiens)
tggttagtatttttagatagtttaaataatgtgaatagaaagtattaaattttataattgattttttttatgtaaaggtaatagaaataatatgtttatagtttttatgtgttttttttaaagaaattattttagtgatattgtaaaaattttatttattattttttaataaataattgtttttgtaaattggttattgtttttataataaaataaaataaaaaatatatggttattttggatattgtagaagaattttttttttttttgttaatatagagaaagaatatttttaaaagattatgttatgtattattagtttagtaatgtttttttgtttttttttttttttttttattttttttgtatagattgtattagttgtggggtattgtgttagttatattatttttttaagttttagttttattgtttgtaaatatgtagtataaattttatatatttatagatttgttaaaaaataaataaattttttataaattataaaaagttaaataaacgaaagaaattattgttattatggtaaagattagtaaaggtagtatattggattaataagggtggtagaaattggaaattaataataagtgtttaattatttattatgaataagtttattttgttgaattaataaaggtaaatgtgtaggatgtggtaagttatttttaagtgttgtttagtggtagtgtttttagaagtaaattttttttaagtatatagagtaatttattatttttttagtatttttatatatattattttatttaatttttaagatatttttgttaggtttgtattattatttttattttatagatataaattgagatataatttattttttattatagtggttgaggtaggagtgaaatttagattgatatttatatcgttgtgttttttattataaaaagtttttcggttatgtatttgttattttatttaaagaatagttggttttgttagtttttatagtattttggtataattttaaatttgttttagatggtttttggttttatttataatttttttattttgtggtttgtagaatttgtgttttggttttgtgattgttttaggaatatttaattaatattttttacgtgtttgattattaggtaggaaagtattagagattttaattaatgtttttaaagtagagaggagaataaaagaggatttgtgataattgtttacgttaatttattttttgagaaattatatgattggtaagtatttggaatttttttaataatgtaaagattgtagttagttgttaaagtgagagtattatgttgtatgattttgaagcggtggagaagcgaggtcgagaagaggtaattattttaggtttgttattttaaaggagatttttagtgagaaattattttaaaagtgttgtgtaaaattgagtgggtagaaatagaaagtttttttttatattgattttaggtatggaaaatatttagtgtagtgattattattaagggttttggtattagattgtttagatttaaatttaagttttattatttatggtgtgtgatttgagggaagttatttgatttttgtatgttatagtttttggtttttaaaaagttaattttatagagtagagagtagaatagaagttattagaggttggggagggaataagggagtcgggatggggaaaggttggtgaatgggtataatgttatagttagataagaggaatatattttgatttttattgtatagtaaggtgagtatagttaataataatgaattgtattttttaaaagttagaagaaaggaatttgaatgtttttattataaagaattgataaatgtttgaggtgatgtatatgttaattatcgtgatttgattattatataacgttatttatgtattaaaatattatattgtattttataaatatgtataattattatgtattaattaaaaattaaagttaaaaagaaaatttaaataaataatatagaattaaaaatagtatatatgtttaagtttgattgtgaggattatatgagataatgtatataaattgtatagtatagggtagtgtttgagatgttgaataaatattagaaggtattattattatgatagatattatgattgttgttatttttattttgtgttttttgtaagatttagttgggatagtatttggtaaaaaatttttaaagatgtttaataaatatttattgaattattattttgttagaaatgttataatgataaaattgtgtggtgggttggatggtttgggtggtgatagtaggtagaggaaggttgggagttaggaagaggtttttagtaaaataggtgtaggatagatttattatgataagaatatttatttgttagttagtggaaagggtttaggagatatggtttttaattttagttttgttattaataagttgtgtatatttggtttatttatttttttttttggttgttatttttttatttttaaaaatgaggagttaagattagatgagtggttatgaattgtggtttgggggtttgaaatatagaaaaataatttttttaaatttaatatgtttgtatttgtttttttaattttttttttgtttttaggtttttttggtttttgtgaaaaatttcggtgtttttggtaattatatagtgtataaagttttttattgtattagtgataattttgtaatttagaagtaaaggagagaattgtttttgtgtttatttgggtaagaaagttttggttgggttttaggtgtaatttagtaattttttttgtgggtttatttataagtgatgttagaagttagttattttattttttatttttgtttgggtatattgattagtttgatttatgaaatgttatttgatagtttgagttagattttatagtttataaatggaatagaagtaaatgattttaaattttttatttagtatttatgttgtatatgatataatgttacgaaattttaaaggatagatcgataggggagagagaattttgttagaatttttttgagagtattgtaagggtagtttgattgtttttagtttttaaaggtaatatggaaggttttttttttgttagatttattgttttgattttagtagtaattagtgtgtttattttaatttttgagggtagttttgtggaagatttataattttttgttagttaaatttatttagtatttatagatgtattagtgggtagttattggttggtaagtaaagagagaggaattggggagaaagagagatttgttgggttttagtgagagaaatgatatttttttttgattttatgaggcgtagaatttttaaaataatatggtgttgatttagtttggtttgttaattaaaggaagatttaaatattggggttttagaggaaaagcgtttataattttgagttatgtttgtgggatttagtagaatggggtggaagtgtataggattgggtattatgagatttttgttttatttttagttttgttattaatttgttgtgtaattttgggtggggtaagtttgagttttattgtttaatttataaaagagaatttgattagttttgtttgtaatatatatattggttttaaaaatttgattttaagattttataaagtagttattgaggtttattaaagttataatattatagatggattaggtagggggaagagggtggggtggaagagagggtttgttttattgaattaatttatgtataagaaaagaagggtagttttttttttttttttgagtgatttttaattttttattttatgtgaaattgttggttttagaatatagattcgaagagaagtgtatggaattgggagtagtagttttttttgaaaagtaaagtatttttaattgagtagttatttgaaggtatgaattttttaaattttgattatattcgttaagaattaatatttaagaatagaaagatgattaaattgtattttatggtaatgaaatgttgttttagtttaagaaagagatgaaaagtttagatttgttttttagaaaggttatttttgttgtatatggtgtggaaaatggattagaggtaggaaagattgaataaggagatttttgttaagattttttatttaggaagtggtagtggtaatggagagattagatgggagaggagttgaggaagatttttaggtttttggtttgggtaattggaaggatggcgatgttatttattaataaaggaaatataggaaaaagtggaataataatgagagtagatggaaataaaaaattttaattaaaagaagtaattaaaagaaaaaaggagtaaagaagaaagttaatcgtttagtagggggcgaaagagttaaataaatattttttttaaattaaaaaaagaaatatttatgaggaaatagagtaaagttttgaattttttgaggtttcggtttaggttttgagtttttttagtggttaaataattttttattttattttattttattttatttatttatttagagatagtttcgttttattgtttaggttggagtgtaatggtgggattttggtttattgtaattttcgtttttcgggtttaagttatttttttgtttcggtttttcgaatagttgggattataggcgttcgttattatgtttggttaattgtgtatttttagtagagaaaggattttattatgttggttaggttgttttaaatttttgattttaggtgatttattcgttttagttttcgaaagtgttgggattataggtatgagttattatgttcggtcgaaataatttttaaatattttttttttttttttttttttttttttttttttagaaaagagtatttgattgtgttttatgtgttgttaggggagacggttgttatggagatggatgatattataattttattgtgaattagtaagaatattttcgtgagtttaacggtttttcggatgaaggttatttgaagtcgttataatttggttagaagtgtgtttgtcggcggggaggtgaggagttataagggtttttgtttagttttgtttttatttttgtaagtaggatgagattagaattttttttttttaattatattggtttttaatttgattatttttgtttttatggtttgaggtggatatagtttttttagtttttggtagagaagtatatagagagttttttaaagtatttttaattacgtttagtttgattatttgatgtaagataaagttaaaatgttatattttttttttataga

SEQ ID NO: 992 - DNA, 5311 bp, Artificial Sequence
  chemically treated genomic DNA (Homo sapiens)
tttatgaaggaaaaatataatattttaattttattttatattaaataattaaattaaacgtgattaaaaatattttggaaagttttttgtgtgtttttttattaagaattgggaaaattgtgtttattttagattatggaaatagaaataattaagttaggaattaatataattggaaagaaaggattttagttttattttgtttataagaataaaaataaagttaagtaaaaatttttgtagttttttattttttcgtcgataggtatatttttgattaggttatggcgattttaaatagtttttattcggaagatcgttagatttacgagagtgtttttattggtttataatggagttatgatattatttatttttatagtaatcgttttttttagtaatatataaaatatagttaaatatttttttttgaggggaaaaaaagaaaaaagaaaaagaaaaaagtatttgaaagttatttcggtcgggtatggtggtttatgtttgtaattttagtattttcggaggttgaggcgggtggattatttgaagttaggagtttgagatagtttggttaatatggtgaaattttttttttattaaaaatgtataattagttaggtatggtggcgggcgtttgtaattttagttattcggaaggtcgaggtaggagaatggtttgaattcgggaggcggagattgtagtgagttaagattttattattgtattttagtttgggtaatagagcgagattgtttttaaataaataaataaaataaaataaaataaaatagaaagttatttgattattgagaaagtttagaatttaaatcgaagttttagagagtttaaaattttgttttgtttttttataaatatttttttttttagtttaaaaaaagtgtttatttagttttttcgttttttgttggacgattgatttttttttttgtttttttttttttttaattattttttttaattaaaattttttatttttatttatttttattattgttttatttttttttgtgttttttttattagtaaatggtatcgttatttttttagttgtttaaattagaaatttgggagttttttttaattttttttttatttaatttttttattattattattattttttaaatggaggattttagtagggatttttttatttagttttttttgtttttgatttattttttatattatatatagtaagagtgatttttttaaagggtaaatttgaattttttattttttttttaaattaaaatagtattttattgttatagaatataatttagttatttttttgtttttggatattggtttttgacggatatgattaaaatttaaaggatttatgtttttaaatagttatttaattaaaaatattttgttttttaggaaaaattattatttttaattttatatattttttttcgaatttatattttggaattaataattttatataaagtaaaggattaaaagttatttaaaagaaaagaagggattgtttttttttttttgtgtatagattaatttaataggatagatttttttttttattttatttttttttttttatttgatttatttgtaatattgtaattttggtaagttttaatggttattttatagaattttaggattaaatttttagaattagtatgtatattatagataaggttagttaaatttttttttataaattgggtagtaaaatttagatttgttttatttaagattatatagtaaattagtaataaagttggaagtagaatagagattttatgatgtttagttttgtgtatttttattttattttgttgggttttataggtatgatttaggattatgaacgttttttttttggaattttagtgtttaaatttttttttaattagtaaattaagttgaattaatattatgttattttaaaaattttgcgttttataaaattaggagagaatgttattttttttattgaggtttaataaatttttttttttttttaatttttttttttttatttgttagttaatggttgtttattaatgtatttgtaagtattaggtagatttggttaatagaaggttatggattttttatagagttatttttagagattaagatgaatatattggttattattgggattagggtaataggtttgataaagagaaaattttttatattatttttaaggattaagggtaattaggttgtttttataatgtttttagagagattttaataaaatttttttttttttatcgatttgttttttaagatttcgtagtattatgttatgtatagtataaatgttaagtaaagagtttaaaattatttgtttttattttatttataggttatgaaatttgatttaggttattaaatagtattttatggattagattgattaatatatttaagtaaaggtggaaaatgggataattagtttttagtattatttatggataaatttataaaaggagttgttgaattatatttagggtttaattaagatttttttatttaaatgaatataaagataatttttttttttgtttttgggttataggattgttattagtgtaatgaggggttttatatattatgtggttattaggaatatcggagttttttataaggattagggggatttgaagataaagggaagattagaaaagtaaatgtagatatattagatttgaaaaagttgtttttttatattttagatttttagattatagtttataattatttatttggttttagttttttatttttaaaaataaggaaataatagttagagaggaaggtaagtaagttaagtgtatataatttattggtggtagagttgggattgaaaattatattttttgaattttttttattaattagtaaataaatgtttttattataatgaatttattttgtatttattttattagaagtttttttttaatttttaatttttttttatttattgttattatttaaattatttagtttattatatagttttattattatgatatttttgatagagtaataatttaataaatatttattgagtatttttggaagttttttgttagatattattttagttaaattttgtagaagatataaagtgaaagtggtaatagttatagtatttgttatagtaatagtattttttagtatttatttaatattttaggtattgttttgtgttatgtaatttatatgtattattttatataatttttataattagatttggatatatatattatttttagttttatgttatttgtttaaattttttttttaattttaatttttaattgatatataatgattgtatatatttgtggggtatagtgtaatgttttgatatatggataacgttgtgtaatgattaaattacggtaattagtatatatattattttaaatatttattagttttttgtggtaaaaatatttaaattttttttttttagtttttgaaaaatataatttattattgttagttatatttattttattgtgtaatagaaattagaatgtattttttttatttaattgtaatattgtatttatttattaatttttttttatttcggtttttttattttttttttagtttttggtaatttttattttattttttattttatgagattaattttttaaagattagaaattatgatatatagaagttaaatggttttttttaagttatatattataaatggtgaaatttggatttaaatttagataatttagtattagagtttttgatggtaattattatattaggtattttttatgtttaagattaatgtggaggggagttttttatttttatttatttagttttatataatatttttgagatagttttttattgagaattttttttggaatggtaaatttaaagtgattgttttttttcggtttcgtttttttatcgttttaaagttatgtaatataatatttttattttaatagttggttgtaatttttgtattattggagaaattttaggtatttattaattatatggttttttaagaaatagattaacgtaagtagttattataggtttttttttgtttttttttttattttagagatattaattagaatttttaatatttttttgtttaataattaagtacgtagaaaatattagttaggtatttttgaaatagttatagggttaggatatagattttataagttataagatggggaagttatgggtgaggttaaaagttatttaaagtaaatttggaattatattaaggtgttgtaaaagttggtaggattaattattttttggataaagtaatagatatatagtcgaggagttttttataataaaagatataacggtgtaagtattaatttggattttatttttgttttaattattgtgataagaggtaaattatattttaatttgtatttataaaatggaggtaatgatataagtttggtaggggtgttttgaagattaaataagataatgtatgtgaaagtgttagaagaatagtaaattgttttatatatttgagaggggtttgtttttgaggatattgttattaagtaatatttgaaaataatttattatattttatatatttgtttttattaatttagtaaaataaatttgtttatagtagataattagatatttattattaatttttaatttttattatttttgttgatttaatatgttgtttttattgatttttgttataataatagtaatttttttcgtttgtttagttttttgtagtttgtaaagaatttgtttattttttaataggtttgtaagtgtataaggtttgtattgtatgtttataaatagtaaaattggggtttagagaagtgatatgattagtatagtgttttatagttgatataatttatatagaaaggataggaaaaagaaggaagagatagaaaaatattgttaggttaataatatataatatggttttttagaaatgttttttttttatgttgataaaggaaaaaaagatttttttatagtatttaaaatgattatatgttttttgttttattttattgtaaaggtagtgattaatttgtaaagataattatttattagaaaatgataaatggaatttttgtaatgttattaaaatgatttttttaaaaaaaatatataaaaattataggtatgttatttttgttgtttttgtataaaaaaaattaattataaaatttgatattttttatttatattgtttaagttatttaaaaatattggtta

SEQ ID NO: 993 - DNA, 6092 bp, Artificial Sequence
  chemically treated genomic DNA (Homo sapiens)
tattaaggtaattttttatataattataataataaaattaatgatattttagttagtgattagaattttatattgatattttaattagtaattagaattaattttaatatatattatgaagaaattttagttgataatttaatgaaaagtgattgtaggattaaatatatataaattatagaatgaagttatataaatatataaattattaaattattttatgataatggaaagagtttttttatatatatatatatatatatatatatatatatatatatttataagtttttagattttgattttagtaagtatttaaattatgaaataagagggttttttttaattaagattaatataataaatatttattgaaggttaattatttgttagttatagagttaaaattaatgttagtttaattttgttaatataaatttattattggtattgatttgatttatattttttgtaaaggttattatgtgttgtaaaaaatgcgtgaattttaattatagaataaatttaaggaatatgtatttgttatgttttagttaatatatgtgaagagaagtaaaatttttttttataatttgttattaaaataaatgttgataagatttattatatatatttataatatatttttagattataaatttaaataggtttattaatgttttgtaattagattttaattgttaaggttaatattaaatgattgtttagaatagtattggtagtatatgaatttgttatttttttttatttaagtttttttcgttttatattaagtattaatgtatttaagataatatgtatttttaaatatattaaaaattaagtatgttattgtgatggttaatattgagtgttaatttgattgaattgaaagaagtaaagtattatttttcggtgtgtttgtgagggtgttgataaaggagattaatatttgagttagtgaatagagagaggtagatttatttttaatgtgtaggtattatttaaatagttgttagtatagttagaataaagtaggtagaaaaataagtaaggtttatatttgtttagttttttagtttttatttttttttcgtgttggatgttttttgtttttaaatattagattcgaagttttttagtttttggatttttggatttatattagtggtttgttagtgatttttaggttttaggttataggttgaaggttgtattgttgttttttttatttttgaggttttgggatttagattgatttattataggtttttttgttttttagtttgtagacggtttgttatggaatattattttgcgattatgagttaattttttttaataaatttttttttatatatatatatattttattagttttgtttttttagagaattttgattaatatagttattattgtttttaatttttagtttgaaattagatattttttttttttgtttgttatgggtatattttgatattttagtttaaagttatttatttttattagaatttgttagtttttagtttttttgttttaaatttgtagtaatgttttgttagtattttgttagttattttatttaaataatttatgttagtagtagggttgtaatatttattgtagttttattatagaaatttaagatgagaaagtagaaatttaaggaaaattgaaaagttttttgtttggtggtgattaaagttattttgaagtaaataaaattggattaagatatattgtttgggggtttacgtttttttttttatgaatttagttttagaaatagtggagaatggttgttaatttaaaggtattagagagtaggaatgtgtatttaagttagattgtttgagtttaaatttttgttgggttagttaatttttatgtgattttaggtaagttgtataattttttgggttttggtttttttatttgtaaaatggagataataatagtttatattttatagttttgttgtgaggatttaataagttaatatttgtgtttagtatagtattggagaaatagtagattggaggaattatagaagttttaattaatattgttgtggttttgaaaaagtagtaatttgaggagtttttgaaaatttaaatagtatttaaggttaagagtatttgtttattgttaggattattagaaaaaaatgtgagaagtaatttcgaggtaatgttgtattttagtatgttttatttcgaatggaaatgtagagaatttaggtaggttatgttttttaaagagtaggggattaatttgtttttgatgggaggtttaaattttagtaaaattataaataaggttatagttatggattttgaatattaaattagatgaaataatttgtaattttttttatgtaattataaaagttagaaaataaattattagtaatttattttaaagatgattgtttaattgatattgtttttgaaaaaagatattaaaaatttattaaattataattttattgttaattatttgaatttaggaagattattatggttatttttatgagatttagttaatttttatttttttttattttgtaattttattagttattttaagatagttttaaattattttattaatttttatttttgtttttaatttatgtagtagaatttatttgtttattggtatgagtaatttttaatattttgttaaatagtttgtggtaattgaaaatataagttgtatatattagatttttttttttgagtgtaatgtaataaaaataaattatgttgtaaatttaattttattgaattgtaggtatttataattaattaaaaatatttttaaaatatttgtatttatgaaaataaatttgattaatatatttgggaggtaaatagtagagtaaagtatattttatgattataataatttttagttgtattttattgttatttatgttttttatttttttattttgataaaatgttttatatattatttagtttattttgttttagaatttattatagttgaaatttaataaatagttgtagattaatttttttattgttatatatttagattatgttttaagtttattttataagtaaatttttcgttaattttatagtgttgtgaaaattttttagtagtttagaacgtttttggtggttttaatatattaaaagtatgtagttagatattgatggttttgagttttgtagatagttaataaagttgaagtttataggttagtgagtattagttgagagtattttttatagagtttgtgggtagtttaagagagataggatttgagatgtgatgatatgttttttggtagtagtaatatttgatattgagttttgttaggtggtgttgagcgtggatatttgttttttttatcggttgtagagaatatagtatttattaaaggagttgaaagaggtgttagaggagtttatatggtaggagtttaggaagttttgtaatagtttaaaatgaggttgggatatatgatatatttgtttatttttattttttatttttatatatatgtatattagttttttcgtggttgttatatttttgtggtgagatttaaattagttgtagttttgtttttttagtgtatgtttattttgtaaattagagttttaatgtattgttatgaaaaattttgattggttttgaaatttattgatattattataagaaaatttaatatgatatcgttatgaatagaaatggatgatggttttatatttttaaatataatttttaattatggtgaaattttgaatggttgtaaaaattgtttttgtatttttatattttatttattttgttaatggagattatttagagtttgatgtaatttttattaaaaagtttattagtaattattttaaatataaaattgatattaaaaaattgagttaatgaaaataaatttaaattttttataaaaatatgaaattatattatacggaattttatgtatatggaaagtgaataatttttattatttttttatttgatatttattatatttatgtaattaaaaatataattaaattttaaattaaattaaattgcgttttaggaagatattattttttttgaattatgattttgaaaatttggaaagtatcgtataagagggatttttagtgatttataagagtgtaagattttgtaaagtatttttaaaattaagcgtgagatttttgttattgtttttatggtatgtaaattatttagttttaatttagtttttttttttaatgtaaaaatattataagaataatattttacgtttttattaaatgggattatgtgtgatattttatattggattatataataggttggaaaagtgattcgtagagaggtttattgttttaagtttattttttgtattaattgttttgtataaagttgttattcgggtgtttttttttaatattttttttagttggattttaaagttttttttttgtagtttgtgcggggattaagaggtcggtttagagtagtcgtttagtatttagattcgatatttttttttttttttttaggaagatttggatgcgcgttagtttagttcgggtttttaggtttagttgcggaagttttttatatggtgttcgtcgtttgggatgcggttatttttgtgttttttttgtaggtgtttcggtaggtagaggaggagatcggtggttggtgtttttgtagggcggggttggggtttttcgatgtttttgcgtttgttttgtaagttttgcgttttaggtttcggtagggacggaaataggtcgggaagtagtgatatttggggtagttagttatttaggagtcgtcgttattcgttttatttttagttttcgcgggaggtgtttgttttcgtttatgttttcggtttttttttttttattttttttttcgttaggggttgggatttcgggtggtaggcgttcgggggaattttagttgattcgtttattgttttcgaagttcggcgtttttcgggagggaattgggtggtcgtattttttcggttgcggtggttgtcgttttttattttgtagttaggattcgatggaggtatagagttcggtttttttgttttgggaggggagtggtggtggttgaaagggcgatggaatttttttcgaaagtttacgtttagggttttttttagttttagcgttatttttcggtttattttattggtcgagttgtttcgtttttttatggggaaaatttagtcgtaattttaatttttggttttttttttaatgatatttttgaggtttttttagttattttttcgttttcggaggagcgtagatcgtaggtttttttgtttttggcgtgcgattttttattgcgttgcgtttttacggcgttttaggttgttggttagcgtaaggcgggtcgggtatttcgcgtttcgttgggagggtgagggacgcgcgtttggcggttttagttaagttgcgggtttttgagaagacgttgtttcgtagttttgagggttgagttttgtatttagttaagtttaggaaggttaagaaaaggtatcgtagttttttattttttaattgttttcgttttaaatttattgtgggtcggtgtagatgtttgtgcgtgcgcgtttatttttatttttgtaaaattaaattatcgtttttttttttgtttgtatacgttttttgggagagaaatttgtaggaatggttagtgtttggtagttaggtttgggtttgtattggttttaattttgcgttagttagttattttttagagaagcgatagtgtatttagaatgtcgaaggaatttggaaaaaatacgagcgaattttattgaaataaaattattatttaaggtggtttttaaatgaaaatttagttaatttttttaagtgttattaagatcgtatgtagtaagggtatatagtttatttgattttatgtaattttatgtattaaaaattatgttgattttaaagtatgtttaaattaaattaatttttaaatgatgtttataatagatttttaaataggatgagttagtaattttaaaattggaagtaaagtggtg

SEQ ID NO: 994 - DNA, 6092 bp, Artificial Sequence
  chemically treated genomic DNA (Homo sapiens)
tattattttatttttagttttgaaattgttgatttattttatttaagaatttgttgtaagtattatttaagaattagtttggtttagatatattttgaagttaatatagtttttaatgtatggaattatataaagttaaatgaattatatatttttgttatatgcggttttaataatatttgaaaaaattggttggatttttatttaaaagttattttgaataatgattttattttagtgaaattcgttcgtattttttttaagttttttcgatattttagatatattatcgtttttttaagagataattggttggcgtagagttggaattaatatagatttaggtttgattgttaagtattgattatttttgtaaattttttttttagaagacgtgtgtaagtaaagaagagggcgataatttgattttgtaaaggtagggatagacgcgtacgtatagatatttgtatcggtttataatgagtttgggacgggagtagttaggaagtggggagttgcggtatttttttttggtttttttgagtttgattgggtgtagaatttagtttttagggttgcgggatagcgtttttttagaaattcgtagtttggttggggtcgttagacgcgcgttttttatttttttagcggagcgcggggtgttcggttcgttttgcgttagttagtagtttggaacgtcgtaagagcgtagcgtagtagggagtcgtacgttaggggtaaagggatttgcgatttgcgttttttcggaagcgggaggatggttaggagagttttagaagtgttattaaaggaaaaattaaaaattgaagttgcggttaagttttttttatgagaaggcggggtagttcggttagtaggatagatcggagggtaacgttggagttgggaggggttttgggcgtaggttttcggggaaaattttatcgtttttttaattattattattttttttttaaggtaaagaagtcgagttttgtatttttatcgagttttggttgtagggtggggggcgatagttatcgtagtcgggagggtgcggttatttagttttttttcggggggcgtcggatttcgaaggtagtgagcgagttagttgggattttttcgggcgtttgttattcggagttttaatttttggcgaaaagaaaagtgaaagagaaagagtcgggagtataggcgaagataaatatttttcgcggagattgggggtggggcgggtggcggcggtttttggatgattgattgttttaggtgttattgtttttcggtttgttttcgtttttgtcggggtttggggcgtagaatttgtagggtaagcgtaaggatatcgaggagttttagtttcgttttgtaggaatattagttatcggtttttttttttatttgtcgggatatttgtagagaaggtataaggatagtcgtattttaagcgacgggtattatgtgggaagttttcgtagttgaatttggagattcgggttgggttggcgcgtatttaagtttttttgaggaaagggaaaaggatgtcggatttggatgttgggcggttattttagatcggttttttggttttcgtataggttgtaagaaggaaattttgaagtttaattaggggaaatgttggaagaagatattcgggtggtagttttgtgtaagatagttggtatagggagtgaatttagagtaatgagtttttttgcggattatttttttagtttattgtgtagtttagtgtaaaatattatatatggttttatttgatggaagcgtgagatgttgtttttgtagtatttttatattggaggaaggaattgagttgaggttgagtgatttgtatgttataaaggtagtagtaaagattttacgtttagttttgaaagtattttgtagaattttgtatttttgtgaattattgaaaattttttttgtacggtgttttttaaatttttagagttatggtttagagaaaatgatgtttttttggagcgtagtttaatttagtttaaaatttaattatgtttttaattatataaatatgataaatattaaatagaaaaataatagaaattatttattttttatgtatataaagtttcgtataatataattttatatttttatgaaaaatttgagtttatttttattaatttaattttttgatattagttttatatttgaaataattattgatggattttttgatgagaattatattaaattttagatagtttttattaataaaataagtgaggtataaaaatgtaaaaatagtttttataattatttaaaattttattatagttggaaattatatttaagaatatgaagttattatttatttttgtttatgacgatgttatgttgaatttttttgtgatggtgttaatggattttaagattagttagaattttttatagtaatatattgaagttttgatttgtagaatgagtatgtattgggagagtaagattgtagttggtttggattttattataagaatatagtagttacggaaggattgatatgtatatgtgtgaagatagagaatagggatgaataagtgtattatgtgttttaattttattttggattgttgtagagttttttggatttttgttatgtaaatttttttagtattttttttagtttttttaatggatattgtgttttttgtagtcggtgaaggaagtaggtgtttacgtttagtattatttagtagagtttaatattagatattgttgttgttagaggatatattattatattttagattttgttttttttggattgtttataaattttatagaaagtgtttttagttggtgtttattagtttgtgggttttagttttgttagttgtttgtaggatttagggttattagtatttgattgtatatttttaatatattgagattattaagaacgttttgagttattagagagtttttataatattatgaaattgacggaaagtttatttgtagggtgaatttaaggtataatttgagtatataatagtaagaaaattggtttataattgtttattgggttttaattatagtaggttttagaataagatggattaaatgatatataaagtattttgttagagtagggagataaaaaatataaataatagtaaagtataattaaaaattattatagttataagatatgttttgttttattatttgttttttaaatatgttggttaaatttgtttttataaatatagatgttttaaaagtatttttaattagttatgagtgtttgtagtttaatgaagttgggtttgtaatataatttgtttttgttgtattgtatttaaaaagaaaagtttaatgtatgtaatttgtgtttttagttgttataggttgtttggtaaaatattgaaaattatttatattaatgaataagtaaattttgttgtataaattaaaagtaaagatgaagattgatgaaataatttgaaattgttttaagataattaataaaattatagggtagaaagaagtggagattaattaaattttatagaagtgattataataatttttttgaatttaaataattaataataaaattatagtttaataaatttttaatatttttttttaaaaataatgttaattgggtaattatttttaaaataaattattaataatttattttttagtttttgtgattatatggaagaagttataagttattttatttgatttagtgtttaaagtttatgattgtggttttatttatggttttattaagatttaaattttttattaagaataagttgattttttgttttttggaaaatatggtttgtttgggttttttatatttttattcggggtaaagtatgttgaaatgtagtattatttcgaagttgttttttatatttttttttggtgattttgataatagatagatatttttggttttaaatattatttaggtttttaagagttttttaagttgttgtttttttagaattataatagtattagttaggatttttgtagtttttttaatttgttatttttttagtgttgtgttaaatataaatgttaatttattaaatttttatagtaaagttatgagatataaattattattatttttattttataaatgggaaaattaaggtttaaagaattatatagtttgtttaagattatatggaaattgattgatttagtaaggatttgaatttagatagtttggtttgaatatatatttttattttttggtgtttttaaattggtagttattttttattgtttttaaaattgaatttataaggaaagaagcgtggatttttagatagtatgttttagtttaattttgtttgttttagggtaattttagttattattaggtaggaaattttttagttttttttgaatttttgtttttttattttaagtttttgtaatgaaattgtaatagatattgtagttttgttattaatataagttatttgaataaagtgattgataaaatgttggtagaatattgttgtaggtttgaaatagaggaattaggagttggtagattttgatagagatgggtgattttgaattgaaatgttagagtgtatttatgataaataaggagaaaagatgtttagttttaagttggagattaagaataataataattgtattagttagggttttttagggggatagaattaataaaatatatgtatatatgaaagggagtttattaaggagaattgatttatgatcgtaaggtaatattttatgataggtcgtttgtaaattaaggagtaaggaagtttgtggtggattagtttaagttttaaaattttagaagtagggaagataatagtgtagtttttagtttgtggtttaaggtttgagagttattggtaaattattgatgtaagtttaagagtttaaaagttgaagaatttcgagtttgatgtttgagggtaagaagtatttagtacgggagaaagatgaaggttggaaaattgagtaagtataaattttgtttgtttttttgtttattttattttagttgtgttggtagttatttagatggtgtttatatattaagggtgggtttgtttttttttgtttattaatttaaatgttaattttttttgttaatatttttatagatatatcgaagggtaatattttgttttttttaatttaattaagttgatatttaatgttaattattataataatatatttaatttttaatatatttaaaagtatatgttattttaaatgtattggtatttaatgtagggcggaaggggtttaagtagaaaaaagtgataagtttatatgttattagtattattttgaatagttatttaatgttgattttaataattaaaatttagttataaaatattaataaatttatttagatttataatttgagagtatattataaatgtatgtaatggattttgttagtatttattttaatgataaattgtaaaaaggaattttatttttttttatatatattggttaaaatatggtaaatatatattttttgaatttgttttatgattaaaatttacgtattttttataatatataataatttttataaaaagtgtaaattaagttaatattaataataggtttatgttaataaagttaaattggtattggttttgattttatggttagtaaatagttggtttttaataaatatttgttatattaattttggttaaaaaaaatttttttgttttatagtttaaatatttgttagaattaaaatttagaaatttatagatatgtgtgtatgtatgtgtgtatatatgtatgtatgtaaaaaagttttttttattattatgaaatgatttgataatttgtatatttgtgtaattttattttgtggtttatgtgtgtttaattttataattattttttattaaattgttaattaaaatttttttataatatatattaaaattagttttaattattggttaaagtattaatatagggttttgattattggttaaaatattattgattttgttattatggttgtgtgggaaattattttgatg

SEQ ID NO: 995 - DNA, 16236 bp, Artificial Sequence
  chemically treated genomic DNA (Homo sapiens)
tgattttgattttgaatttatgggttatttttataaataatcgtttttttatatttatttatatatgagtatttaatagtaaaaaatatgatatagtattaaattagtgaaaatataatgtgtttagggttattaagtagtttagtggtgttattagagatttggattagtcgatagataatagtaattacgatagtgggtttttatttttattaatgatgttgtgttttgattaaacgatattgtaggtcgggttcggtggtttatgtttgtaattttagtattttgtgaggttaaggtaggaggtttatttgaagttaggagtttgagattagtttggttaacgtggtgaagttttatttttattaataatataaaaaaaaaattagtcgggtatggtggtaggcgtttttaattttagttatttaggaagttgaggcggaaggattatttgagtttgggagtttaaggttgtagtgagatggaattacgttattgtattttagttagggtaatatagtgagattttgttttaaaaaaaaaaaaaaaaaaaaaggaaaagtttattataagttaaattttgagtttagagtacgtgtagaattttggagaagtttttatttttaaggtaggagttcgtagttaatagttttttgggtttttggtgtagattggttggagattggagaagttatattatgagaaaggggtttttgtttttttttttgggtcgaattaggtagtagtaatttgtaattatttggttatttgttggtattttgtagggtagtttattttgtaaaagtattaggtgttgacgtaggagagttgtaagtaaaagaagattttgtaaaagggttttttagggtttcgtataaggggataagttggtatagggtttttattttgtttattttgtttcgaatatttatcgttttagttttttaatgagtttatcgtatgtttttattatggcgtttgtaggtgcgtgttttgttgtgataatagtattatgttcgttattattgttagtataagtattttggtttagaatcgttttgttattgtttattatcggttaatgaacgaataattggagttatagtatagatgttaaaaatttgtatatttatttcgtttagtatgttgatatattttgaaggtatattttttgtttgtatagggaggttagatattattttttttttattttatatatggaatatttttatgttattattttgtttattattattattgaatatagtcgtagattagaggttgtgttatgtacgtatggttgtgtcgttagttattgagttttaagtattggaaatagtattggtattttttatgttaaatattttttgaaaatttttatatttatttttttgtttattgttgttagcgtgtaatgtttttatatttattttttattgatttttattgatttaaggatattttggttatatggttgaagtaatgaagttatatttggaagaaagtttatggtataaatattatttttaatgagagttttagttggaggatgagtagaatggttgttaaagaaaaataaaattttgtagttattatttagtttattttttttatagtgatataagttattggtttaaaatgtttgtgagattaattagaaaagatgtttttgattatatatgtaattttagttatttaggaagttgaggtgggaggatggtttgaggttaggagtgtgagattagttttggtaatatagtgagattttatttttagaaataaataaatattagttaggtgtggtggtgtatatttataggtgtgttgtgttgtttaggttggtttcgaatttttgagtttaagtgatttatttattttggttttttaaagtgttgggattatagacgtgagttattgtattcggttaatatttttaatattattagattagagagtagagaataagtaaaaatagtatagtgagaagtgtatagaggcggggtttggttttatatggggaattgtcgggatttattatgggtgtgttcgatttgtatataggttattttattattttttgtgtgcgtgtttgtatgggggaatttgggtatgtatagaaaagatattttttagttgaaggcggttgggagagttttttttttttttggggatgttgaataaatagtgtgttatgtgtttgtgttttgattgttatttattttacgagattaggtgtggaattttttatttgtggcgtaatgttagagtttaaaaagttttggattttggattattttggatttgggatttggagattaggggtgtttaatttgtatggtattgtttatatgaattttttttttttttttttgagatcgagtttttttttgtcgtttaggttagagtgtagtggtgtgattttagtttattgtattttttattttttaggtttaagcgatttttatgttttagttttttaagtagatgagattataggtgcgtgttattatattttgttaatttttgtatttttagtagagatggggttttattatgtaggttaggttggtttcgaatttttgattttaagtgatttgtttattttagttttttaaagtgttgggattatagttatgagttattatatttagttttaattatatgaatttttaaaaatgtaagttattttgttcgttgtatatggatatatatatggaaaaggggtttaagaatgtttgggaatgatgagtattagttttaagaaatatttatttgcgagaaagtggaagacggaggaagagaaagatgtaagaatataaaggggttttaattttatttgtaatttttttattttaaaaaatatttgaagtaaatattgagtagatatattaagttttgataggatgaggtagtaggtttatggatatttattatatttattgattgttatagttcgaagtatatttgaaatttatattatttaataacgtatatatatgtaatgaaatagagttttttaagtatattaaatttataattttatttttaaattttaaaatttatttttggttagaatgtagtaaaatgggtattttaatataattaatgttagttagaaggtatattgatataagatttttggaaagtaagatagaaatatttgtttaaaagagaaaaagtttttaaaaatattttttattagttgatttaatagttttattgtaggaaatttattttaagcgattttaaatttataagattttgtagaaagatatttatgataatgttatttttaatattaaaataatagaggggatgttaaattatgataatttgtagttattaaaaatttttataaagagtttgtaataatggagaaatttttattttataaatgtttatagaataaaaaatgttttattgtatatatgttatgtttagtttgtatttaataaatttttaatatatttgagaatattaaggaatattgttaatttttaaatttgattttattattttgagatttattattaagtattgagagaaattgaataatgtgggatttttttagttggagtaagggtggttatttttgtttagaaaaaaagaatggattttgtgtggttattgtcggatggtaggtttattattttttttattttttttttttaaatttaagagataggaattggttgtgttgtttaggttggagtgtagtggtgcgattttagtttattgtaattttagttttttgggtttaagtgatttttttgttttagttttttgaatagttgggattataggcgttcgttattatgtttagttaattttggtatttttagtagagatggggttttattatgttggttaggttagtttcgaatttttgattttaggcgatttatttgttttggttttcgaaagtgtttggattttaggagtggttatcgcgttcggttttaaatttttttatttaatttttaagtttagggttataagtgtaggtttgttataaaggtaaatttgtgttttgggggattattgtatagattatttcgtttttaaagagaatttgtaagtatgttataaaagttttataaatacgttgtgagattttaagaggtaatgatcgaggtttggagatgtttcgttttgtttaatgttatcgttagatttgagaatttgtatttgggagtttatagattcggtttttaggttttattttgagattttaagaaagaaaaaaatttattagttaaagaggaggatggtagtttggaagaatttaaggaagcgaggtttagaggtgaagtattgtggttttttttttttttttttttttttcgttttttttttttttaagatgaggtattttttaggggagtaaagttgtagtaggaattcggcgaagtggcggagttggggttttagcgggcgtcgggggtcgcgggagttagtaggtggcgggggttgcgtttcgttcgggttagagcgtattaggtaggtgttcgcgttttcgtatcgcggcgatattttcgcgggtatttatttaggtcggtcgtttataatcgagcgtagggtcgcggagggagattaggaaagtcgaaggcggagtagttggaggcgattagcgtcgggcgaggttaagtggattcgagtcgtagagagggttggagagagtttgtttttcgatgattttgtttatttttttcgtagtggggatatcggatcgagtgtatattggaggttttagagtacgacgagcgcggaggatcgggaggttttcgggtttgcgtgggtaaggttttgggtttttatcgggtacggtttatgcgtttcggggataggggtggttgtgcggtgtcgcggcggtcggcggggttttttttttagtaggggtggggacgttgagttacggatttgttatcgttttgtattttttcgagttttcgggggttaaagtaaaagcgaaagcgaatgcgattggcggggcggtaggttttagagtagcgttcgttattttttttcggtttgggtagcgttcgttcggggagtttagcggtgttttgtggagttgtcgttatggtttcgcggcgggcgcgcggttgtcggattttcggtttttcggcgttgttattgttgttgttgtttcggtcgtcggcgacgcggggtagggagttgggagtaggggcgttcgggcgggatttggaagggggtcgggacgtggagttggagggaatcgggcgttttattttttcgggtcgtgcgggggcgtcggtgttttcgggagcgcggtgcgcgtaggtttaggtcggggaggggacgcggcgtcgggtaggagggatacgtgtcgggagtcggggtcgtagggagagcgtcgtcgttgcgttcgggttatttacgtaagggagcgggcggtttggttggggttttcgaggtcgaggttaggagtagttttgagaagttcgttttggttacgggagcgcggagtcggcggcgtttagtagtttggagatacgggcgagtgcgttttttttaggcgtttggattgtagggcgggtgttgtatagtacgcggttttcggaggggttcgggagaaattatttttttcgatttttaggtaaaagtaaattatgttagtgggagttgggagggtggggaggagttgtgttttagggggaaacgcgtcgggtaagttgtatatttggggatttggaaataatttttaatttttaagcgattaggaaattagtagaggcggtcgggatcggatgggggtggggagtgggggttagtttggagtttatattcgtagaaaaagggggaagagatttgtgatcgtttggtgtattcgagaagaaagcgggtcgcggagttttgatttcggtagggaggacggaatgagcgatttttaggggttttgtttcggtagttagaggaaggaggaaaatagtagtagggtttagttttatttttgttagcgtttttttatttttttatagttagggagtttttggagggtttgatgaaagttatgaattttcggtttttagaaaaatgtatgaatgaatatagttataaaatgtgtatatgattttggggttaaagttttattgaaggttatttatggattttttataggaattagtaacgttatgatttgtgtgtgtttttaagcgagattttgaataatttatatttagtcgggttagtttgtttaggttttggttaaagttattttacgtatagttgttgttgtttggtgtggtttgaacgtttttttattttttgttatttttattttagttttgcgaggttttttgaagtttcgtttttatgagattttgatgtttggatttttttttatatttgagaagtagagttagttggtgatcggttggttttttttagttggttagtagtgttataggattttatagttggtaattggggtagttggattatataatatgaaagtgaaatgtagttttagttaaagtttagtagagaggaggtgttttttttgaagattgagtggataggggagtattattgtgagatttttgattttattagttgtatagttttgttttttgattttagaaagatgttgttattttttttttttaaagtttttaatgtttttttttttttttttttttttttttttgtttttttttttgagacggagttttattttgttatttcggttggggtgtagtagcgcgattttagtttattgtaattttcgttttttgggtttaagcgattttgttgttttagttttttgagtagttgggattataggcgatcgttattacgtttagtaatttttgtgtttttaatagagacggggttttattatgttggttaggttgatttaatatggtgattatttttgattttgtgatttgttcgtttcggttttttaaagtgttgggattataggcgtgagttagtttgtttagtcgttgttttttttttttttaatagttttattgaggtataattgatcgataataaattgtatatattgaagttgtatattttgataagtttggaggtaaatgtatatatatttatgaaattattgttattattaagagtgaatataattattatttttaaagatttttttatgttttgtatagtttttattttttatttcgtttattttttaggtaatttgatgtattttttaaaattttttataaatagaattatacggtaggaatttttttttgtttggttttttttatagatagtaattattttgagaatttatttatgttgtaatttgtataagtagtttattagtttttattattgagtagtagtattttatttatggttagtttattatttgtttagttatttatttgttaagggatatttgggttgtttttagtttgggattattataaagaaagttgttatgaatattgatatataggtttttgtatggatatatgtttttattttttatgggtagagaatggttgggagtagagtggttgtgttatatggtaggtgtatgtttaatttttttttttttgaaataatgttatattattgttttttaagttggagtgtagtagtatgattatagtttattgtagttttgattttttaggtgtttaatttttaatttttatttatttatttttaatttttatttatttttaatttatttattttgagatagaattttattttgttgtttagattgaagtgtagtggttttatttttgtttattgaaatttttgttttttgggtttaagcgatttttttgttttagttttttgagtagttgggattataggtttgtattattacgttcggttaatttttgtatttttagtagagatggggttttattatgttggttaggttggtttcgaatttttgattttaggggatttgtttgttttggttttttaaagtgttgggattataggtgtgagttattgtatttggttttagaagtttaatttttaaagaaattgttaaattattttttaaagttgttatacgattttatatttttatagtagtgtagggaagttttagtttttttatatttttgttagtttttggtatgatgaatttttttaattttatttattttattaggtatgtagggggtttttttttgtagttttaatttgtatttttttatagttggtgatgttatgtgtttatttgttatgtatatattttttttggtagtatttgtttatattttttttgtttttttaaaaattgaattgtattagttgtttgtggtggtttatatttgtaattttagtattttgggaggttaacgcgggtagattatttgaggttaggagttcgagattagttaggttaatatggtaaaattttttttttattaaaaatataaaaattagttagttgtggtagtttatgtttgtaatgttagttatttaggaggttgaggtaggagaatcgtttgaattttggaggtagaggttgcggtgagtagagatcgcgttattgtattttagtttgggatatagagcgagattgtttttttttttttttttgattttgttttatgtataaaaaattgaattgtattattattgaattttgagagttttttatatattttggatacgaggttttaattaggtatatgatttgtaaatatttttttagattttgtggtttatttttttttttagtagtgttttttgaaaagtagaagtttttaatttttatgaagtttaatttattaatttgttatgttgtgttttgggtttttggtgttatatttaagaaatatttgtttagtttaaggttataaaggtttatttttatgtgtttttttagaagttttatagttttagggtttatatttatggttgtgatttattttgaattaatttttgtttataatgtgaggtatgaattaaaggttgttttgggattttgtttgtttttatatatgtatatttaattattttagtattttttattgaaaagattatttttattgatttttttttatattttttgaatattagttagttatatgtgtttaagttggttgtagtatataaaatattattatataaaaattagttttatttttatatatttataatgaataattagaaattaaaaaattttaaaaagttatttgaaataatattaaaaagtattagatatttacggataaatttaataaaagatgtgaaagatattttttatatatggaaaattataaagtattgtttagagaaattaaggaataaaattaatggagagatatattatgtttatgggttggataaattaatattattaaggtgtaaagttttttttttgtgttattatgtataataagttgttgttagtttgtttttatttaaaaggtttgatgtgtaggggcgtttattatgttgggtagaaggttattgattttttagagagtattttagtttgaaagattgcgggcgatggttagaagtaattgagaagattgttttgtttgaagataaatatttttagttattaattttagttcgttttttttatgtaaggtgtaagtgtatttggggttgtttttataattttttatgtgtttttaagtatttttaagttattttttagaattttaggggtttttttttaaattttttattttttattttttatttattttatttagttgttattgtttttttgtttttattgatagtaaaaaagtggtgaaaacgtgagtgtataaaatatgagatttgttaaaattaatataaattttaaatagcggaggattgagtaaataaaatggagttgtttttaagtagtagatattatatgatttatttttttattagaagaagattaagaagtagttgttattgaatggggaagatgttatgtgttggttatatgtgggtatgtatgtagttgtttgtttttttttatttttttgttataatttgaattgttttgtaataagaaaagtaaataaataaaattataaaagaaatagtataattaagatttagaattttggagttttttttaatttatttttaattatagttgattttgtttggtaatgtttttatgattttacgaaagtttgtttaatttataaatatttgtttattgtattttagtttgggcgataaagcgagattttgttttaaaaataataataaaaataataatagtaataataatatgtatttaaatgaataaatatatatgaaattttttagtatatatcgtgggagttatattagtgttgtttattggatatagttgatgtgatttgaatgtttttttttggaaaggtatgatttttttttgtgtagtggggagtttttgagggtttttgtgtaggggagtattattggagttgtatggtggaaaggttgtttttgtttagagtgtgaagaatgaattgtagttaggagattttagagaataggagttgtattgaggtttttgaaatcgttttggtgggtggtgatgaaattttgaatataggcggtgttaatgtaggagatagaagaggttagatgttttttcgagttttaaaattatagaatgtattttattattttttttttatttgttttttaatttgtagtttttaatttttgtaagattttaataattattatttaaggattcgagttatggagaaatttatttggtatataagaggtgggttaggaagtttagttaatgagtttgagagagaaagaaaagaattgttaagttttaggtagtgagttggagatagtttgtattttttgggaattttaaaaggaagtgtgttgatttggttgatattttagcggggaaaataaggaaggaaggtgatgggtgattgtgaggttagaggtttttgtttttttcgtatattagttttatagtgagtattttgagggtaggaattatatttgatatatttttgaattttattatttttagttcgtgtaggtatttgaaaggtgttgtaagcgaggggaatgttggagtttattttgattttgtttataggattgggagttacgttaattcgataatttttgaattttggatatggaattaggtcgaggttgttagtttttattagattttgtaaattaatttgatagataaggaagtgtgatttataggttttgggaaatagaaagaggtgtggttttatatattattttggtgattttatttaaatgatcgttaggatttgttgtatatgttttttggttattttagagttttgaaagttttagagttataagtttattttaatttttattattttataattttattatatgtatttagaaaatatttatcgtatattagtcgtaggaaagtgagagtattatagaattgtgaaatatatatattatttgtaaggagtttataatattgtaaataaggtgagatttgtttatattgaataattagggaataatgttatgagagaatatatagaaagtataatttaagtatttaaagatgtgattaaggtatgtggaaatgaagttattgttttaattaaatgtattatttttggaggacggtttgagtttaggagtttgagattaggttgggtaatatggtgagattttatttttaggaaaaaaaaaattagttaggtatggtggtatgtgtttttagttttagttattcgggaggttgaggtaggaggattgtttaaggttaggagtttgaggttgtagcggggtataattatgttattgtgttttagtttgggtgatagagttagattttgttttaaaataaaataaaataaaataaaataaaataaaataaaataataatgaaataaaataaaattattttaaaaataaaataataaaatgaaatagtgttagtaatattattaatatagttatgagatagtttaattttataaagtaagtaattggttattatttgtttggttggattggttgtagtatattgatatttttgtatatttaaatattaattatttatagatttattttggtttgaggatcgtttagaatggaagaattattgatagatttttttttttagtaaaatgatagagtagatattaaaaaatttttttgttataaaaatatttagaaatgataaataatatagtgtaaatgttttttaaaattttgagttgataaataataattaattgtttaaagtaaaataataataatgtgttatggggtataatatatgttaaagtaaaatatagaataatagtataagggtttgggggagagattggaagtttgttgttttagatttttataggatatgtatgtggtggtataatattatcggaaggaaaattgtgataaggtaaagatatatagtggatattttaaaataattattaaattagtataacgagttatagttaataattaataaaggagataaaatggaattataaaatatatttagagaatttatgatgtgattatttttataggaaattatatggaatttataaagttgttattagaataagtgagtttataagggtgtagaatatagagttaagatattaaaaaattaatatgtaaaatattagtaataaataataagaaatcgaaataaatattatattatttgtagtgatataaaaaatatgaaatatttagggatatgtttgataaaagatgtataaggttggtacgttgaaaattataaaatatttttggagaaattgtagaatttttaaataaattaagagagatatcgtgttgatgggtttttaagaagatttaatattattaagatattaatttttttttaaattgatttttaaatttaatgaattttaattaaaattttagtaggtttttgttggtagatattgatatattgtttgttaaatttagtaggttaggcggggtggtttacgtttgtaattttagtattttgggaggattttttgaatttaggagtttgagattagtttgagtaatatagtaagattttatttttataaattaaaaaaataataattagttgggtatggtggtgtatatttgtggttttaggtatttaggaggttgaggtggaaagattatttgagtttaggtagttgaggttgtagtgagttatgattatgttattgtatttttcgttgggagatagagtgagattttattttggaaaaatttaatttaatttaatttaatttaatttaaaaaatttaatttaaaaattttaattttaaaaatttaattaaattaaaaaatttaatttaaaaattttaattataaaattttaattaaatttaaaaatttaatttaaaaaattaatttaatttaatttaaaaataaaaaaatagtaaaggatttagaaaagtaaatttagttttgaaaatgattagtatagtaggaggatttatattatttgattttaagatttatgataaagtaataataattaaggtagtacggtattggtgttaaaataaatagatatatagatcgatggaatcgattggtgagttagttagaaatatatataatatatttagtttttgtttaggattttatataaatagttttggaggtttacggttgttggaaatgggtagggaatattttttgtataaaatttgttatagatgtaagagataggttggttgttttggcgggaaggagtagaatatttgaaagttttaattatgaggtttagatatacgaggtttgcgtgagatttaggataatggaaaattgtttttagtgttattattatcggataagtaggtagtaagtaggtagtatagttatttattatggagggtaggatggggtgggtaagtgtggagaaataatattttgtggtttaggtaggtagagaaggatagaagattagtgtggagtagaatatggagaaaaagtttttgatattttagtattagatagtattagaggttttaaagttagtggggttttgtaggtaattatagtaatagtagtatttaaatttattttaataatttgtgagatcgattttattttttacgttattagtttagtagaagatgtgtttttattggaatggggagtagtggcggttattggataatagatgtttgagataggaagtgagtagagcgttgtttttgtgatagaggagaaggttttgggatgggagttgaatggaaagaataattttgaatttgagatttttttttttttattttgtttttagtttgtttggtataggattttttagaagtaagagtagaggttatggaattttaatagggatgtgttagtgaggtttgggatgtttttgtgtggatttaggtgatggtttttttgtgatttatttattgtgttttttgtttagttaggttattagggtatttgttttgtgttgatttttataagaatttttttcgtgttaaggtttttaatattttggtatttgttgttaatgttttttgtttggttggtttgttggtttttggggggttttttgtttgtttgagatagatttttgttttgttatttaggttcgagtgtagtggtataattttggtttattgtaattttcgttttttaggtttttgtgatttttttgttttagttttttgagtagttgggattataggcgtttattattatatttagttaattttttgtattttagtagagacgggtttttattatgttagttaggttggttttgaatttttgattttaggtgattcgtttgttttagttttttaaagttttcggattataggcgtgagttatcgtatttagtttattttttatcgaatttattttcggttatatttgtatttttttaggggtatgtattaataattgtaattaaataatatttgttatttttaatagagttgagttgtgtttattggtttatttattttttttttaatgtattatattttgggaatggaaagtattttaaaatgtatgaatgattaattagagttgaaagtaatagtagtttttgggaaaatgatgttttatggggaataaggtgtttttgtagttgtaaaggaatgatttgattttggtcgggtgcggtggtttatatttgtaattttaatattttgggaggttaaagcgggatgattataaggttaagagattaaggttattttggttaaaatggtgaaattttgtttttattaaaaatataaaaattagttgggtgtggtggtgtgtatttgtagttatagttatttaggaggttgaggtaggagaatcgtttgaatttaggaggtggaggttgtagtgagttaagatcgtgttattgtattttagtttggtgatagagtgaaatttcgttttaaaaaagaaaggtaaggtaaggtaaggtaaggtaaggtaaggtaagataaggtaaggttcgattttgtaagtattgttaagttaatatatatatgtgtatatataagggagtggatttttgagatggaggtgggagaatttgatttagttaaaaattattagaatagaaatttagggtttggtatggtggtttatatttgtaattttagtattttgggaggtcgaggcgggtagattatttgaggttaggagtttaagattagtttggttaatttttaggttagagtgtagtggtgtgatcgtggtttattgtaatttttgttttttaggtttaagtaatttttttgttttagtttttttagtagttgggattataggcgtttgttattacgttcggttaattttttgtatttttaataaagatggggtgttattatgttggttaggtttaaagatgtatttttaaaggtgatgttggtcgtagagatttgtgggagagtttgtagggggtttatttggaggtatttgttgtcgtttagtgagaattggaggttgggtttacggtggagaggggtgaagattttaagagagattgagggtttggagaggggtgggaaatgaagggagagggtgttttatcgatgattttttttttacgtttttatttgtagttttgttggttgattggtattttaggcgaggttttaggaaggtttttgggtgaggatgttttttttgtatattttttacgtgtttggtatttggggtttgttttgaggtatttttaggataagttggatattgattatcgttgcgtgtgtttggagaacgttttttataagtggaaatttttttatcgttttttgttttttgtattttcgtagg

SEQ ID NO: 996 - DNA, 16236 bp, Artificial Sequence
  chemically treated genomic DNA (Homo sapiens)
tttgcgaaagtgtagaggataggggacggtgaagaggtttttatttgtaagaggcgttttttaggtatacgtagcggtagttagtgtttagtttattttaggggtgttttaggataagttttaggtgttaggtacgtggaggatgtataggaagagtatttttatttagaagtttttttggagtttcgtttgaagtgttagttagttagtaaaattatagatgagggcgtggggagagggttatcgatgaaatattttttttttttattttttatttttttttaagtttttagttttttttaaagtttttatttttttttatcgtggatttagtttttaatttttattgaacgatagtaagtgtttttagataggttttttgtaggtttttttataggtttttgcggttagtattatttttagaaatgtatttttgagtttggttaatatggtgatattttatttttattaaaaatataaaaaattagtcgggcgtggtggtaggcgtttgtaattttagttattggggaggttgaggtaggagaattgtttgaatttgggaggtagaggttgtagtgagttacgattatattattgtattttagtttgggagttggttaggttggttttgaatttttaattttaaatgatttgttcgtttcggttttttaaagtgttgggattataggtgtgagttattatgttaggttttgaatttttattttaatagtttttaattggattaaatttttttatttttattttaaaaatttatttttttgtgtgtgtatatgtgtgtgttagtttggtagtatttgtaagatcgggttttgttttgttttgttttgttttattttgttttattttgttttgttttttttttttgagacggagttttattttgttattaggttggagtgtagtggtacgattttggtttattgtaatttttattttttgggtttaagcgatttttttgttttagttttttgaatagttgtgattataggtgtatattattatatttagttaatttttgtatttttagtagagatagggttttattattttggttaggatggttttgattttttgattttgtgattatttcgttttggttttttaaagtgttgggattataggtgtgagttatcgtattcggttaagattagattatttttttgtaattgtaaagatattttattttttatgaagtattatttttttaaaggttgttgttgtttttagttttggttggttatttatatattttggaatgttttttatttttaggatatagtgtattggagagagagtggatgaattaatggatatagtttagttttgttggaagtgataggtgttgtttagttatagttgttggtatatgtttttggaaaagtgtaagtgtggtcggaagtaaattcgataaagaataggttgggtgcggtagtttacgtttgtaattcgaggattttgggaggttgaggtaggcgaattatttgaggttaggagtttaggattagtttggttaatatggtgaaagttcgtttttattaaaatataaaaaattagttggatgtggtggtgggcgtttgtaattttagttatttaggaggttgaggtaggagaattataggaatttgagaggcggaggttgtagtgagttaagattgtgttattgtattcgagtttgggtgatagagtaagaatttgttttaaataaatagaaaattttttaaaaattaataaattaattaaataaaaaatattagtaataaatgttaaagtgttaagaattttagtacggagagaatttttataaaaattaatataagataaatattttaatggtttaattgggtaaaggatatagtgggtgagttataagagagttattatttaagtttatataaaaatattttaaattttattaatatatttttgttagaattttatgatttttgtttttgtttttgaaggattttgtattaggtaggttgggggtagggtgggaggggagaaattttaaatttaagattgttttttttatttaatttttattttaaagtttttttttttgttataggggtagcgttttgtttattttttgttttaggtatttattgtttagtggtcgttattattttttattttaatgaggatatattttttgttaagttgatggcgtgagagatggagtcgattttataagttgttgaggtggatttggatgttgttgttgttatggttatttgtagagttttattggttttgaggtttttggtgttatttggtgttggagtgttagaggttttttttttatgttttgttttatattgattttttgtttttttttatttgtttaaattatagagtgttatttttttatatttgtttattttattttgttttttatgatagatggttgtgttatttgtttgttgtttgtttgttcgatggtggtggtattgggggtagttttttattgttttgagttttacgtaggtttcgtgtgtttggattttatggttgaagtttttagatattttgttttttttcgttaggatagttagtttgttttttgtatttgtaataggttttgtataggaagtgttttttgtttatttttagtagtcgtggatttttagggttgtttgtgtaggattttgagtaaggattaagtgtattgtgtgtgtttttggttgatttattaatcgattttatcgatttatgtgtttgtttgttttgatattaatatcgtgttgttttgattattgttgttttgttataggttttaaagttaggtagtataagtttttttattgtgttaattatttttaaagttgagtttgtttttttagattttttattgtttttttgtttttaaattaaattaaattaattttttaaattaaatttttaaatttaattaaaattttataattaaaatttttaaattaaattttttaatttaattaaatttttaaaattaaaatttttaaattaaattttttaaattaaattaaattaaattaaattaaatttttttaagatagagttttattttgttttttagcggggagtgtagtggtatgattatagtttattgtagttttagttgtttaagtttaagtgatttttttattttagttttttgagtatttgagattatagatgtgtattattatgtttagttagttattatttttttaatttgtagagatgaggttttgttatgttgtttaggttggttttaaatttttgggtttaagggatttttttaaagtgttgggattataggcgtgagttatttcgtttggtttattgaatttaataaatagtgtattaatgtttattaataaaagtttgttaaaattttgattggaatttattaaatttaaagattagtttggggaagaattgatattttaataatattgagtttttttaaaaatttattaatacggtattttttttgatttatttaagaattttgtaatttttttagaaatgttttataatttttagcgtgttagttttgtatattttttgttagatatatttttaagtattttatattttttatgttattgtaaatggtatgatatttatttcgattttttattgtttgttgttagtattttgtatattgattttttggtgttttgattttgtattttgtatttttgtaaatttatttattttaatagtagttttgtagattttatatgattttttatggagatgattatattatagattttttgagtatgttttatgattttattttattttttttgttggttattaattataattcgttgtattagtttagtggttgttttagggtgtttattatatatttttattttattatagtttttttttcggtgatgttatattattatatatatattttgtaaagatttgaaatagtagatttttagttttttttttaagtttttgtgttattgttttatgttttgttttgatatatgttatattttatgatatattgttattattttgttttaaatagttgattattgtttattagtttaggattttaaaaggtatttgtattatattatttattatttttgggtgtttttgtagtaggagggttttttggtatttattttgttattttgttgagaaaggaagtttattagtggtttttttattttgaacggtttttaaattaagataaatttgtgaatagttaatgtttgaatgtataaggatattaatgtattatagttaatttaattaggtaaatggtggttagttatttattttataaagttggattgttttataattatattggtgatattattaatattgttttattttattattttatttttaaaatgattttattttattttattattattttattttattttattttattttattttattttattttgagatagggtttagttttgttatttaggttagagtataatggtatgattatgtttcgttgtagttttaaatttttggttttaagtaatttttttgttttagtttttcgagtagttgggattagaggtatatgttattatatttggttaatttttttttttttagagatggggttttattatgttgtttagtttggttttaaatttttgaatttaagtcgttttttagagataatatatttaattgaagtaataattttatttttatatgttttaattatatttttagatatttgaattatattttttatatatttttttataatattgttttttagttatttaatgtaaataagttttattttgtttataatattataagttttttgtagatggtatgtatattttatagttttgtggtatttttatttttttacggttggtatacgatagatattttttgaatatatataatggaattatgaagtaatggaaattggagtaaatttatggttttaggatttttaaaattttgaagtagttaaaaaatatatataataagttttaacgattatttaaatgaagttattaaaatagtgtatgaggttatatttttttttgttttttagaatttgtgaattatatttttttatttattaggttggtttatagagtttaataagagttggtagtttcggtttggttttatatttagagtttagaggttgtcgggttagcgtggtttttaattttgtgagtagagttagaatggattttaatatttttttcgtttatagtattttttaaatgtttgtacgagttaagggtggtaggatttagagatgtgttagatatggtttttgtttttaggatgtttattgtggagttggtgtacggaaaaggtaaaggtttttggttttatagttatttattattttttttttttatttttttcgttgaaatgttagttaagttaatatatttttttttggagtttttaaaaagtatagattgtttttagtttattgtttgaaatttggtaattttttttttttttttttagatttattaattgagttttttgatttattttttgtgtgttaggtgaatttttttataattcgaatttttaaataatgattattggagttttgtaagagttgagggttataggttgaagagtaaatgaaaggaaagtaatgaaatatattttatagttttaggattcgagaagatatttggttttttttgttttttgtattgatatcgtttgtgtttaggattttattattatttattagaacgattttaaaaattttaatgtagtttttattttttggagttttttgattatagtttattttttatattttgaataagagtaatttttttattatgtagttttagtaatgtttttttgtatagaaatttttagggattttttattgtatagaagggaattatgtttttttaagaagaagtatttaaattatattaattatgtttaatgagtaatattgatatgatttttacgatatatattgaggagttttatatatatttatttatttagatatatattattattattgttattatttttattgttatttttgagatagagtttcgttttgtcgtttaggttggaatgtagtggataagtgtttgtgagttggataagttttcgtaaagttatgaaaatattgttagataagattagttataattaaagatgaattagaaaaaattttaaaattttggattttaattgtgttattttttttgtaattttatttatttattttttttattataaaataatttaaattatggtagaaaaataagaaagggtagataattgtatatatgtttatatatgattaatatatgatattttttttatttaatgataattattttttgatttttttttagtaaaaaaatgaattatatgatgtttattatttgaaaataattttattttatttatttagtttttcgttgtttaaaatttatgttgattttgataaattttatgttttatatatttacgtttttattatttttttgttattagtagaggtaaagaagtagtaataattagataaaatggataggaaataaaaaataaaaggtttgggaaaagatttttaaagttttgaaaaatggtttaaaaatatttaaagatatatgaaaagttgtgaaaataattttaagtgtatttatattttatataaaaaaagcgaattgaaattggtggttagggatatttgtttttaaataaagtagtttttttagttgtttttggttatcgttcgtaattttttagattgaaatgttttttaagaagttagtgattttttatttaatataatggacgtttttgtatattaggttttttaaataagaatagattggtaataatttgttgtgtatagtagtataagaaggagattttgtattttagtgatattgatttgtttaatttatgaatatggtatatttttttattgattttgttttttaatttttttaagtaatgttttgtagttttttatatatgaaagatgttttttatattttttgttagatttattcgtaagtatttaatgttttttaatgttattttaaatgattttttaaagttttttaatttttaattgtttattgtgaatgtatagaaatagaattgatttttgtgtagtggtgttttgtatattgtaattaatttagatatatatggttgattgatgtttaaaaggtataagagaaggttagtgaagataatttttttaataaagggtgttggaataattggatatgtatatatagaaataaataaaattttaaaataatttttaatttatgttttatattataaataaaaattaatttaaaatggattatagttataaatgtaaattttaaagttataaaatttttagaggaatatatagaagtaaatttttgtaattttaggttaggtaaatattttttagatatgatattaaaagtttaaaatataatataataaattaataaattagattttataaaaattaaaaatttttgttttttaaaagatattgttaagagaaaggataagttatagaatttgagaaaatatttgtaaattatatatttgattagggtttcgtatttagaatatataaagaatttttaaaatttagtaatgatataatttaattttttatatataagatagagttagaaaaaaaaaaaaagatagtttcgttttgtgttttaggttggagtgtagtggcgcgatttttgtttatcgtaatttttgtttttagggtttaagcgatttttttgttttagttttttgagtagttgatattataggtatgggttattatagttggttaatttttgtatttttagtagagaaggggttttattatgttgatttggttggtttcgaatttttggttttaagtgatttgttcgcgttgattttttaaagtgttgaaattataggtgtgagttattataaatagttgatataatttaatttttaagagagtaaaaaaaatataaatagatattattagagaagatatatatatggtaaataagtatataatattattagttgtagaaaaatgtaaattaaaattataaggggagattttttatatatttagtagaatgggtaaaattaaaaagatttattatattaagagttgataagggtgtgaaggaattggaatttttttatattgttgtgggaatgtaaaatcgtataataattttgggaaatggtttagtagtttttttaaaaattaaatttttgaggttaggtgtaatggtttatatttgtaattttagtattttgggaggttaaagtaggtagattttttgaggttaggagttcgagattagtttggttaatatggtgaaattttatttttattaaaaatataaaaattagtcgggcgtagtggtgtaagtttgtagttttagttatttaggaggttgaggtaggagaatcgtttgaatttaggaggtagaggttttagtgagtagagatggagttattgtattttagtttgggtaatagagtgagattttgttttaaaataagtaaattaaaaataaataaaaattaaaaataaataaataaaaattaaaaattaaatatttgagaggttaaggttgtagtgagttataattatgttattgtattttagtttgggaaataatggtgtgatattgttttaaaaaaaaaaaaattaaatatatatttgttatataatatagttattttatttttaattattttttatttatgagaaatgaaaatatgtgtttatatagaaatttgtatgttagtgtttatagtagttttttttgtaatagttttaaattggaaataatttaaatgttttttaataagtgaatggttaaataaatgatgggttagttatgggtagaatattattatttaatggtagaaattaatgaattatttatataaattataatatggataaatttttaggataattattgtttgtgaaaaaagttaaataagaaagagtttttatcgtgtaattttatttataaaaaattttagaaagtgtattaaattgtttgggagatgggcgaggtgggagatgaggattgtgtagggtatgaggaagtttttgggagtgatagttgtgtttatttttggtggtggtagtggttttatgagtatgtatgtatttatttttaaatttattaaagtgtgtaattttaatatatgtagtttattgtcggttaattatattttaataaggttgttaaagggaaaaaaaataacggttgggtaagttggtttacgtttgtaattttagtattttggaaggtcgaggcgggtagattataaggttaggagtgattattatgttggattagtttgattaatatgatgaaatttcgtttttattaaaaatataaaagttattgggcgtggtggcgatcgtttgtaattttagttatttaggaggttgaggtagtagaatcgtttgaatttaggaggcggaggttgtagtgagttgagatcgcgttattgtattttagtcggggtgatagagtgagatttcgttttaaaaaagaaaataagaaagaaagaaaaagaaaaagaaaaaatattgagagttttgggaagggaaggtagtaatatttttttaaggttaaagggtaaggttgtgtagttgatgagattagagattttatagtggtgtttttttatttatttagtttttaaggaagatattttttttttgttgggttttgattaaggttgtattttatttttatattgtgtaatttagttgttttagttgttagttatggggttttgtgatattgttagttaattgggaggaattaatcggttattaattaattttgttttttagatgtggggggaaatttaagtattagagttttatgaaaacgaaattttaagaagtttcgtagagttggggtgggggtggtagagggtgggggggcgtttaggttatattaggtagtagtaattgtgcgtggaatggttttggttagggtttgggtagattggttcgattggatgtaaattatttagggtttcgtttaaaaatatatatagattatggcgttattaatttttatagagagtttatggatggtttttagtggggttttgattttaaaattatatgtatattttgtaattatgtttatttatgtatttttttgggggtcgggggtttatagtttttattagattttttaagagttttttgattataaaaagataaagaagcgttgataaggatagagttagattttgttattgttttttttttttttttggttgtcgggataaaatttttaggaatcgtttatttcgttttttttgtcgagattagagtttcgcgattcgtttttttttcgaatatattaagcgattatagattttttttttttttttttgcgagtgtagattttaggttggtttttattttttatttttattcggtttcgatcgtttttgttggttttttgatcgtttaagaattggaagttgtttttaggtttttaggtgtgtaatttgttcgacgcgtttttttttgggatatagtttttttttatttttttagtttttattgatataatttatttttgtttgggagtcgggaggagtagtttttttcggattttttcgaggatcgcgtgttatgtaatattcgttttgtagtttaggcgtttgggagaagcgtattcgttcgtgtttttaaattgttggacgtcgtcggtttcgcgttttcgtggttaaaacgggttttttagaattgtttttgatttcggtttcggagattttagttaggtcgttcgtttttttacgtgggtgattcgggcgtagcggcggcgttttttttgcgatttcggttttcggtacgtgttttttttgttcggcgtcgcgtttttttttcggtttgggtttgcgcgtatcgcgttttcgagggtatcgacgttttcgtacggttcggggagatggggcgttcggttttttttagttttacgtttcggtttttttttaagtttcgttcgggcgtttttgtttttagttttttatttcgcgtcgtcggcggtcggagtagtagtagtagtagtagcgtcgggagatcgagggttcggtagtcgcgcgttcgtcgcggggttatggcggtagttttataggatatcgttggatttttcgggcgagcgttgtttaggtcggggggaggtggcgagcgttgttttgggatttgtcgtttcgttagtcgtattcgttttcgtttttgttttggttttcgagggttcggagaggtgtaaagcggtgatagattcgtgatttagcgtttttatttttgttggggaaggagtttcgtcggtcgtcgcggtatcgtatagttatttttgttttcgggacgtatgggtcgtgttcggtggggatttaggattttatttacgtaagttcgggagtttttcggtttttcgcgttcgtcgtgttttgggatttttagtgtgtattcggttcggtgtttttattgcgaagagagtgggtaaagttatcggagagtagattttttttagttttttttgcggttcggatttatttgatttcgttcggcgttggtcgtttttagttgtttcgttttcggtttttttggttttttttcgcggttttgcgttcggttgtgagcggtcggtttgggtgagtgttcgcggaggtgtcgtcgcggtgcggaggcgcgggtatttgtttggtgcgttttggttcgggcggagcgtagttttcgttatttgttggttttcgcggttttcggcgttcgttggggttttagtttcgttatttcgtcgaatttttgttgtagttttgtttttttagaaaatgttttattttagaaggagagggggcggaggggggagaagggggagaggagttatagtgttttatttttgagtttcgtttttttaggtttttttaggttgttatttttttttttggttggtgggttttttttttttttggggttttaaagtgaagtttgagaatcgggtttgtaagtttttaagtgtagatttttaggtttagcggtgatattggataggacgagatatttttaagtttcggttattgttttttaaaattttataacgtgtttatgaggtttttgtgatatatttgtaaattttttttgaaaacgaaataatttgtataataattttttaagatataggtttatttttataataaatttgtatttataattttgaatttaaaagttaaataaaagaatttagggtcgagcgcggtggttatttttgaaatttaagtattttcggaggttaaggtaggtggatcgtttgaagttaggaattcgagattagtttggttaatatggtgaaattttatttttattaaaaatattaaaattagttgggtatggtggcgggcgtttgtaattttagttatttaggaggttgaggtaggagaattatttgaatttaggaggttgaggttgtagtgagttgagatcgtattattgtattttagtttgggtaatatagttagtttttgttttttaaatttaaaaaaaaaaagtagaaagaataatgaatttattattcggtagtgattatataaggtttattttttttttttaagtaggaatagttatttttattttaattggggaaattttatattatttaattttttttaatatttaataataaattttaagatgataagattaaatttaaaaattaataatattttttaatatttttaaatatattgagggtttattgaatgtaggttaagtatagtatgtatataatagagtattttttattttatggatatttatgaagtagagatttttttattattatagattttttgtaaaagtttttaatggttgtaaattattatagtttaatattttttttattattttaatattaaagataatattgttataaatgtttttttataaaattttgtgaatttaagatcgtttagaatagattttttatagtggaattattgagttaattggtagggaatatttttaaaggtttttttttttttaaataaatatttttattttgttttttaaaagttttgtattaatatattttttaattagtattgattgtgttaaagtatttattttattgtattttgattaaaagtaaattttaaaatttgaaaataaaattgtaaatttggtatgtttaaagaattttattttattatatatatatacgttgttaaataatgtaaattttaaatatatttcgaattatagtaattaataaatatagtggatatttatgagtttattgttttattttgttaaaatttaatatgtttgtttaatgtttgttttagatattttttggaataaaaaaattatagataaagttgaagtttttttgtatttttgtattttttttttttttcgttttttattttttcgtaggtaaatgttttttgaaattggtatttattatttttaggtatttttaggttttttttttatgtgtatgtttatgtgtaacggataggatggtttatatttttaaaaatttatgtgattaaggttgggtgtggtggtttatgattgtaattttagtattttgggaggttgaggtgggtagattatttgaggttaggagttcgagattagtttggtttatatggtgaaattttatttttattaaaaatataaaaattagtagggtgtggtggtacgtatttgtaattttatttatttgggaggttgaggtatgagaatcgtttgaatttgggaggtggaggatgtagtgagttgagattatattattgtattttagtttgggcgatagaaagagattcggttttaaaaaaaaaaaaaaaaaatttatatgaatagtattatatagattgagtatttttgatttttaaattttaaatttaaaatggtttaaaatttaaaattttttgagttttgatattacgttataagtggaaaattttatatttgatttcgtggggtgggtggtaattaaaatataggtatataatatattgtttatttagtatttttaaggggaaaaaagatttttttagtcgtttttagttgagagatattttttttgtgtatgtttagatttttttatgtaagtacgtatataaaaggtggtaaaatggtttgtgtgtaggtcgaatatatttatggtaggtttcgataattttttatatggagttaagtttcgtttttgtgtattttttattgtgttatttttgtttattttttgttttttggtttaatgatgttgaaaatgttggtcgggtgtagtggtttacgtttgtaattttagtattttgggaggttaaggtgggtggattatttgagtttaggagttcgagattagtttgggtaatatagtatatttataggtgtgtattattatatttggttgatatttatttatttttagagatgaggttttattatgttgttaaggttggttttatatttttggttttaagttatttttttattttagttttttgagtagttgagattatatgtataattagggatattttttttgattagttttataaatattttggattagtggtttgtgttattgtagggagggtggattggatgatgattgtaagattttgtttttttttgataattattttgtttattttttagttgaaatttttattaaaaataatgtttatgttatgggtttttttttaaatgtgattttattattttagttatgtgattagggtatttttagattaatggagattaatggagagtaaatatggaaatattgtacgttagtagtagtgaatagaggggtgggtgtggaagtttttaaaaggtgtttagtatgaaggatgttaatgttgtttttaatgtttggaatttagtgattaacgatatagttatgcgtgtatggtataatttttggtttgcgattatgtttagtgatgatgatgaataaggtgatgatatggaagtattttatatgtgaagtgggaaaaaaatgatgtttgatttttttatgtaggtaaaaaatatatttttagagtgtgttagtatgttggacgaagtggatatataggtttttaatatttatattgtggttttagttgttcgtttattgatcgatgatgaataatggtaaaacggttttgaattaaggtgtttgtgttaatagtgatgacgaatataatgttgttattatagtagaatacgtatttgtaggcgttatgatgaaagtatgcgatgggtttattgaaggattagaacggtgggtgttcgaggtagggtaagtaagatgaggattttgtattaatttgtttttttgtgcgaagttttgaaggatttttttgtagagtttttttttgtttgtaatttttttgcgttagtatttagtgtttttgtaagataagttgttttataagatattagtagatggttagatggttataagttgttgttgtttgattcggtttagaaaagagaataaaagttttttttttatgatgtagtttttttaatttttagttagtttgtattaaaagtttaagaagttattagttacgaatttttgttttgggggtaggaatttttttagggttttgtacgtgttttaggtttaaggtttagtttatagtgaattttttttttttttttttttttttttttgaggtagggttttattatgttgttttggttggagtgtagtggcgtgattttattttattatagttttgagtttttaggtttaggtgattttttcgttttagttttttgagtagttgggattaaaggcgtttgttattatattcggttaattttttttttgtattgttagtagagatggagttttattacgttggttaggttagttttaaatttttgattttaggtgaattttttgttttggttttataaagtgttgggattataggtatgagttatcgagttcggtttatagtatcgtttaattagaatatagtattattgatggagatggaagtttattgtcgtggttgttgttgtttgtcggttgatttaggtttttgatgatattattgggttgtttagtgattttgaatatattatgtttttattggtttaatgttatgttatattttttattgttaagtatttatgtgtgaataagtgtaagaaaacgattgtttgtaagggtagtttataaatttagagttagagtta

SEQ ID NO: 997 - DNA, 6117 bp, Artificial Sequence
  chemically treated genomic DNA (Homo sapiens)
  unsure 1597: n is a or g or c or t
gtaaaatgtttattaagagttagaatgattaatggtgaggaaataggatttaaatgttgaaaaaggattttgtttgttattttttagtatttattattaataatgattttataaaaatatttttattgttaattatgtttttaatttattatgttatataaaaagagaattttttttagtagggattttagtataggatgaagtttgtatttatttttaaagtgtttttatttattagtttattgtttaggacggtttttaggagtatagttatgcggatataaataagtattatgttggagaggaataatgatgttattaggttggtattaagattgatattttttatttaagaaattatgttaattatataggtattaagttttggtttttgtaagataatatcggtaattttagagatgaatttttagtatgtaatagtattgatatttttaaatttagggtagatgatttagagtttgataaattgggtttaaatttgagttttaattaaattttgattttattaattttttaaggttttttagatggttttttattgtaaatttttttttttttaaatattacgttttttttttaaatgtttgtttgatattgttttttgtgtgttggtttatttgtaaagtattagtttttatatttaaaatttaagagaattttttttaacgatttatttattttttttatattaagtgaagattaagagagtagttttgtttggtgatgtgtatagtattaattaaaatggttttaatttttttgaatagttattattttttattaattttaagtagaaataatggtatgatgtttttttttatattgagatttttgttatttttataaaatggttatagaatataaatttaaaatatattaattttttaatggtaattttattatttaagtaaaaattaaaatttatttattttattttttagtaagttttaattttttattatattgagataaaagatttaaaaatattttttttaggatataaaaggaaaaatttttttttttattttttatattattttttattgtaagtagaaagaaatattgtttaatggtttaataattttaaggagttttgaaaattatttttttaaattaagaagggtagaaatattttattattattatttttttaaatgtatgtttgttttttggaaatttttttttgtttttagttgtatatttgtttttatttattgaagttttgaatttataatatgtagttttttattgtttatggtgatttgttttaagtttttagagaagtaagattgataaatttggaagataattattaataaaataattatttttaatttattatttttatatgttttttattatatttatttttagaaaattatagatgattaaaagattatttggtgtaaaatttattttataagataggaaattaagttttaaagaggtgaggtatttaagggtatgggtagttattgttttatttatagtgaaaataaaggtgtttttttatttagtgttttaggtattttaatgtttagtttagtatgtattttatttaaaaggtttagaattnaaatttgagttagttggttttgtatataaatgtaaaggaatagttttgtttattgtgaatatatttttttattttaagatgtttttttaggagttataggtttttagtttaagtaaacgtttggtaaattaattatatttaaggttgtatatatttagttttaattattatgttaaaatgatttttttaatatttttgtgaaaatttattttgtttttttaagaattttaaagtattttaaagtatagaatataggttaattataagaattattggaaataatttttatattttagtgttgttttaggagtaatagtttttagtttaagtatacgtttggaaattagtatatttaaggttgtatatattagtttaattattatgttaaatgatttttttatatttttgtgaaaattattttttttttttatttatttaaagtattttaagtatagtatataggttgaattatataggtataggaggtaagattaggatttatagttagagttagtttttttttatgtaattttaattaaaatagtttatagtaagtatattttttttttatttttttttgttagaaagtaataataaggaattttttattttagggtgattttgaataggttatagttttattatattaagtttaaaaggattagaatgtagagttaaggtattagataatttagtagggttattgagatgtaggtaggttttaagaagaatatagaaaattttgaattttttaaataatattatttatattgttaattaattaaaatgttgaatagttattatttattagatattatgttaagtgttataaagattaataagattatttgtttttaggtagtttgtagtttagtaagaaatgagttataaagaaaataagaaagttagtatgtaaatgaatggtatgtaatatattagaaatatgtatgaatagttttgtattagagaagaataagtaatataaaagtagtttgtgaagatttatgttgtataaagggttatattaggtattataggagttataaagttgaagaatatattagttttgaaggttgatagtaaaatttaaatatggaaataaatatatattttatttatagtttttaaagttaaatgaaatatattataaaatgaaagaaaagttattagagaggtaggtgtaagttatatgtgatggatggaattatttattttaattgaggtaattaggttagatttgtgagatatatttaaataggattttgaaggataagtagtattttgataatttgaggatggggaagggtattttagaaataatattttaataaagggtgggtaagttttgaaagaaggtttggagaaaaattaggattttattattttaggttttggagtatggtggggggtaaggttagaaaggaagttgtacgaatttaaatattaatttaaatgttaagaggtttattttttattttgtatgtaagttaatggtagaagaaaaggtataattagagttatgttttgagaattattattgaaagtatgtcgaagatggtttgaaggaagtaattgggaaaagtaagtatagtttatttaagtgggtgagagtgtgagttagaggaagtttggaaattggtgatgtgagagatgttgtagtttttgggattgttgtttggtcgtgtgtagaggaggggtagtagggtttattttgaattttgttttgaaaagtatatagatagtgatgttaaaattaggattacggaaattatttgaagttgtattttatttttttttttatttgtatttgttttatttattaaggatatttattattgttattaaaatttaggtgtttatggttttttttatttattagttagggtttatttggttaggaaagagaagtttttttaggtatttgtaatagagggagtttaagttagagaattagttattttggtagttgagattgttattagtaagaagttgttattatttgaaggttgtagggataaagggagtgagtagttttttgggagattgaggaaggaagtttttggtttttttttattttttattttttattttttatttttatttatttgttttttaatttttttttggttgagtttagttgaaatttagttgataggggagtttgagtaagtagtttttagggttagttttttgagttataggtagagtaggatagggaggaatggattttaggataaataggtttaggattcggtaaattaattttatattttagttattgagttggaattattggttagttttttttcgagttagtatgtagaatatgggatattagttgagtgtttgagagttattatttattttagtgggggtaggggcggagaagggtgatatatagttagttatatttatatttattggtttttttttgttttagttttttgtatttttgagaaggaattatttttaaggatttgagtttaagtttattttatttagagtatagagaaaagaatcgttaatttttttttttttttttttattatgtttttttttttttttagtttttattattttttatttttttttgttttttttttttttatttttattatttttgtttagtttttatttttatttttaattttttttttaaaatattaagttgtttggtagtatgtagggttggaatatgtttttaatagaaaatttcgtgttttttgaatttagttatttattttttgagtagagtagatatttaataaaagaattgttaaatttaattaaataggatatattttattattaaatattttttttattttttgtttatttatatgatgggaatttgagtagttttcggaattgtttttataatatttggttaaggaatttgtgaggaaaagaaagattaaatggaaaattaaggtatatgatattagaagatttatatgttattttaaatttttttttttttatgaattattaaaatagagtataatttttttggtagttgtatatatgtttataaatatatgatattgatttatagtatagtagttttgtttagtttttaataagtaagaatgaaaagaggatatggtttttaggaatatgaatttttgttttttttatttttttttagaaggagagatttttttatgattttattgggggcggaaattttaattaaaatggtgttatttttgaatttattgcgatacgttacgtaagtgattatagaaggagaaaagttttataaaaagagagacgatagcgttatattttgtttattttatagtaggtataaatttatttatttttagttgattggaagaaataacgatgatttttgggaagattttattggtggtgagttttgtattaacgtgcgatgtttttgttgatttggattagatagtatttttggatcgtgggtatgaaacgttgggttttgattatggagatttaggaatattgtatatgtaggataggaaatgaaagttttggtaggtatttaagttattgtgtagtatttttaagaattgatatatagtagtttgaaagataagattaaaattgaaagatagttatattggggttaaattatataagaagtgttatatgatgttgtgtagtaagaaagaaaatttattgaaagtttgtttttttgagtataaaggatttaatataatttttttacggtatttttttttaaaatgggttattatttttgagattttgaaagtcgtagtagtaataatttttgtttttattatttcgtattatatttttagtatattgaaattatgtattttaattaaatataggtataattgtgttttagaataagtggggtttatattttttaaatatttaattttaagtattttttttgaaatttgattttattatagaattaatatatgttaaatttagaataattggaaaatatatttaagaaaatatgaaggagatcgagtttttagttggatgtttgttagtagtattaatagtatttttagtatgaatattgatattatatagattttttatagtttttttttttaatgtgaatgtttgattttacgatgagttttatagaatatgggattgagaataatggtgtaggaggatatttttatttagaaaattaaggttattatttttttttagatttgataatgatgtatgtgttgataggttaatgatatgttatgatttgatatttttattaaaattattgttaattaatggataatatgttttttttaagttaaaaggagaatgttgaaattagtttttttaaaaaaattttaaagttatggtgttaatattatgttggttatttatttagatttttttttagttgatttgaaaaatgtagtatagattgttttggaatattgtgtgttttttatgattagtaatgtattattattataattaatttgttaaaaagaattatatagtaatttaatttttaatttttttttttttttttatttaattttagt

SEQ ID NO: 998 - DNA, 6117 bp, Artificial Sequence
  chemically treated genomic DNA (Homo sapiens)
  unsure 4521: n is a or g or c or t
attagaattgaatgggaaaggagagagaggttggagattagattattatgtggttttttttgataaattaattgtgatgatgatgtattgttaattatagagaatatataatgttttaggataatttatattatattttttagattagttagagaaaaatttaggtagatgattaatataatgttaatattatggttttaaaatttttttaaaaaaattagttttaatattttttttttgatttaggaaagatatgttatttattggttggtaataattttaataaaaatgttaagttatggtatgttattagtttattagtatatgtattattgttaggtttgggaaggaataataattttgattttttaggtagaaatatttttttgtattattgtttttagttttatattttgtgaaatttatcgtgaagttaaatatttatattggaagaaagagttatagaaaatttatgtggtattaatatttatgttagaagtgttgttggtgttattggtaggtatttaattaaaaattcgattttttttatgtttttttaggtatattttttagttgttttaaatttaatatgtattgattttgtaataaaattagattttaaaaaagatatttgaagttaaatatttaaaaaatataaattttatttattttaaaatatagttatatttatgtttagttagaatatatagttttaatgtattgagaatatggtacgagataatggaaataaaggttgttgttgttacggtttttaaaattttaaggatagtgatttattttaaagaaaaatgtcgtgggagaattatattaaattttttgtatttagaaaaatagatttttaataaatttttttttttattgtatagtattatgtgatattttttgtgtggtttagttttaatatagttattttttagttttaattttattttttaaattgttgtgtattagtttttgaaaatgttgtataatgatttaaatatttattaaagtttttattttttattttatatatatagtatttttggatttttatagttagaatttagcgttttatgtttacggtttagaaatattatttggtttaaattagtaagagtatcgtacgttagtgtaggatttattattaatgaggtttttttaggagttatcgttgttttttttaattaattggggatggatgagtttgtgtttgttatgagatggataaaatgtagcgttatcgtttttttttttatagggtttttttttttttgtggttatttacgtggcgtgtcgtagtgggtttaggggtgatattattttggttaaaattttcgtttttaatgaggttatagaagaatttttttttttgaaggaaaatgggaagggtagaaatttatgtttttaaagattatgttttttttttatttttatttgttagaagttgagtagagttgttatgttatgggttaatattatgtatttatgaatatatgtatagttgttagaagagttatgttttattttaatggtttatgaggaagaaaaagtttgaagtaatatgtaggttttttggtgttatgtattttgattttttatttgattttttttttttttatagattttttggttaggtgttgtggagataatttcggaaattatttaagtttttattatataagtaaataaaaaatgaaaaaaatatttaataataagatatattttatttaattgaatttaataatttttttgttgaatatttattttgtttaaggaataaataattaggtttaagagatacgagattttttgttaaaggtatgttttaattttgtatgttattaagtaatttggtgttttgaggaaggaattgaaaatggggatagagattggataaaggtgatggagatggagaaaaggggggtaggggggagtagagagtgatgagaattagaaaggagaggagatatgatgggggaaagagagaaggagttagcggtttttttttttgtattttaagtaagatgaatttggatttaggtttttgagaatagtttttttttaggaatatagaggattaggataaggaagggttagtggatatagatgtggttggttatatgttattttttttcgtttttatttttattgaggtgaatgataatttttaggtatttagttggtattttatattttatatgttaattcggggggaggttggttagtagttttaatttaatggttggagtgtaaaattagtttgtcggattttgaatttgtttgttttgagatttatttttttttgttttgttttatttgtaatttagagggttgattttggaggttgtttgtttaaatttttttgttagttgggttttagttaggtttagttaaaagggaattggaggatagatgagtaaaagtgggaagtggaaagtggaaagtggggagaagttaggagtttttttttttagttttttagaggattgtttattttttttgtttttgtagtttttaaatggtaatagttttttgttgatggtaattttaattattagggtgattagttttttgatttaaattttttttgttgtaaatgtttgaaggggttttttttttttggttagataaattttggttgatgaatgagggaggttataagtatttgaattttagtggtaatagtagatatttttgataggtgaagtagatatagatggaggaggaggtaggatatagttttaagtgattttcgtagttttggttttggtattattatttatgtgttttttaagataagatttagaatgagttttattgttttttttttatatacgattaggtagtaattttagaagttgtagtattttttatattattaatttttaagttttttttaatttatatttttatttatttggatgagttatgtttgttttttttaattgttttttttagattattttcgatatgtttttaataatgatttttaaagtatggttttaattgtgtttttttttttgttattagtttgtatatagaatgaagggtaagttttttagtatttgaattaatatttgagttcgtataattttttttttagttttattttttattatgttttaggatttgggatgatggggttttgatttttttttaggtttttttttaaagtttatttattttttgttaaggtattgtttttgaaatgtttttttttatttttaggttattaaaatgttatttgttttttaaaattttgtttaaatgtattttataggtttggtttgattattttagttgaaataaatagttttatttattatatgtagtttatatttatttttttagtaattttttttttattttgtaatgtgttttatttggttttaaaagttatgggtaagatatgtgtttatttttatgtttagattttattgttagtttttaaggttagtatgttttttaattttgtgatttttatggtgtttaatgtggttttttatataatatgggtttttatagattgtttttgtgttgtttgtttttttttgatatagggttgtttatgtatatttttagtgtattgtatgttatttatttatatattgatttttttgttttttttgtagtttattttttgttagattataagttatttgaagataagtagttttattggtttttgtagtatttagtatagtgtttagtaagtaatagttgtttaatattttgattaattgatagtatgagtaatgttatttgagaagtttagaattttttatattttttttagaatttatttgtattttaataattttattgagttgtttagtgttttggttttgtattttgatttttttgaatttagtgtgatgaggttatagtttatttaggattattttggagtggaggattttttgttgttgttttttggtaaggaagaatgaggggagaatgtgtttattgtgaattattttgattgaagttgtatggggagaagttgattttagttgtaaattttagttttgttttttgtgtttatgtaatttagtttgtgtgttatgtttgaaatgttttaaataaatggggaaaaaaaatggtttttatagaagtgtgaaaggattatttgatatgatggttgagttgatgtgtgtagttttgagtatgttgatttttagacgtatgtttgagttggaagttgttgtttttggagtagtattgaaatgtaaaaattgtttttagtggtttttgtaattagtttgtgttttgtgttttgaaatgttttaaaatttttggggaaataaaatgggtttttatagaagtgttaaaaggattattttgatatggtggttggagttgggtgtgtgtagttttgagtatggttgatttattagacgtttgtttgagttggaagtttgtggtttttggaggagtattttgaagtggaagagtgtgtttatagtgggtagggttatttttttgtatttgtatgtagagttagttgatttaagtttnaattttagattttttaggtggagtgtatgttggattgggtattagagtgtttaaaatattgaatgagaggatatttttgtttttattgtgaataagataataattatttatgtttttgggtattttatttttttgaggtttagttttttgttttataaaatgagttttgtattaggtaattttttgattatttatgattttttggagatgaatatagtaaaaaatatatgggagtagtaaattagggatgattattttgttagtgattgttttttaggtttattaattttgtttttttgagggtttgaaatagattattataagtaatggggaattgtatgttgtgagtttagagttttaatgggtgggggtaagtatgtaattggagatagggaaagatttttaggagataaatatgtatttgaagggatgatagtggtaaaatgtttttgttttttttgatttagagaaatgatttttaaggttttttgaaattattaggttattaaatagtatttttttttatttgtaatagagaataatgtaagggatggaaagaaaaatttttttttttgtgttttggagagagtatttttgagttttttgttttagtgtggtggaaaattaaggtttgttaaaagataaaataaataaattttaatttttgtttaggtagtaaggttattattgagagattaatatattttaaatttatattttatagttattttataaaagtaataaaggttttagtataggaggaggtattatgttattgtttttgtttaaagttaataaaagatggtggttgtttaaaaagattggagttattttgattaatgttgtgtatattattaggtaagattatttttttgatttttatttaatatagagagaataaatgagtcgttggagagaatttttttggattttaaatgtaggggttgatattttgtaaatgggttagtatataaggagtaatgttaaatagatatttaaaaggaagacgtgatgtttagagaggagaagatttgtaatagagagttatttggaaggttttggggagttgataaaattaggatttaattgagatttagatttagatttagtttattaagttttagattatttattttgaatttgaagatattaatattattatatattagaagtttatttttgaggttatcgatgttgttttgtaaaaattagaatttaatatttatataattaatatgattttttaaataggaagtattagttttggtattaatttgatagtattattgtttttttttagtataatgtttgtttgtattcgtatggttgtgtttttgagggtcgttttgaatagtgagttgatggatgagaatattttgggggtgagtataggttttattttgtgttggaatttttgttggagaaaattttttttttatatgatatgatgaattaaaggtatgattaataatgaggatgtttttatagagttattgttaatggtgagtgttgagagatggtaggtagaatttttttttaatatttgggttttgtttttttattattggttattttaatttttggtaggtattttgt

SEQ ID NO: 999 - DNA, 6056 bp, Artificial Sequence
  chemically treated genomic DNA (Homo sapiens)
tagagtaaattatataattttgttgattgatttaattataaaatgatgatttttagttttagttgagtgtttggtgttgttaggaatttttagtagttagtgttttttttatttttttatagggtttgtcgtaagtttttgatttttttttgaagttttttttatttttttcgttttttttatttttagtagataaattggtttattttataggaaggaatgatttgagggatagttgtatttgaatttttttagtttttttttttttattttcgtatttttttatatttttgattagaggacgtagtttttttttttttttttgaaattttgatgtattatgatattttttatttttttatttgttaaataatttttagagtttattttattttttgggatgttgtagagtttaggatttagcgttattattgaatttaaatttttgttttgttattgagtagttttgtaattgtgggtatatttttttgaattttggtttttatatttgtaaaatgggaaaaatattttttcgtagggttaatgtgaagggaaaaatatatgtataagggatgtagtaaagtgtttagtataatatttggtatgtagtaagtgtttggtagatggtatttattttattggtaaatttatttagatatttttaaatatggattttttatttcgtttttagtttttgggttttagatttgtgttttgttaattggttgtggaatatttatattttggtgttttataaatagtttagatttttttaaaatcgagttattgattttttttagtgtttgttttttatgttttttttattttagttaaagtattattagttagttagttattcgggtttaatattttggattttttttttgtcgttttttatattttattagttatttttggtttgtttttggagtttgttttttgtttattggtgttgttttagtttaggtgtttatttttttttgtttgaattattgtttgggtttttcgttggtttttttaatttgtatgttgttttttttattttaagatgttagttatatagttttatttttttgttttataattttatattttttgttgaaggttattaagttttagtttaagtgttggtggtcgtgggtagatttgtttttttaatattattatttgtttcgtttatacgttatttttttaattggttgtttttttaagatagtatgtgttttttgattttttttttttttattatttttgtttttgttttttttgtaattggtagatattcgtaaagaattagttagatgtttttttttttgttgatttttttttgatttttttagttttttattttgttgttttttttttgtataaatagtttttttttttaaacgttttttttttgtagtagtaattattttgtgttcgttatttatgtgtttgtaagtattgattttggtataatgtttggtagatagtagggatttaagaatatgttgatttgaataaatgaatgtatggaatgataggattttttgagatataatttagtaaggtgaaatttattaaaggtaaatgtggattaagaaaattaattttataagtttaaagatggaagggatatggtttaatagtaaaatgtgttaaaaattatttaggggttttggttgatagtttagtatgagttattaatgtgatttaaaaaaagaaaaagaaaagaatatgaaatattttgaatgaagaagttgagtatttggttttatatttagagtgttgtgtttggttttaggtattatagttttagagagatttagattgaatagtaatattttttattttatttttttttattttggtgggtataaagtaggtatatatatatatatatatatatatatattttttaaagtaaggtcggtgtgtgttttagtagtttagaattttagtaaaggaatataaaatagtatatttacggttttttttcgagtaaaatttatttggtttgtttgtaggaagggtttaaaattgcgtttgtagatgttttgtttgtaggaaggttttaattacgtgtttttttggtttataagtaaggtttttagatttagagttttagttattgttttttttttttttttggtgtaattaaacgtttagaattacgtttttttagaaaattttttttcgggtgtgttaataagttaagtttaattggtaatagttattaaaaagtgttgtataatatatatggtttatataattgtagttttgttttatcgggtgttttaatgcggaggttttgatttgtaattttaaagatatatattttaagtttacgtttagttagtggatgtggaagaaaaaaaaaagtaaattattttataatataaaggttaataatatatatttataagttttaggtataaaattttatattttagagaattatatttaatatttatatatattattaaggttttttttttttttttgtttgattaaatgttagttattattaagttttggaagtattttgtgtgtgtatatttatttgttgtttgtgaagaagtcggttgttttaaataagtttttagaaaataagcgtttaatgtgtttaatttgagttgttaatattgtgaaatataggttatataatattagtttagataattatggcgaagtaaggagttttaaatattgttttagaataatagtaatttgtgttgaatttttattttttgtggtaaaatgaagggaaaaggaatgaagttttagtttgttttaatttttatttttattgttttagattttttagtagtataaagtttttattaagttaaatatatttattttaaagtgattgtgttttattttgatattatgttttttttaatttggggggtataggtgagataagttttatgaaataaaaagattaaaaatttttatatttttagtgtttttttttggtaaaatgtagagttgtttattgtgtttatttttttttttttattattatggttgttgttattatttttaatggtttattaaatttaagggtttgggaaatatttatggaatttattttatagtttttatattgtatgatatttaaataggtggttgtttatttgatttttaaaatatttttaagaaaaatgattttatttaatgtataaatgtttttattagattaagagaatattatggatattttatttttttttattttttaaatattaatttttattgtataagttaaatgggtaggaataagtgagatgatattgttatttagagttttaaaatatttaaagggttgttattattattttatttaatttttgaaaataattttatgaagtataaaggatattgagatatttgttgttttatattaaagaaaaaagtgtttgttttaaaattttaaaatgtgtaaattatatattttgtatttttatagttggagaaaatttattggtaatggaatatttaaaattagagtttgtttagtgtgttgtttttgattattatttgattttatttcgtgtttttatgttaattggtttaattggattttatagttggaaggtgaaaatttattattttaatttgagttacgtatgtatttttattatatattttttaaaggtattatttttttttttttgatagttattatattaagtatttttagttattttgttatagattttttttgtaattattgttgaaggatatgatgtttttatgatttttcgaaatgaaaattttattttgtttttaaaataaataaattaataaaaagtagtgtttatgtaagtattttgttttttgattttaggaatttttttgtttttatattaattttgtattggtaaaatataaaaataaaatgttattttgttaattttttttttagtaaagtaatatagtttagtatatgtttaagaaaaaaatggttaagaaattttgtttttattaattatttttaagattgtgatatttatattttgttttttaaacgttatattttataagattattttttaatatgttgaatataagttttaaatatatgtatttttaaattgtattttaaatattttaggttagtttttgttattattttaggaatagaaagttttaatattggaaattgtaagtaaatatttgtttttttatttgaattttggtatttttttttttaagtttattttttgttgtagaaagtgtaaaaattattaaataaaattttaatgatggtattcgtgtggtttgtatttgatatagtagataaagaagttttatgaaaatggatttttgttttattgaaaagtaaattttaatggtttgtattaattattttttgatattatattgagtttgggaggaaggggaagttttgaatgaggttataaagtaaaagaaaatatttgtaaaatgtttttttttttaaaatgttatattttagaaatattttaagtgttgtaatattgtaggaattattttataggattgattatttcgtattgtaaaataaaaaaaaattttgtgttgaaatgtgattaagaaattttaaaagaagaaagatagatgataaaagaagatgtttttaatggattaaggaggtgtttttttaaagttagaaagagatatttagaaagaggtataggttttggaaggtatagagttttaatttttacggaagaaaagattttatgaaaatagtgatattatattaaaagaagtattcgtattttttgttattttatttcgatttttattgttttaggaaagagtttgtttgaaggcgggtttaaggagtgtcgatagtagttttttttttttatttttttttttattttttttttagtttgttgagttttttgtttttttggcgattgtttggatagttagtaaggaattgttttttagtgtattttgtttttttggttgttaattttggttgttaaagcggttgttatttgttgtagtttatatagtttcgggaagaggaaaggaattttagattttttagatcgttttttttcgtaataaattatttgtcgtaggtaagaaatattatttttttttatttggaaagttagttatggtaattagaggtaaataagttagaaagtaattgagaggaatataaattatttagtattattacgatgagtagttagtattaatataagaaatataagtaaagttagagtagaattttttttttttattagatatgggagagtattattttagaggagaggtttttaaattttttgtttttatgttttttttatattaagtatattatatgttagtataagtaatatttttaattaaaaataattatgtatttttttaataataaaaaaaaagtataaagagtgatatttttttatttttataagtgttttaattggtttaatagaagttatatagatttgttggatttttatttgttttgtatttagattattgtaatattgtatagaatgtagtttttggtaaattttgttgtatatttatgagagaatgagtgaaaaagataaattacgttttagaattattagaaatagtttttattttaggaattttttgagaattgttgttttagagtggtaaaataaataagtttttttttaaacggaattttaagatagaattagttatattaaaagtaaataaaaaatttgtttatggttagttattttgtgaaatttgttatatttttggattgggttataattggataatatagtatttttcgagataatttttttttataattaaggaaagggttgaataaatatttttgtttgaagttgaataataaaaattaggattttttaaattttaggatttttgaaattcgtttttttgtttatatttagttattttacgttttattaaatttttttttaggttaggtgtattagtttatgtttagaattttaggtaggtttgagtttaggaatttgagattagttagggtaatatagtttttataaaaaaataaaaaattatttgggtgtgttggtgtatgtttgtag

SEQ ID NO: 1000 - DNA, 6056 bp, Artificial Sequence
  chemically treated genomic DNA (Homo sapiens)
ttataggtatgtattaatatatttaggtaattttttatttttttgtagagattgtgttgttttggttggttttaaatttttgggtttaggtttgtttgagattttaggtatgagttagtgtatttggtttgaaagaagatttaatagaacgtaaagtagttgaatataggtaaaaagacgaattttaggagttttaaaatttagggggttttaatttttgttatttaattttaaatagagatatttatttagttttttttttaattgtgaaagaaaattatttcggggaatgttatattatttaattgtagtttagtttaaaggtgtggtagattttataagatgattaattatgggtaaattttttgtttgtttttaatgtaattgattttgttttgagatttcgtttaaagagaagtttatttattttattattttaaagtagtaatttttagggagtttttaaagtgaaagttatttttaataattttaagacgtaatttgttttttttatttatttttttatgagtgtataatagagtttattagaggttatattttgtgtaatattgtaatagtttgaatgtaaagtagatgagaatttagtagatttatatggtttttattaaattagttaaaatatttgtaaaaataaaaaagtgttattttttatgttttttttttgttgttaaaaaagtatatagttatttttaattaaaaatgttatttatgttaatatgtgatgtgtttagtgtaaagggaatatgagagtaaaaagtttgagaattttttttttaaagtgatatttttttatatttgataaaagaaaaaaattttattttgattttgtttatattttttatgttgatattgattgtttatcgtagtgatgttagatggtttatattttttttaattgttttttagtttatttatttttaattgttatggttgattttttaaataaagaggaatgatattttttatttgcgataaatagtttgttgcgagaggaagcgatttggaaggtttgaggtttttttttttttttcgaagttgtgtagattgtagtaggtggtagtcgttttagtagttagagttggtagttaggagggtaaaatgtattgggagataattttttgttgattgtttaggtagtcgttaggggagtaaagggtttagtaagttggggagagaatgaggaagaaggtggagggaggagattgttgtcggtattttttgggttcgtttttaaataggtttttttttagggtaatggaagtcgaaataaagtggtagaggatacgagtattttttttaatgtaatattattatttttatgaaattttttttttcgtaaaagttggggttttgtgttttttaaaatttgtatttttttttgagtatttttttttgattttaagaaagtatttttttagtttattagaagtatttttttttgttatttgtttttttttttttaagattttttggttatattttagtataaaatttttttttattttataatgcggaataattagttttatggggtaatttttataatgttataatatttaaaatatttttaaaatgtaatattttaaaaaaaggaatattttgtaaatatttttttttattttataattttatttaggatttttttttttttttaagtttaatatggtgttaaaggatagttgatataggttattaagatttattttttagtggaataggagtttatttttataaaatttttttatttgttgtattagatgtaagttatacggatattattattagaattttatttaataatttttatattttttgtaatagaaagtaagtttggggagagggatattaaaatttaggtaagagggtaaatatttatttgtagtttttagtgttaaaattttttatttttggaatgatagtaaagattgatttaaaatatttgaaatataatttaaggatatatatatttagggtttatgtttaatatgttaaaaaatagttttataaaatgtaacgtttgaagagtagagtgtaaatattatagttttgaaaataattagtggaaataaaattttttagttattttttttttgaatatgtgttaaattgtattattttgttaggaagggaattagtaaggtggtattttgtttttgtgttttgttagtatagagttgatataaaaatagaggggtttttagagttagggaataaaatgtttatataaatattattttttgttggtttgtttgttttaaaaataagatagggtttttatttcgggaagttataaaaatattatgttttttaatagtgattataaaggaagtttgtggtagggtggttggaagtgtttggtgtggtgattattagaagaaaaaaaatagtatttttaagaagtatatgataagaatatatacgtgatttaagttgaaatagtaagtttttattttttaattgtagagtttaattgggttaattaatatgaaagtacgaagtgggattaagtagtgattagaagtagtatattaagtaagttttaattttaaatattttattgttagtgaattttttttagttgtaaagatgtagaatgtgtaatttatatattttgaagttttgggataaatatttttttttttgatatagagtaataaatgttttagtgttttttgtattttatagagttgtttttaaagattaaatgagataatgatgatagttttttgaatattttaaagttttagataataatattattttatttatttttatttatttagtttatgtaatggaagttaatatttaaaaaataaaagaaaataaaatgtttatggtgtttttttaatttgatgaaagtatttatgtattaggtggaattattttttttggaaatattttaagaattagatggataattatttgtttaaatattatatagtgtgaaggttgtgagatgaattttatgagtattttttagatttttgggtttaatgaattattaaaaataataatagtaattatgataataaggaggaggagataaatatagtggataattttatattttattaaggaaggatattaaaaatgtaagaatttttaatttttttattttataaaatttattttatttgtgttttttaaattaggaaggatatggtattagaataaagtatagttattttaaagtgaatatatttgatttgatgaaaattttatattgttgaagagtttgaaataataaagataaaaattaaggtaaattaaaattttattttttttttttttattttattatagagggtaaaaatttaatatagattgttattgttttgggatagtgtttgagattttttatttcgttatagttatttaggttagtattatgtggtttatattttataatattagtaatttagattaaatatattgagcgtttattttttaggaatttatttaaaataatcggtttttttatagatagtaaataaatatatatatatagaatatttttaagatttaatgataattaatatttaattaagtaaaaggaaaaaaaaaattttagtaatgtatgtaaatgttaaatatagttttttaagatgtaagattttgtatttggagtttatggatgtgtgttattgatttttgtgttatgaggtaatttgttttttttttttttttatatttattaattgggcgtaagtttggaatgtatatttttgaaattgtaggttaaagttttcgtattaaagtattcgatgaggtaaagttataattatgtgagttatgtgtgttatgtaatattttttgatagttgttgttaattagatttaatttattgatatattcggggaagaattttttaagaaggcgtgattttgaacgtttggttgtattaaagaggaagagggggtagtaattgaggttttggatttaaaagttttgtttgtgggttaggggaatacgtgattaaagtttttttgtaaatagagtatttgtaaacgtagttttaaattttttttgtaaataaattaagtaaattttattcgaaaagaggtcgtggatgtgttattttgtgtttttttgttgagattttaagttgttgggatatatatcggttttgttttggaaaatatatatatatatatatatatatatatatttattttgtatttattaaaataaaaaaaaataaaataagaaatattgttatttaatttaagtttttttaaaattgtaatatttagaattaagtataatattttaggtataaaattagatatttagtttttttatttaagatattttatatttttttttttttttttttttgggttatattggtgatttatattaaattgttaattaaaatttttaaataatttttaatatattttgttgttaaattatattttttttatttttgagtttgtaaaattggtttttttgatttatatttgtttttaataaattttattttgttagattgtgttttaagagattttgttattttatgtatttatttatttaagttaatatatttttgagtttttattatttgttaggtattgtgttaaggttagtgtttataggtatataaataacggatataaagtgattgttgttataagagagaaacgtttaaaaaaaaaagttatttatgtagagaaggagtaataggatggaaggttggaggaattaggaaaaggttaatagggaaggagatatttggttggttttttacggatgtttgttaattgtagagaggataagggtagaggtgatggaaggaggaagggttagaagatatatattattttagaggaatagttagttgagggggtagcgtgtgggcggagtaggtgataatgttggagaaataggtttgtttacgattattagtatttagattaaggtttaatgatttttaataggaagtgtgaagttgtgaaataggagagtgaaattgtgtgattggtattttggaatagaaagaatagtatatagattgaagaagttaacgaggagtttaggtaataatttaagtaagagaagataagtatttaaattgaagtagtattagtgagtaaaggataaattttagaaataagttagagatgattgataggatgtagggagcgataaaaagagggtttaaaatgttggattcgaatgattggttggttggtgatgttttaattgggatggagaagatatgaagaataagtattgggaaaagttaatggttcggttttgagagagtttgagttatttgtagaatattagagtatagatgttttatagttagttggtaaaatataggtttagagtttaagagttgggggcggggtgggagatttatgtttgagagtatttagataagtttgttagtgagataagtgttatttattaagtatttattatatgttaggtattgtgttaagtattttgttatattttttatatatatatttttttttttatattgattttgcgaggaaatattttttttattttatagatgtggaaattaaggtttagaggaatatgtttatagttgtagggttgtttagtgatagaataagggtttgaatttagtgatgacgttaaattttgggttttatagtattttaaaaggtaaggtgagttttaagagttatttggtagatgaggaaatgggaggtattatgatgtattaaagttttagagaagaggaaaagagttgcgttttttgattaggagtgtggggaagtgcggaggtgggaagagggaagttgaaggagtttaaatgtagttgttttttaagttatttttttttatgaagtaggttagtttatttgttgagggtgaaagggacggggagaatgaaggaggttttaggaaagggttagagatttgcggtagattttgtgagaagatggaaagaatattgattgttaaagatttttggtagtattaagtatttagttaggattggaaattattattttgtaattgaattaattagtaaggttgtatgatttgtttta

SEQ ID NO: 1001 - DNA, 6289 bp, Artificial Sequence
  chemically treated genomic DNA (Homo sapiens)
attttttgatttcgtgattcgttttttttggttttttaaagtgttggggttataggcgttagttatcgcgtttagtttttttttatttttttaaattttttgaagtgaaattaatgggttaaaaggtgtaataatttgagatattatgttaaattttatttgaaaggtttgaattttttttgttgttgttataaatgtttgagaatgtttttgttattaaattaatatggtatttaatattttattgttttaaatgttggagaatattgttgtttatttttggtggaattatagtttggcgatagaatggtttgtttgatatagtttttgattattagttttaagtttttttttttttttttttttttattttttggtgttgatttagtttagtttataggttttgttatatttaattttttaattgtttttagtttggttatttttttttatttgtttagtaaagatgaggtcgatttgatttgtaaaagattattttttttaaatagtttaaaaaaaaaaagatgttttttaattttgggtttttcgttgttattgtgttttttttttagaaggtttgaggtttttgtggagttttttattttggttgttttttatatttttttttattttttttttttgttatttttttttagttttatagcgagtcgggtatgtttattaaatattttttagatagtgtgtgtgttgtgtgtgggtagtagatttttgtggacgttagtgaagaggggattattgagaatacgtataggttgttttgtaattatgtgtattttgtttcgagtttttgggttatattttttttgtaatttgtatattgtagtgagagagagaaagagggtggttatgattttaggtatgttgtttagatttttgagtgtaggagagttataagagggttattttttttatttttttttatagattagagttatttttaggtaaatagtggttataatttggttgggtttgagaggaatttgaggttgtagttagtgaggttgtgttagtagatttgagatttgattagttataggggaagaggattttttaatgggattttttagtttagtattattttttgttttgaataatatttgtaatatttattatgtatttatttagtttttattttttgtttatgttgggaaagttatgtattgtttttattttgttttataatagttttgtgagatagggattattatttttattttatatgtgaggaaataggtttagatatagggatttgtttaatattatagagttgataaagagcgaaggtaggatttgaattttttaaagattgtttggggttggagtgtcgttttggtttttattattttttttgattagcggtgtttagtttttacgagttttgtattcgtggttggtgtatcgtgggaaagaagtaaacgtgtttttattgtaaagagaaggtagattttaagaggatgtttagtaattcgtattttttattggggtcgttgttgggagtgggttgtgggaagaaagtattggttagtgtgatttgtatttgggtttttttggggtttttatttttgtttttaattagaatatgttaaattatggtgggaagttgagttgttagttttgtttttatgatataattttagtttttttattttaggattattgtttatttttagtttttttgtagttattgttacggatagatagatttgtgttagttttaggttgtgttattttatattggtagtttttttttagagaaggtgttataggaggttttttttgtatgttagttatggggaattaggatttatttttatattttttttagggttgttttgtttttagtattagttttttttatttgttttttattttttttgtatttagttttttattttaatagataggttgtgaggaggaagaggagggggagggtaaagttgggagggttgtttgagtaggaagtgaggttgggtttttttagaaagtagtttttatttttttaggttgtggagtagttggaaagtggggtagatttagggagttttattatttatgttagattatttttggtagtttttgtatagagttttttttttttaatatattgatagttgggagaggttttacgttatgtatgggtaattgttggattggtttcgatatttggtagtttggtagtttgttattattggtgtagtttaaggtattaattatattttgggtttggaatagtgatgaagagtattagtggaaaatttattttatacgttatggattttagggtatttttttttttgtttataaagattttttgggtgggaaagatttaaaggggtgtttgggttatttaggatttttttggttgtgtcggattggggagggatatgatggagagttagttagtggggttgttagtagtggggggttttttaaaagaaaattattttgatgaatatatttaaaaaatttttttttattgtggagtataggaattgtttttttttaggttttattttttttgtttaagtagggtgggggtagagttatgatatttttggtttaaaggagtttttttatttttggtcgagaatattgttgggtttttaggtagttgaaggttttagtttatttattttttttttttttgtgtggggtttaagtttggtgtatttagtatagaagagttaacgtatttaggtttgtgttacgggtgagtattgaggttttaggtgtttttttttttttattgtttgggatataggataggtgttgcgtttgattttgtttttttttgtttaagagttataggttggttgaggtaagtggaattttattagtgatttggttaataagggaagttttggggttttagaatttattgaagatttgttttgggataattggaagaattagtattatggatattcgttcgtgggtagggttgtggttagttaagaatagaggttatatagttgggttatggggtaattgttggtagttatgattgacggttttttgtgtaagtttattttttagtggattttttagtggagtggtgatacgtgttagcggttattttgttatattattttttttttgaaagtttaagagtgcgtatgcgtgtgtgtgtgtgtgtgtgtgtgtacgtgaggtagaagaatatgatagatgttagtttttttttgtgttagatgatatgtttttgaagttggtaggggatttttagtttagggaatatttttatatgatttttgttatttatgggttttttttgggtttgataacgggagtggtgggtgggtgagaataggttttgagagggggtttttaggaaggttttagttttagttttaggcgatttgaataaagtgggaggttaaatatgggttttcggtattgggtttttagggaatatggtttagtagggtttgtttttttaagggtagtaagaacgaagtaggatgttgttattttcgtttgaataaagttttatgagttgggttggaaagttgaatatttattttgtttttttttttttatttttttttttggggtttttaggggtgttttgtttttgttaatttttatcggagatttgagggtttgggggtggttgggtttgtttttttgttgtttttagttgtttttttgttgatatttttaggagtggtggaatgttaggtttttgttttgtggtttgggggtttggggtattattgggtttgtttttagattgaggttgttttatgtttttattgtttgaggatagtgtttcgttattatttgtttttttgaggattatatttaggttcggttttttttttttagttgtggttttttatggtattttgttgtttatgttatttgtggggttgtttttttttttagagaggggaatggggttggttagaggatttagggattatttttttttttattttttttttttatttttttgttaggtttaggtgagaagtcgaggttaggttgtttaaagttttttttatgtgtaatagttttgagttttttgatttttttttttggtttgattttggtttcggttttattaagatagagttttgttatttttttttattattttttattggattgttttttttagaaattttaggtagttttgttttttgatttaatttttggagatgttggtgtttttgggaggaattttttttgtattttatatgttagaagtttttggggtaggaggtagggggaggaattgagaggaggaaaaatatgaattagatatttagagaagaaggatgtgatttgtagtattttatgtttaaattaggaatatgaatttggtttttttataagaagtttgagattatagttgattgtgtttttgatgtatttattaaatttagttttatttgtgggtttttttggttttgttattagtcgttgtatttttttaattataggagttataaattttagatatgtagtttttgtttatatttaatatatgtatgtattggattatttagttttggtttttttgtttttatggataattgtatgattttgagagaaaatttttttagatttagtattttaggttttttatacgttttattttgaattttggttttttcgtagttttagcgttatttgttttattagtgataagatttatattttgatgtagattttgttgttagagttagtgttgagttagttcgtttttttttcgggaagtgtttgttttttttttttgttagggttggttttcgagtttgtgtgttagtttttgggttggtcgtgagagttttatagataaggaggaagtgttttcggtgtattttttgtggtgggtttatacgtagttagatatagttaatttgagttttggagtttttagagggaagtttttggaaaggaaggttttttaggattttttaggagttaggtaggagtttgggattattagtgaatttagatttgtggttttggttagaggggttaggatgagagatagagggtgtgatggtgggtgttgggagatgtagtcgattttggggttggtggttgggggagtgggtagtttgggaaaggttaggatgtggacggattggtatggtattgagtttgaagtggtttaatttggggttttttagtgtttaggaaagttgtttttttgaatgttagtgtgaaggtgaaggaggaagtagatgtttgtttatatggaaataaagatttggttgtgaagaggggaggcggatattaaagttttgatatttgggcgggatagaattgatttgtgagagatttatttagtttatattttaggtgattttgggggtggtatgggggtagattagagattttagtttggtattttttggagagtaggagttttaggagttgaaggtttttggttattgaattttggttaaagtagaggtgttatagttgtttaagattttttggttaaaaagtgaaagtgaaatagagggtcggggtagtgtttttttagaaggattgttcggtattttgttttttttagaagtagttttggtgttgaagagagtattgtttttttgtgtgattgggtgagtttatattttttttttgggttttaattttgttttttttaatgaaggggtaagattggattaggtaagtattttataattatttgtggttatgagagttggggtggggaaggattgttatttgatttttttagttttgtttttaagtgttgaaagagttttaggttatgttacgggaggagaagttagttattgaggaaaagttagttattgagaaaaagcgggagtggtttattattttttttttttattttttattagagaagaggacgttgttatagataaagagttaggtttattagtttttgacgtatgtattatgattatgagatataattggatattaggtaggttttggggttacgtatgggtaggcggggtagggtgaggtttatgaatagaatggagtaatgggttaattcggagtttttattttaaggtaaattatttagcgtatttggtgttgttgttttaagaatttgggtagatattgtagttttggttttagtttaaagtttttttgtattttgtttaataaagggttaaggggtgggtgttgaggggttttttttttcgttttgattttttggttagaatttagatatttttgggttggagttatatttttattcgggtagtttattttgtttttagagtcgttgatttgtaattgttttttttttaga

SEQ ID NO: 1002 - DNA, 6289 bp, Artificial Sequence
  chemically treated genomic DNA (Homo sapiens)
tttgaggaaaggatagttataggttagcggttttggagatagagtgggttgttcgggtaaggatgtaattttagtttagagatgtttgggttttagttagggaattagagcgggaagagggattttttagtatttattttttagttttttattgaatagagtatagagaagttttagattggagttagagttataatatttgtttaggtttttaaagtaatagtattaggtgcgttgggtggtttgttttggagtgaaggtttcgggttagtttattgttttattttgtttatagattttattttatttcgtttgtttatgcgtagttttaaggtttatttggtgtttagttgtgttttatggttatgatgtatgcgttaggagttggtgagtttggttttttatttgtgataacgtttttttttttggtgaaaggtgggggaggagaatggtaaattattttcgtttttttttagtagttggtttttttttagtagttggttttttttttcgtagtatagtttggagtttttttagtatttagaaatagagttgggggggttaagtgataatttttttttattttagtttttatgattataaatggttgtaagatgtttatttagtttaattttatttttttattagggaaggtaaaattgagatttaaagagagaatatggatttatttagttatatagggaggtagtgttttttttagtattagagttgtttttgggaagggtaggatgtcgagtaatttttttgggaaagtattgtttcgattttttattttatttttattttttaattagggaattttgagtagttgtgatatttttgttttagttaaagtttagtggttagaaatttttagtttttgggatttttattttttagaggatattagattgggatttttaatttatttttatgttatttttagggttatttagggtatgaattagatgagttttttatagattaattttgtttcgtttaagtgttaggattttggtgttcgttttttttttttatagttaggtttttgtttttatatgaataggtatttgtttttttttttatttttatattgatatttaaggggataatttttttaggtattggggaattttaagttggattattttaggtttaatgttatattagttcgtttatattttggttttttttaggttatttatttttttagttattagttttaaggtcggttatattttttagtatttattattatattttttgttttttattttagtttttttggttagagttataggtttaggtttattagtagttttagatttttatttggtttttaagaggttttgaagagtttttttttttagaagtttttttttaggagttttaagatttaagttagttgtgtttagttgcgtgtgaatttattataggaaatatatcgagagtattttttttttgtttgtagaatttttacggttaatttaggaattggtatataagttcgagagttaattttaataggagggaagggtaggtatttttcggggaagaggcggattggtttaatattggttttggtaatagagtttatattagaatatgaattttgttattgatgggataaatggcgttggggttgcgggagggttaggatttagggtgaggcgtgtgaggaatttaggatgttaaatttaaggaggtttttttttagggttatgtagttatttatggaggtagaaagattagggttgggtgatttaatgtatgtatatattaagtgtggataggagttgtatgtttgaggtttgtgatttttgtgattgggagggtgtaacggttggtgatagagttagggaggtttatagatggaattgggtttggtggatgtattaggaatatagttagttgtgattttaaattttttgtagaaaaattagatttatatttttaatttagatataggatattataagttatattttttttttttaggtgtttagtttatgttttttttttttttaatttttttttttattttttgttttaggggtttttagtatgtaagatgtaggagaaattttttttaagaatattagtatttttaggagttaggttaggaggtaaggttgtttggggtttttgagagagatagtttagtgggggatggtagggaaagatgataggattttgttttagtggaatcgagattagagttaggttaaggggggaggttaagggatttagaattgttatatatgaaaagagttttggatagtttggtttcggttttttatttgagtttgataggggggtggggggaaaaagtaaaaggaagggtgatttttaggttttttgattagttttatttttttttttgaggaggggaatagttttataggtggtataagtagtagggtattatgggaagttatagttggggaagagaagtcgagtttgagtgtggtttttaggaaggtaggtggtggcgggatattgtttttaggtagtgagaatatagagtaattttagtttgaaggtaggtttaatgatgttttaggtttttaggttataggataggagtttggtattttattatttttagggatgttagtaggggaatagttgggaatagtagaaaggtaggtttaattatttttagatttttaggttttcgatgggggttaataaaggtaagatatttttggggattttagggaaagaggtgggaagaagaaagtaagataaatgtttagttttttaatttagtttatggagttttatttagacgggagtgataatattttgtttcgtttttgttgtttttgaaggggtaggttttattgagttatattttttagaaatttaatgtcgaaggtttatgtttgattttttattttatttaagtcgtttaggattagggttggggtttttttagaagtttttttttagaatttgtttttatttatttattattttcgttgttaggtttagggaggatttatgaatgataaaaattatgtagggatattttttggattgggaattttttgttagttttaaggatatattatttgatatagggagaagttgatatttgttatatttttttgttttacgtatatatatatatatatatatatacgtatacgtatttttaggtttttaagaaggaagtgatgtggtagagtgatcgttggtacgtgttattattttattgaaggatttattgaagaatgagtttgtataaggggtcgttagttatggttgttaataattgttttatggtttaattatatgatttttatttttggttgattatagttttgtttacgggcgagtatttatggtgttgatttttttagttgttttaaaataaatttttaatgaattttgaggttttaaggttttttttgttggttaagttattgataaggttttatttgttttaattagtttatagtttttggatagggggagatagagttagacgtaatatttgttttgtgttttagatagtgggggagggaggatatttggggttttagtgtttattcgtggtataagtttgagtacgttagtttttttatattaagtgtattaggtttgagttttatatagggaagaagggagtgggtgggttgaggtttttagttatttgggagtttagtagtgttttcggttagagatgagaaggtttttttaaattaaaaatgttatggttttgtttttattttgtttaggtagggagggtgaagtttggaggggggtaatttttatgttttataataaaaaaaggttttttaaatatatttattaaaatagtttttttttaaaaagttttttattgttgatagttttattggttggttttttattatatttttttttagttcgatatagttagaggggttttgagtggtttaagtatttttttgagttttttttatttaggaggtttttgtgggtagggaggagagtgttttgaggtttatggcgtgtggggtgggttttttattgatgttttttattattattttaggtttaggatgtagttgatgttttggattatattaatgatgataggttgttaggttattaagtatcgaagttagtttagtagttgtttatatatgacgtgaggttttttttagttgttagtgtgttaaagaaaagagattttgtgtaagagttgttaggagtgatttagtatgggtggtggggttttttgggtttgttttattttttagttgttttatagtttagaggaatggaggttgttttttggaagggtttagttttattttttatttaggtagtttttttaattttgtttttttttttttttttttttttatagtttgtttgttggggtaaagagttgaatgtagagaaggtgggaggtagatagaggggattggtattggaggtagggtagttttgagagaggtatagagataaattttagttttttatgattaatatgtagggagggttttttgtaatattttttttaagaaggaattgttagtgtaagataatatagtttgaggttgatataagtttatttattcgtgataatggttgtaaggaggttgagaataggtaataattttagaatagggaaattggggttgtattatgggggtaggattagtagtttagttttttattatggtttgatatgttttggttgggggtagaagtgagggttttaggaggatttaaatgtaggttatattggttagtattttttttttatagtttatttttaataacgattttaataaaggatacggattgttgaatatttttttgaggtttattttttttttgtagtagggatacgtttgttttttttttacgatgtattagttacggatgtagaattcgtggaagttgagtatcgttggttaagggaaatggtgagagttagggcggtattttagttttagatagtttttgaaaggtttaaattttgttttcgttttttattagttttgtaatgttgggtaagtttttgtgtttgaatttgtttttttatatgtgaagtaaggataatgatttttattttataagattgttatggggtaaaatggagataatatatggtttttttaatataggtagagaatgggagttgggtaaatatatgataaatattataagtgttatttagaatagaggatgatgttaaattgagggattttattagagggttttttttttttgtgattggttagattttaggtttgttagtatagttttattagttgtagttttaggttttttttagatttagttaggttgtaattattgtttatttaagagtggttttgatttgtgggaaagggtagggaaggtggtttttttgtggtttttttatatttaagggtttggatagtatgtttagggttatgattatttttttttttttttttattatagtgtgtagattgtaggagagatgtggtttaggagttcgaggtaggatatatatgattgtaggatagtttatacgtgtttttaatgattttttttttattgacgtttataaagatttgttgtttatatatagtatatatattgtttgaaagatgtttggtaggtatgttcgattcgttgtagaattgaaggagaatagtaggaaggaaagataggaaaagatgtgagaagtagttaaagtaggaagttttatagagattttaggttttttagagaagaggtatagtggtagcgggaggtttagagttagaggatatttttttttttttaaattgtttagaaaaggtaattttttataagttaaatcgattttatttttgttgggtagatggggagaagtgattagattagagatagttgggaagttagatgtaatagaatttataaattgggttggattagtattaaaggataaggggaaggggagggagaaggatttggggttggtgattaaaagttgtgttaggtaagttattttgtcgttagattatggttttattagaaatggataataatattttttaatatttaaaatagtgaaatattaagtgttatgttggtttggtgataagggtatttttagatatttgtggtagtagtaaaaggggtttaagttttttagataggatttagtatggtattttaaattgttgtattttttgatttattaattttattttaaggaatttaaagaaataagaggaggttgggcgcggtggttgacgtttgtaattttagtattttgggaggttaaggagggcggattacgaggttaggagat

SEQ ID NO: 1003 - DNA, 6118 bp, Artificial Sequence
  chemically treated genomic DNA (Homo sapiens)
attaaattgaaggaagagaggtttttgttagaaatagatgtaataaaaaggaagagggatatttgatttggaaatttagggtattatagaggaagtgggggtaggtataattaagtgttgcgaggggaaatgtgaatatttagagaataggtataagggttagttggggatggaggagaaaagagttgaggggtataaaaggtggaaacgtaaaagggtttggaaggtgatataattatttttttttttttttattttttttttttttttttttggtttttgttttttattttttttttaaaagtttaaaataaaatgtttttataatgtgttttttttattttgtatttagttaaatatatatatatatatatacgtgtatatatatatacgtatatatatgtatatatattaaatatatatacgtatatatatagatatatatatatatatatatatatatatatatataatttgttgttttagtttttgttttttaatgattttgattttttaaaaaaatgtaaattaaaggaagagggcgatatataagttatttaatatttttgtattaaagtttaattatgagagttttggattgaattgtaatttaataaatgtttatttaatgagtattacgtgtaaaatattgtttgtttgttagggaaatattatattattttttcggagttagtattttagtgaaaatagtatttaataagtaaattaattaaaatgttacgtaatgtattatttgatttggttgttaggaaaagttttgttgggaaggttatagtggagtagggatattaatgaagatgtgagtaagaggagagaataagtaataggggaatagcggtttagtaagggggaatagtaggtgtaaatattttagtatgggaatatgttagtgtgtttggtcgatagtaaggagtatgttatgggagattgaaagaagtaatttagtgttggattatgtagggttatataaggatttttaggttataaatgattatggaaatttatttgattatgataagaaattattatttgaaagtagagaatgatatattttttgtaaaagaataatgaatatttatattgtatttttatatgttaatttttatgttaagtgttttatttatataattttatttaatttaaaaatagtattataatgtatattattgttattgttatttatattttttagagaataaaattgtgaaaaaaagaaattaagtaatttgattatattatgtaaatttgattttaggtagtcgggttttagattttttgattttaattattagtttgtatttattttatttttatttataagggtttttgaagtaagggtaatagattttttgggtaagagtttaagtagggatattagtgaggggagagatggtaatgatttgaattatggtggttgtgatggagaagaggaatagcgtggttggatttgagatgtgttttgaatgtagaggaagtagaaggtttgtggatataatgtgtataggtaatgagagagagtgataattttaattttttgatttgagtaattgggtaaaagatagtgttgtttataaagttttggtttggtgtggggtagaaataaagtttgaatttgaatatgtaaagtttgagatgtatttaaaatatttaagaaggagatatgaaggaggtaatatggtatataaagtttggtttgggttttagatttagatttgtaagttattattatattgatattttagaaggttatgtgtttgtttgagtttttttaggtagagaatataattattttaaggattgagttttaggatattggaatttttagagattatgaagaggtagaggatttaataagaatttgataaggaatagtagatgaaatatatgaaaaataaagagttaagtacgagagagtgtgaaagagtaatagattatttgtgtttaatgttgttgatatatgtataatgaagatagagaattgattattatatttggtaaagtgaagattattatagatgttgattgtggagtggtagagataaatgtttgaatggattgggtttaagagattagtaaatttttgatgcgttttatagttatagtaagataattaaagataatttaaaaaaaaggtggagggtaaaagttgggagaagaagagaataataatatttttttaaatatattaattaattgtaaaatattttattgtgtattttttatatatttagtagtattagttattgatattaatgaatttgtagttttatttatttatttaggtaattattatttattaaatgtttagtatgtgatggatatttaatgggtatagttttaaaatattttttttaattgttagtataatatttttttatttttaattattacgggtatataataggtgtatatatgtatgggtgatatgtgatgttttgatatatgtatataatgtgtaataattatattagggtaatgataatagggtgttattattttgattatttgttatttttttgaggaatattttaattttatttttatttattttaaaatgtataattaattattgttgattgtagttattttgttgtgttattaagtgttgggttttatatattttagttaattatatttttgtaatcgttaattatttttttttttttataatttttttgtttttgttattttttttagtttttggtaattattattttatttttatattttagtttttttgtttaatttttagtttttacgtgtgagtgagaatttgtaaaatttgtttttttgtgtttggtttattttatttaaatgtaaaaggaaaaagagatgtttttatttttgtaattttaatatattaatatttttttatattttttttaattggtgtttatttttttataatttttatttaattttattttgtaagtttttttttttgtagatatatttttataatatgatagttatgatgtaaatattttattttgtgcgtagatagcgttggttaattaattatttttatttttaattatttatattgtgtttaaattataatatattatgaatatttgtttatatgattatttattttaatgttattttttttaagttatgagtagttttttaatgttcgggaatatatatttggtttaattttgaattattagtatttgtttggtttttaggtagtatatgagattgagtagcggttgagagtatgaacgtcgagtgtttttagttttattttgtattttttatttgtaggtttgtagttttggttaagttatttaaattttttttattttttttatgaattggagataataatagtattttttaggttgtattgagggttatttgaattaatatatataaagtttttatgattgtatttttttattttgtaagtattgtgtaaatgttttagtgtattatatatatataaaagtttgtgtttagaatatatttaaggaatgaataataaattagaaaatgttttattgttgttttatataggtaatattttaaatttttttggattattttttttttggtttagtgataatgttgtgagtaggtgttgggttttaggtattttgagataaataaaaattttgagtaattaatttttataagtgatgttaagaagtaaagtattatgaatatttttatggttttaattatattgatattttattttaggaattgaagtttcgttagggtaggggtagtttttgagtttcgtattgttgtgtatttttagtagtacgggtatttgttggttttattttttttttatttatttgggttttttttttattttatattttttttttttttttttttaaatgttttttttgaattttgatttttgaaaataaattagtaggatttagttaggtaggaggaggagaaaagaagatgtgatgagtaagaagatgtgcgaagattcgttagtttggtaggtggttttggttagggggttttagaaatggggataggttatgaagggttttgttagttaggaaaaattatgaggtattagtagtaggaatatagtagaaggtgtttgaataagagagatgatttaatgaaagtttttataacgtttttcgggatatattatagattattatttatagtggtagagggtagttgaaggaaggtttttgtaaaaatttggggaaatggaaatgaatgaaggtaaatatttgttttgagattatttttttttatgtaatttattagtttttttattcgttttttatatatgtattgagtgtttattttgtgttaggtattgtgttaggtaatgggtatattattagtggataatatagatttagttttgttgttatgttttgttgtttgtttatatgaatgttagtttaagatagtaagagtttaggattgcggagatcgtatttatattttgtcgcgttttgtgtcggtatagggtggttgcgaaaatcgtgtagtttgaattgatttaaggttttgtagtatgattgttaaatacgtcgagataggaagaaagggtagggtggtatcgattttaattgcgagagtacgattttgtaatgagcgtatgtgtgcgtttcggtgtgtagtgaggggcgtagttttttatagcgtttggtagcgtgtcgagttgcgttgtaggattaattttttttttttttcgcgcgtttaagttcgtataggcggtggtagggagtcgaaggggtcgagcgtagttttgtattcgttcgtaggcgggttcggcgtcgcgttttttggcggcgggcgggatcgtttaggacgtcgtttcgcggtcgtagtttttggaagtttagagcgtcggtggatcgcgagttaaggcggcgggtggagtttgagtcgtgaggtcgtggttaatcgcgtcgtttcgggggaggagttttaaagggggaaaagaaagtgcggcggaaagtaagaggtttattggggaagattgtcgggatttaggttttcggggttcgttttggttagaggcgcggaaggaagtagtgttcggcgatattgtatttatttcggttgtttttgttgcgtttttttagttttttaagaaaggtgagtttcgcgtcgtcgtgagggtttagaagttattaagtcgtagaattttagggtagacggatttttagagattttatcgttaaatttttttattttatagaagaggaaattgaggtatagaacgaggtagcggttgggataggttatattgttagttaggattggagttcggattcgaatttaaacgtttagagatttatttttgttttgtagggatttaagtaacgcggttgtgggacgtttgttcgttgtcgtttttatttttagttttttgaggggtttatttttgtttttttttttatcgtttttttttcgttattatttttcgtttttattttttttttggtttttttagatcgttgttggaagcgtcgaggatagaaggaagcggtgtgttttagtacgtttattcggtattacgtcgtttttagcgtagagttgtgatagtttgggaaaatgttgtttgtagttttattttttttttttttgatttgtttttttagaaagatgtttttttagagggtgtcggattagtttttggaggagcgcggggagagaggagcgaggttcgggcgttagtgattttttatggtattgtttttttttagtttcggaggaagcggagttagtggttttgtggggtatagggtgttttttatttgggaagagttgattttatggaattatagagtttttttttttttttaaatattgagagggagtaaggaagttgagttaaagagaaaattataaatataaaagtaaatttcggttgttttttttaagagttagtttatagtttgttttttttttattttttggttgtgaaattgtgaattagggcgttacgcgaagtattttgttgttttgttgtatagatttttggtttagttattggatgagaaagaggatttgagttttgattttagtttttttatgtattagtagtgtgaatttgggtaagttattttattttttcgatattgggttttttttt

SEQ ID NO: 1004 - DNA, 6118 bp, Artificial Sequence
  chemically treated genomic DNA (Homo sapiens)
aaagaaaaatttagtatcggaaaggtgagataatttgtttaagtttatattgttaatatatggaagagttggagttaaaatttaagtttttttttttatttagtagttaaattagggatttgtatagtagagtagtagaatgtttcgcgtggcgttttggtttataattttataattagaaggtggagggaagataggttgtgggttagtttttaaaggaaatagtcgaagtttgtttttatgtttgtgattttttttttaatttagtttttttgtttttttttagtatttagaagagggaaggggttttatggttttatgaagttagttttttttaagtgaggggtattttgtgttttatagggttattagtttcgtttttttcggggttgggaagaaatagtattataggaggttattggcgttcgggtttcgttttttttttttcgcgtttttttagaagttggttcgatattttttgaaggggtatttttttgagaaagtaggttaggggaagagggagtgaggttgtaagtagtatttttttaggttgttatagttttgcgttgagagcgacgtgatatcgagtgggcgtgttgggatatatcgtttttttttgttttcggcgtttttagtagcggtttggagaaattaaggaggagatgggggcggggggtggtagcggggagggggcggtgaggaggaaaataagggtagattttttaaagggttgaggatgggggcggtaacgagtagacgttttataatcgcgttatttaaatttttgtaaagtaaagatgggtttttgaacgtttgggttcgaattcgggttttagttttaattagtagtatgatttattttagtcgttgtttcgttttgtgttttagtttttttttttgtaaagtaggagggtttaacgataggatttttaagaattcgtttattttgagattttgcggtttggtgatttttgagtttttacggcggcgcgagatttattttttttgggaagttgagagggcgtagtaaaagtagtcgggatgggtgtagtgtcgtcgggtattgttttttttcgcgtttttggttaaagcggatttcggagatttggatttcggtagttttttttagtgagttttttatttttcgtcgtatttttttttttttttttggggtttttttttcggagcggcgcgattggttacggttttacggtttaggttttattcgtcgttttggttcgcgatttatcggcgttttgggtttttaggagttgcggtcgcggggcggcgttttggacggtttcgttcgtcgttaggaggcgcggcgtcgggttcgtttgcggacggatgtaaggttgcgttcggttttttcggttttttgttatcgtttgtgcgggtttgagcgcgcggggaaaggagagggttagttttgtagcgtagttcggtacgttgttaggcgttgtgggaagttacgttttttattatatatcgaggcgtatatatgcgtttattgtaagatcgtgttttcgtagttgagatcggtgttattttgttttttttttttgtttcgacgtatttagtaattatgttgtaaggttttgaattaatttagattgtacgattttcgtaattattttgtgtcggtatagagcgcggtaggatgtagatgcgattttcgtagttttgagtttttgttgttttgaattgatatttatatgagtaagtaataggatatgatagtaagattaaatttgtattgtttattggtaatatatttattgtttagtatagtgtttggtataaagtaggtatttaatatatgtatggggaacgaataaaagaattaataggttatatagaaggaaataattttaaaataaatatttgtttttatttatttttatttttttaagtttttgtaagagtttttttttagttgttttttgttattgtagatggtagtttgtaatatatttcgggaagcgttataaaggtttttattaagttattttttttgtttaggtattttttgttgtgtttttattgttagtgttttatgattttttttgattggtaaggttttttatgatttgtttttatttttgaaattttttaattaaagttatttattagattgacgagttttcgtatatttttttgtttattatattttttttttttttttttttatttaattgaattttattaatttatttttaagaattaagatttagagaaagtatttaaggaaaaggagaaaaaagatgtgaaataagaaaagggtttaggtgagtgggaaggaaatgaaattagtaggtgttcgtgttgttaaaggtgtatagtagtacgaaatttagaggttgtttttgttttggcggagttttagtttttaaggtgaaatattagtgtaattggagttatagaaatgtttatgatattttattttttgatattatttatgaaaattaattgtttaaaatttttatttattttaggatatttgggatttagtatttgtttataatattgttattgaattaaagagaaaataatttaaaagaatttaaaatgttatttgtatgaagtaataataaaatattttttgatttattatttattttttaaatatattttgggtatagatttttatatatatatagtatattgaagtatttatatagtgtttataaaataaaaaggtgtaattataaggattttgtgtatattaatttaggtaatttttaatataatttggagggtgttattattatttttagtttataaaggagataaagggaatttaaataatttgattaaggttataggtttataagtggagaatataaaatgagattagagatattcgacgtttatgtttttagtcgttatttagttttatgtattatttagaagttaaatagatgttagtaatttagaattgaattagatgtatattttcggatattgaagggttatttatagtttaaggaagataatattaagatgaataattatatagataaatatttatagtatattgtagtttgaatataatataaatggttggaaatgaaaatgattagttaattaacgttgtttacgtatagaataaaatatttgtattataattattatattatggaaatatgtttataaagaaaaaggtttataaaataaggttgagtaaaagttgtggagagatgaatattaattgaaaggaatgtgaaaaaatgttgatatgttaggattatagaaatagaaatatttttttttttttttatatttaagtgaaataaattaagtatagaaagataaattttgtaaatttttatttatacgtgggagttaaaaattaaataaaggaattgagatatgagagtagaatgatggttattagaggttgggaagagtagtagaggtaagggagttgtggggaagggaggatggttaacggttgtaaaaatataattagttggaatgtataagatttagtatttgatagtataatagagtgattatagttaataataattaattatgtattttaaaataagtaagagtgaaattggaatgttttttaaagaagtgataaatggttaaggtgatgatattttgttgttattattttgatgtgattattatatattgtatgtatgtattaaaatattatatgttatttatatatatatatatttattatgtattcgtaataattaaaaatgaaaaaatgttatgttaataattgagaaaaatattttaaagttatatttattaaatatttattatatattaaatatttgatgaataatagttgtttaaatgaataaatgaagttataaatttattgatgttagtgattaatattgttggatgtatagaagatgtataataaaatattttgtaattgattgatgtatttggaaaggtattattatttttttttttttttagtttttattttttattttttttttaggttatttttaattattttgttgtagttgtaagacgtattaggagtttgttagttttttgaatttaatttatttagatatttatttttattattttatagttagtatttgtaatgatttttattttgttaaatgtggtgattaattttttgtttttattgtatatgtattagtagtattagatatagataatttgttgtttttttatattttttcgtatttgattttttgttttttatgtattttatttgttgttttttattagatttttattgaattttttatttttttatgatttttgaaggttttagtgttttagagtttaatttttgaagtggttatattttttatttaggggaatttagatagatatatggttttttaaaatattaatatgataataatttgtaaatttaaatttaaagtttaaattagattttgtatattatattattttttttatattttttttttggatgttttaaatatattttaaattttatatgtttaaatttaaattttatttttgttttatattaaattagagttttgtaagtaatattgttttttatttagttgtttaggttaaaaagttggagttattatttttttttattgtttgtatatattatatttataaattttttgttttttttatatttaaaatatattttaaatttaattacgttattttttttttttattataattattatggtttaagttattgttatttttttttttattggtgtttttgtttaaatttttatttaaagagtttattgtttttattttagagatttttataaatgaaaatagaataaatataggttagtgattgaggttaaggaatttgaagttcgattatttgggattaagtttatataatgtggttaagttatttaattttttttttttatagttttattttttgaaaaatatgaataataatgataataatatatattatagtgttgtttttaaattaaatgagattatataagtaaaatatttggtatggggattggtatgtagaaatgtaatataaatatttattatttttttataagaaatatgttattttttgtttttaaatagtgattttttattatgattagataaatttttatagttatttatggtttaaaagtttttgtgtggttttatatgatttagtattgagttgttttttttaattttttatagtatgttttttgttgtcgattaaatatattaatatgtttttatattagggtgtttgtatttgttgtttttttttgttggatcgttgtttttttgttgtttgttttttttttttatttatatttttattaatgtttttgttttattataatttttttagtaaagttttttttgataattaagttaaataatatattacgtaatattttaattaatttatttattgaatgttgtttttattagaatgttaatttcgggagggtaatataatgtttttttggtaaatagataatattttgtacgtagtatttattgaataaatatttgttgagttataatttagtttaaaatttttatggttaaattttgatataaagatattaagtgatttatatatcgttttttttttttgatttatatttttttgggagattagaattattggaagataaaaattaaaataataaattatatatatatatatgtgtgtgtgtgtgtgtgtgtttatatatatacgtatatatgtttaatatatatatatatatatacgtatatatatatatacgtatatatatgtgtatatatttggttgggtatagagtaaagaaagtatattatagagatattttattttgagtttttggaaggaaggtgaagggtaggagttaagagaaaagaaaaaaaaagtgaaaaaaggaaaaagtaattatattattttttaaatttttttacgtttttattttttatattttttagttttttttttttttatttttagttgatttttgtatttgttttttgggtgtttatattttttttcgtagtatttagttatgtttgtttttattttttttgtggtgttttgggtttttaagttaggtatttttttttttttttattgtatttgtttttgataaaagtttttttttttttagtttgat

SEQ ID NO: 1005 - DNA, 14798 bp, Artificial Sequence
  chemically treated genomic DNA (Homo sapiens)
ataggaaggatttttttgttatggttgtttgttgttgttgtaagtaatataattttattttgatttagttgattgacggttttattattttgttttttgtagtataagaggaataggaattgtattttttttttttagttttagtttgaataatattaggaagattcgtatcggtttgagttgggttacgtattcgacgtgttatagttgaggatggggtaagttgattggagtttgtaatattgtttatatagttaagatatggaaagaatttaaatgttaattggtggatgaatggataaagaaattgtggtatatatatatattggaatattatttaattttaaaaagaaggaaattttaatatttgtgataatatggatggatttggagggaattatgttgagtgaaataagatagatataaaaagatattttttgtaggagtttatttatatgtggaatttaaaatagttaagtttaaagaagagagtagattattggttgttaggagtaggagaaaagtggaaatgaagaggtgatagttaaagggtataaagttttagttatataagataaataagttttggaggtttattattaatatattatatagtatttataagtaataatattgtattgtatatttaaaattgttaagagggtatattttatatgtttttattaataataataataatggtaataattaaggggtaggaggatattttaaaaggtgatggatatgttattggttttgatggtggtgatggttttatgagagtatatttatttttaaattaattgagatgtaaatattaaatatgtatagttttttgtatgttaatcgtattttagtaaagtagtttaaaaatggttggattgagaaaaggaggagttgtttagtaatatgaggttgggtgttgggtagataaaattttatatatgtattattgaatttacggatttatgtttgtgagttttgtggttgtggatgtattatgttaatgtagttaaggattttttaatgtgtattttattggattagttttttttgtttatttgtattgattttttagtttttttatgggttgtttgttggtttttgtggaattatttaagtaaggttttggttgtaggagttagatatgtttaagttggttttggttgtaatggggaatttgtgagatgtgatatagtgataggaagtgtagttagacgttgtgagaggtagtaattgggaataggaaagttatgagaagttaaggtagtagtaattgtttttttattagaaggttataatgttattatttttgtttttatttgtttgtttgttttttttttttagtagaatggttttttttgtttttttgtgtatttgtagaaggtgattattttaaggtttatggatttaggagtttttagtttgagagtagttattaaatgtttcgtttttgtgaattttagttttagttttttatttttggtattggtttagtttgaggtagttgtttatcgttaagtttagtgagttatggtttggggataaggttaggtatatgtgtaattagttgggtttgtgagttgtggtggtggcgatggaggtagtttttagaaaaatggattataggttaagaagagtttatatattttgattatatttgatgtgatttggaagttttaatgtgtgattatttataaagttaggattaggtgttttatttatttatggtgatgtatgagttcgtgtgtgagtgtgtgtgtgttttgtgttttgtgtgtgtgtgtgagagagagagagagaatgagaatatgagtggtggttttttatttatttttttatgggttaaattttgggttatgagttggagatataagagtaaataaaatagatacggtgtttgttgtgatttgttttgggagatagatattatacggaggattatataaatgtagagtttgagttgaggttttaaagggtgaggataagtaattagttagtggagtaggggagggaagggtgttttatgtttgtgttaaggttttgaggtgagagaaagaggtgaatttgaggattaaaaggagtttagggaataagaggggttgttttataagttgagtttggaagttgagtaggttgagtagatttttaggaattttgtaaaaatttaagggtttgtttatgatcgtaaataattacggtcgtagataaataagttggtaaataatttaaggatttatagttattagaattgtaaaattgattttatgtatttttaaattttaaattttttgttttgattttgtgtgtttaagttagaaggaagtaggatcgattttttttttggttggaatgaagggatttatttaagtttttagtttttttacggtatttagggtttttttgtttgtgtgtggtttagatttttatttttatagtaggaatttttttgggagttttggggttttttttgttagagggttttatttgtgattgttttaatttaagggaggggttttaataatattaaattttaatattttgtttttttatttttgatgtttttttttttttttattttttttttattttttttttttttatgttataggttggtaggttagtgttagagtaagtggttagttattattattggggttgtggatttttagggttttttagaacgttttttattatgattaagagtttttagttatttagaattttacggtttttaaatgttagtttttttattatttttagcgttttttatttttgggatgttgggttttaggttttttagatgtattgagtattttaggttaagttattgatttattagaattttatagtttgagaggagagggagataggtttgtaaaggagagttttgattagatattggggtgttatagatgttttgtaagttgttttttattttcgatgttttagtgttgggattatttgggaatgtttagttttgtgtgttgattgatttgtagttttttggttttgattggaagtttagtttttttttttatgatttagttaggtttttagttttttagggaagaaatttaatttattttttttgatagtaatggttaatatttaaataatgttaattatatgttaagtattttatagttgttagtttagtttttataagtattttgtgaggtgggtaagagttttattttatttttattttatagatgtggtttaggattttatagttatagtttatggtgttgggatttgaatttttggttattagagtttattttaatgtgttttttttttgttgttataatagaaaagtataatattatgatgatatattaggttattttggtaggtttttaggttgttttaatgtttaattttttaggtttataaagttgatatttacgaagtttttaggtttataaatttagtttttgattttttagttagtaggaatttttttataaaagttgtttcgaaaatttttagttaaattttatatattttggtattatattttggtgagttaagcgaagagaataggaagtgaaggttttatgggaagttttgcggtcgggagtatttaggcggggcggggggtggggggtttttttgtggtcggttttttgttttttttatttttatttaggttttgtgagttgaatgaagagattttgggaatgagtttaggtttgtagggttagaggaaattgaaggtttttattagatttttgttgagaagtttatgaattatgagtttttttgtaaatgagagggtttttttttgttaggagggatagattgtaggtggtaagattggtggtagttagtaggttggtttgtttttttttttttattttatatgtgtatgaaggtattatttgtagtaagggtttgtgtaaatgtatgtgatttatagagtattttatgtattgcgtgttatttatgttttcggtgagttttaagtttaagataggggtagatagtattaggtttattttgtagttgttaaaatgaggtttgaagggtagaagtggtgtgtttatatatatataattggttggttgtagatttggggattagattcgggatttcgttttgtttaggggttttttgttattgttttttattaatttggatggttttaagtatttgtgagttgtttgttttttgatggtagaatgtagagatatgaagttataagtaggttcgtttttaacggtaaaaaggaggagggtgtttagaatattaggtgtttttagagaaagtagggagagagtatttggttttgtggataatgttacggtagaggttaggtatagggtatgggggtaattggaagcgggatggattttgttattttttaagatatggtttttacgtagtgtttaaataaggtttttgtttttgttgttttttttatttggaatatttttttttttttttgatattgtttaggtttttatttttatgttatttttttagagagggtttttttggttattttttttaaaatagttatttatttttaggttttttaaaagtatattttgttttggattttttttatagtaatatgttttatgaagttattttatttgttaatttgttttttgtttgtttttttttgttagagcgttggggattttgtttggtttgtttttaatgtttggaagagtgtttggtatataggattaagttaatatatatgttttgaatgaatgtgtgtatatatgtatgagttggcggtagtcggggttggggtaagtacgaaggtttagtttagttttttgtatgtgattttttattttacgtagataagaattagtttggtttttgttagtttgagttatttttttggaaattgggtttgtttggtattaagttagttattagtcggtttatttttttatgttggttaattttttgtgagtgtgtgggaggggaggttgggtttttttttgtattttttgaggtgttttggaaggaggggtagttttattttgggagggattgtggtttaggtattgttcgggtgttattttatgggtagtagtttagttgagttagagtttggaagattttagaagattttttgttttatgaggttttttttatggttttaggtaagttttttttatttttatttttttatttgagaaatgagagaggaaaatgtttataattggtgtttattaaatgtttttaggttttggtgagtaagcgtttaggaaaatgttaagcgtatggagttttaggtttgtttgggggatttgggtacggggaggtatttatgggagattatgtaggtattttgaggtaggggttgtaagtttagtgtttgttggggtagtaggtgaatagagaggtgtaattgttgtgatagaagttatggagtttttggagtgtgagggttattttttattgttgatagaatagggaaattggtgaaatagttttgttaaatgagagaaagaatagtgtgagtttaatgagaaatattaatagaatgtggtattgagttataaggtttgagggttgattgataaggaagggtggggattgtggagaattaagggtttggtataggttagttttattagttgttataagagaatgtaggtttaggtggttagaatttttcgtttttttagaagagttcgatattttgattttattatatatagtattttgattaaattagataataaagtaagtagataaaatatttaaattataagttgttagtttgtaattttcggttaggatttgtgtggggtaaagaaaaaaatttttaggattattggtatgtagattttaattttaagtttttaatttaaaattggtttttgaggttgggcgtggtggtttatatttgtaattttagtattttgggaggttaaggtgggtggattttttgaggttaagagtttaaggtttgtttggttaatatggtgaaattttgtttttattaaaaatataaaaattagttgggtatggtggtgtatgtttgtaattttagttatttgggtagttaaggtaggagaattgttggaattcgggaggtagaggttgtagtgaatggagattatattattgtattttagtttgggtaatagagagagacgttttttttaaaaaaaaatatgtaaagataaataaaatgaaataaaataggtttttaatgagtaggttatttttttttttgggttttattttttttgtatttttttttgggtgttaagaggaggtttagaggaagttggataatttttagtttgtagtaagtatagtggaagtgttagtttttaatgggttatggatacgttataagttaggagtcgcgttgagattttatatggtttattttattgaatttttttaataattttatgaggaagggttattattgtttatatttttagaagaggaaatggatatagagagattagataatttgtttatggttagatagttagtataagaggaggaggtggattgattgtagatattttgtttttaaattattatattatgttatgggggtatagagatttaatgaaattatggagaggggaattgttttgttaattataagtagttatttcgggggtagtagatttttttttgttttttagtgggtataatggtttttggtgggttgtgttataatgttagtttatggttttatgtgttttttaaatgtgtaaagtaggatgttggaattatttttagaattagatattaatatattgtgaagaaataaatttttgtgtttaaaattggtttattttaaaatattttgaattgatatataataggtgttaaataaatgtgtgttaatttgaattggattgaattcgggaaaaaagtgtaataagtttagtgaagatattatgttttttgggtagaggaattatattttttatttaaggttaggagtatgggaggtattaatgtttgtttagtatagaatagggtgttaagaagagaaaagttgacggggtgtatattcggattggaaattggaagggtgagaatagagggtaaaggatagagatggaattatgtgtatatattttgtgttattttggataagttatttatttttttggatttttgtttttttttatataatgggttttattattttttttatagttgatttgtatgaagaaggaggtggaggaggaggagaaggtgaagataatgttgatttaaagggtaaattatttttaggatttaagtttgaaaataattttaggttattagatatgaataatattttgattatgtagttgaaggaaattaaagatgaatggtttaattaaaaattaattagaatgaaaacgattgattattaatatatttgtaatggtttatttttttgagtggtagatttattaaggtttttgaatatttttgtgtgattgttttatgtatgtatgtatgtatgtatgtatgtatgtatttatttatttgttgtttaataaaatggattatatttttgttaataaaaatattatattggtagggtataattataattattaattgtgtttggaatttgtagtagtagttattagaggtattagtgttttttaagggtttataatttagaataatttaattatttgagttttttagggattgaggggtttggtaaggtgtagaatttttagtaataaagttaagaaagttttggataaattaaggtagttggttattttagtttataattaggtaaagagttttttttgtaatttgtgtaaggttttagaattatttttttttttattattaaaaattttttttaaatttttaagaaattatgaattaaatagttattttatgagataggagtttagtttaaaagaaatattataagaataaatataatttttgtttatgttaattatgtaatgaagtagagagaaaaagttagtggtttttttaggaggattgtagtgtgggaagaaataattaaattgggttttaattttggtttggttaggatttggagtaagtgagttaatttttttaagttttgagtagtttttttttttttttttttttttttttttttttttttttttttttttttttttttttttttttttttttttttttttttttttttttttttttttttttttttttttttttttttttttttttttttttttttttttttttttttttttttttttttttttttttttttttattttttttcgtcgttttcgttttcgttttttttttatttttaaagtgaaagtaagtttattaagaaagtaaaggaataaaagaatggttattttatagatagagtagtttgaattttgagtttttttataaagttattatgaatttatatttattttgaaagtgggtgttaatatgtttgtttattttgtatagttgttatgtggataaaaggagatttgtgtgaaagtgtaatatagagtttaaattataataggtaagtaatatagttgtttttttttttatggtgtttgtttttttttatttttttttgtttgtagggggattataaaattaattattaaagttaagaaggtaagagtaagtatgtatcgttgaaaatataagataattgtataagtaatgatttttagtgtagatttatagttaatttataaattgttggggtaaaaattattttggaaggttttgaattttagaaaggatttatagtaagttaattatgtagatttgagaggagagtagttttttgtagataatagttggattatatattatgttttgattttttttattatttaggagagtagaggtggttattttgatagtagtaagtttgggggttgtagtttggtgggtagaggtatttaggggtatagatgtttttaaatttgttttgttgttttagggagtttttaataagttgatggatttggttaaaattaatttggttatttggtaggattgggttagtgaggattaataaaaagaagatattagattatattttgggggtttgtattttttgtgttttttttttttttttgtattaaaatatttatttatgattgggaaagagtaattggagtttttgtagtattattttagtaaaaatttataaagtttggaaaataatattgtttatattgtgtggtgtgttttgtgatatttaggatttaagtgttggtcgaagttattaaatgtgagatgaagttattataaggtagtgtgtatatttgtttatttaaattggatgttaatattttataaatagtgtttgcgtgatataaatgtagttttaggaggtttaaatgaaaatgtttgtattgaaatttgttaaagtttttcgataaattagatttattagtaaggattgttttttgtaagggggatgaaatttgtggggtgagttatttgggttgaggaggagggaggttggagttgagaaatgtggagataatttttttttagaaggattgaatttttttgtttttttggggtgcggtagttagtaggatttaatggtgtatatgtttttttagttttttatttagtgatattatgttagtagtttgaaattattcgtggtgggagtattatgttatggaaattggtaaatggaaatttttattggagatttaattgttaaatttttattagtataatattgttttgtttttagagttaatgattttatttaagtttaatttatttgtttattgtttttaatacgatttttataaaatttttttgataatattatttttttatttagttttttaaaagataagtttttagtttatcgggttggttttaaaggttattttttttttggattttatttaattttttaaattattttttttatttttatttttaaatgttatttaaattttagttattttgaataataagatttttgaaaagtagattatgggttgggtatagtggtttatatttgtaattttagtattttgggaggttaagatgggtggattatttgaggtcgggagttcgagattagtttgattaatatagtgaaattttgtttttattaaaaatataaaattagttgggggtggtggtataagtttgtaattttagttatttaggaggttgaggtaggggaattgtttgaatttgggaggcggaggttgcggtgagtttagattgttttattgtattttagtttgggtaataagagcgaaattttattttaaaaaaataaataaataaataaagtagattatattagatatttttggtttaggttgtttatgattaatttttttgttgagaataattagaaaagttagataaaatatatttttaaaagatttttttggaggtattagagaatggttaaggttgtaaggaattgtttgagtttagagaggtggagtttagtattggtgttttttatttttggggatatgtgttggttttaaaaattttagttgagtttttgagtatttatggaatttggtgggggagatgaaatttgtattttaaattttgtttatagggagggtttttgataatttttatttaatttggaaatttgggttagtttttataggtattgaagtttttttttgaatgattttaagttttgttagggtagaggttatttgtttttgaaaggtttttggtttatttgtgtagtaggagtaaaagtgaattattttagggtatagataataattatttagagttttgaatgatttttattgtgtttaatatatagtatttagtagttagtaaaaaggatttaggtatatgtaagatgatttgtgtattagggagaaataggtaataaattgagatttagtagggatttgaattatggatttgaattaggggtagttttcgaaagaattatggagaatatatttagatttaaaatataagattggaatttttggtagagaattaataattgtataaaaaaggaattaaatggaaattttagaattgaaagatgtaattaatcgatgttgagaaatagttaatatttattgaatattttttatgtggatagttgtgttaaatattttataggtattaatataagatgtgtttttttatagtagtgtagtgttttttttaagatatggatagtttggtttttttatttttttgttttattaaaatttttttacgtggggtttagatatttttgttgtttttagtgtttagtagtatagggtttagtatatggaagttattagatataatttgatgattaggattttcgatgaaagttatgggtgttgattttgggaaggtattgttttttatgtgttatcggtttttaaagttttatttaggaagtagaattcggggggtgttgaggatttagaatcgagaataagattagttagagattttttgtgggtagaaattataaggacgttaattgtttgggtgagataagacgaaattaagagtggatttgtggttagaagcgtgaggaagagggagagagttttttttgttttttttttttttttttttaagttatagtgattgatagtttttttttttggagttagagtaggtttgagattggattgggaaaggagggtgggttaggatatagagtaggaaggttgggagtgtagggtaggagtaaggggttggggtatttattgtgtttgattttttttattttatttggggtaaagaagtatatgtaaaagttacggtgtgagtattttttaagtgttagggttagggtatgatttattacgtgtagtattttatttaatttttatagtaatcgatgatgtggttttttattattagttttattagataatgaaattgagattaagataggttttgtatattgtgtggggtaatgatatagggggatttagatttagattttataatttttgttttagggattatttttatttttattttgtgtatgtcgataaaggatagattgggtttattttttaggatatagcggggaaatgatatagagtagggaggttttaggagtttcgagcgttttttttttaggagaatattttttgaatttagattgggttagagaaatatttatttaggagtcgtagtgtgggcggggttttttatttgaaacgttgtttgaaggtagtggttaggatggaattttttattttattttggtaagttattttttttttgtaatttgtaaggatattgttgagagaattatggttttttaatttcggagggttgaagaaagataaataggagagaatttattatagttaggtgttagttgtttttttttttagagagtgtgagaataaagtgatatatttgattattagtaaatattttggaaattttaaacgttaatatttaatatattttggaagaggtaaataagtagataggtttatatatattattttttttagttagtttttataaaaataaataaatgaataaataaaatttttttttggtttttataggaagatattgttttttgaacgtgttttaaaaaggatgggtgatttatttaaggttatattgtttatgaggatagtataggaatatagatatgttattttgtttgaaaaaatttattatttagggaggtgatataattttgtagaaatgttttattttttttgaaggatatattttttaaatttttgggaaatttatttatagttttttttttttgaaggattaattttttggatataaagtgtttgattttgatttgttggttggaagatgtgttggttgagagaaagattttgatttgttggttgaaaatagatttattaagattaattgttgtagtagtaaatattttgatattttgtttgtatttttgtgttgtttttataagttgtattattttgagtgagttatttatatttttttgtttgtttttgttttggagatggagttttattttgttgtttaggttggagtgcggtggcgtgattttggtttattgcgatttttattttttgggtttaagtgatttttttgttttagtttttcgagtagttgggattataggtatatgttattatttttgttaatttttgtatttttagtagagacggagttttattatgttggttaggttggttttgaatttttgattttaggtgattcgtttattttagtttttttaagtgttgggattataggtgtgagttatcgtgtttagtttagttattatttttgaaatacgtttgagaaatagtgtttttttttgagggttaaggagatattttttttgtttatttgtttgtttttgtgaggattagttgaagggggtgatgtatattaatttgtttatttatttgtttttttttagagtgtgatgaatattagggtttaaagtttttgaagtatttgttaataaagttcggggttggaggttagaagatttggatttttttgtatatttttgttattagtaagttgtgtgattttggatagattttttttttgtttaaatttttttgagtttttttgaaaataatgttaggttgggataggatgattgttaagttttcgtttagttttaaaatattgtaacgtatgtttttgtattagtattgtttattttgtagattatgtagaaattttttttaatttttttttatttataaaataggagtatgtttattttttttttaatgttttaggtttcgggtttagaatattgtaagtaaggaagttaatgcgtattagagtttattatgggttagaagtttttttttttttttttatatttgtttttttttttttttttttttttttttttttttttttttttatttatttgtgaagaagatatgattatttttattttgagagtgaagagatagaggtttaattaatgaaatgatttgtttaaggttatacgggtggtataaggtaagtggtagaagttgaatttagatttatttttgtttaaatgttgagtttatgttatcgtttcgagattataattttaaagatgtaagatagtgggaaaagagttgattttaaagtattttttagaaggatttattttatattaggggttagtagatttaggttaaattcggtttatttttcgtttttgtaaagaaagttgtagtggaatatagttaggtttattgatttatggattgttaacgtttttttgtgaaatagatagttgagttgagtaatcgtggcgtataaaatttaaaatatttattatttcgttttttatagaatgtttgttaatttatggttcggagtttaaggttgtttattttttaaagaatataaagtgatatgagattgttttatgtgtagggagttttattattttattatgaaaaaacggtttttttgtttaaatttgttttttaaaaagttaataaatagattttgggtatttgttaggaatagtagggagtttggtttttattgtgtttttttttttaggaatttaatgaaggggaaatagaaattttaattttggggaaattgtataggggaaaaaggggagggaattagttataatattttattgcgatatttagtggggttgaaagtgataatagtaagggtttttttttttggaaatgcgaggagggtattttcgtttttcgtagtggggtagggtggtagacgtttagtttgggtgagtgattatttttttataaattataattttgggttcgtaatggtagtttattgttttgttgtagttatagaatggaaatttgtagaggttttcgtagttatttaattattttttttttttttttgttttatttaga

SEQ ID NO: 1006 - DNA, 14798 bp, Artificial Sequence
  chemically treated genomic DNA (Homo sapiens)
tttgaatggaataggaagaggaggagagtgattaggtgattgcggaggtttttgtagatttttattttgtgattgtagtaaggtagtggattgttattgcgggtttagagttgtggtttataaagaaatagttatttatttaagttaggcgtttgttattttgttttattgcgagaagcggaaatatttttttcgtatttttaaaaagagaaatttttgttgttgttatttttaattttattaagtgtcgtaatggagtgttgtaattgattttttttttttttttttttgtgtaatttttttaaaattaagatttttattttttttttattgagtttttgggaagaagagtataatggaaattaaattttttattgtttttgataggtatttagagtttgtttgttgattttttaaaaaatagatttgagtagaaaggtcgtttttttataataaaatgatagggttttttgtatatgggatagttttatgttattttgtgttttttgaaaaatggatagttttggatttcggattatagattggtaaatattttgtaaaggacgagatagtaaatattttaggttttgtgcgttacgattatttagtttagttgtttgttttataaaaggacgttggtaatttataaattaataagtttagttgtgttttattataattttttttgtaaaagcggggaatggatcggatttggtttgagtttgttgatttttgatgtaaagtgagtttttttgagaggtgttttgaaattaattttttttttattattttatatttttaaagttatggtttcgggacgatgatataaatttagtatttggataggaatgggtttaaatttaatttttgttatttgttttgtgttattcgtgtgattttgaataaattattttattagttgagtttttgtttttttatttttagaatgagggtgattatgttttttttataaatggatggaaggaaggaagggaaagagggagggagggagggaggaagtaggtgtaggaaggaagaggagaatttttggtttataatgggttttgatacgtattaatttttttatttataatattttagattcggggtttggaatattaggaaaaaggtaagtatgtttttattttatgggtaggaaaaagttgaagagaatttttgtatgatttataggatggatagtgttggtgtagaagtatacgttgtagtgttttagagttggacgggagtttggtaattattttgttttaatttggtattgtttttaagaagatttagaaagatttagataaaaaagggatttgtttaaggttatatagtttgttgatggtaaaagtatgtagagaaatttaggttttttgatttttagtttcgggttttattaataaatgttttagaaattttaaattttaatatttattatattttgggaagaggtaaataagtaggtaggttaatatatattattttttttagttagtttttataaaaataaataaataaataaaaaaaatgtttttttggtttttaaaggaagatattattttttaaacgtgttttaaaaatgatggttgggttgggtacggtggtttatatttgtaattttagtatttggggaggttgaggtgggcggattatttgaggttaggagtttaagattaatttgattaatatggtgaaatttcgtttttattgaaaatgtaaaaattagtagggatggtggtatgtgtttgtaattttagttattcgggaggttgaggtaggaggattatttgaatttaggagatggaggtcgtagtgagttaagattacgttatcgtattttagtttaggtaatagagtaagattttatttttaaaataaaaataaataaaaaagtatgaatgatttatttaaggtgatgtagtttgtgagggtagtataggaatatagataaaatgttaaaatatttattattatagtagttgattttgatgagtttatttttaattaataaattagaattttttttttaattaatatattttttaattaataaattagaattaaatattttgtgtttagagagttaattttttaaaggaggaagattatgaatgaattttttaaaggtttaaagaatgtattttttagaggaaatagaatatttttgtaaaattgtgttatttttttgggtgatggatttttttaggtaaaatggtatgtttgtatttttgtattgtttttataaatagtgtgattttgagtgagttatttattttttttgaaatacgtttaagaaatagtgtttttttatgagggttaaagaagaattttgtttatttatttgtttgtttttgtgaggattagttgaaggagatgatgtatatgaatttgtttatttatttgttttttttagagtgtgttgaatattagcgtttaaaatttttaaagtatttgttaataattaagtgtattattttatttttatattttttgaaagagaaggtagttagtatttgattatgataggtttttttttatttgtttttttttaatttttcggaattggaagattataatttttttaataatgtttttatagattgtagaagagaagtggtttgttaaggtagggtggagagttttattttggttattgtttttagatagcgttttaagtaaaaagtttcgtttatattgcggtttttgggtaaatgtttttttgatttagtttgaatttagagagtatttttttggagaaaagacgttcggggtttttggaatttttttgttttgtgttattttttcgttgtgttttgagaagtgggtttagtttgttttttgtcgatatgtatagggtgagggtgggggtggtttttggggtaggagttatggagtttaggtttgaatttttttgtgttattattttatataatgtgtagagtttgttttggttttagttttattatttgatagagttaataatagaaggttatattatcggttattataaggattgaatgaaatgttgtacgtgatgaattatgttttgattttggtatttgggaaatatttatatcgtggtttttgtatatgtttttttattttaggtaaagtgggagagattaggtataatgaatgttttagttttttgtttttgttttgtatttttagtttttttgttttgtattttgatttattttttttttttagtttagttttaagtttgttttgattttaaaggggggggttgttaattattgtggtttagggagaggaagaaaggggataagggaagtttttttttttttttttacgtttttggttataagtttatttttggtttcgttttattttatttaaatagttggcgtttttatgatttttgtttataggaaatttttgattaattttattttcggttttgggtttttagtatttttcgagttttgttttttggatgaagttttaaggatcgatagtatataaaagataatgtttttttagagttagtatttatggtttttatcggaggttttggttattaaattgtatttagtggtttttatgtgttgagttttgtgttattagatattagagataataggagtgtttaagttttacgtaaaggggttttgatgaagtagagagatagggaaattaggttgtttatgttttaggagggatattgtattgttgtaaggggatatattttatgttgatgtttgtaaagtgtttagtatagttgtttatatgggaagtgtttaatagatgttggttattttttaatatcggttaattgtattttttagttttaggatttttatttggttttttttttgtatagttgttagttttttgttaaaaattttaattttatgttttaaatttgagtatattttttatagttttttcgaaggttgtttttgatttaaatttatgatttaaatttttgttggattttaatttattgtttatttttttttgatatataggttattttgtatgtgtttaaattttttttattgattgttgaatattatatattaagtatagtagaggttatttaaggttttggatgattgttatttgtattttgagatggtttatttttgtttttgttgtataggtaggttaggagttttttaaaagtaggtaatttttattttagtaggatttgagattatttagaggagggttttagtatttgtgaaggttgatttagatttttaaattgggtggggattattagggattttttttgtaggtaggatttaaggtataaattttattttttttattaagttttatgaatgtttaaaaatttagttgaagtttttgaaattagtatatgtttttaggagtaaagggtattagtgttgggttttatttttttgggtttaggtagttttttatagttttggttattttttgatgtttttaaagagattttttggaaatatgttttgtttagtttttttagttatttttagtaggagagttggttataaataatttaggttagaggtatttgatgtaatttattttatttatttatttatttttttgagatggagtttcgtttttgttgtttaggttggagtgtagtggagtaatttaggtttatcgtaattttcgttttttaggtttaagtaatttttttgttttaattttttgagtagttgggattataggtttgtgttattatttttaattaattttgtatttttagtagagatagggttttattatgttagttaggttggtttcgaattttcgattttaggtgatttatttattttggttttttaaagtgttgggattataggtgtgagttattgtgtttagtttataatttattttttaaaagttttattatttaggatggttggagtttgagtagtatttagaggtaggggtaggaaaagtgatttgaaaagttgggtgaggtttagaggagaaatggtttttaaagttagttcgatgagttggaaatttattttttaaaaaattgaataaaagggtaatgttgttaggagagttttataaagatcgtgttggagatagtggatagatggattaaatttggatagggttattgattttgaaggtagggtagtgttgtgttggtaaaagtttaataattgaatttttaataaaagtttttatttgttaatttttatgatataatatttttattacggataattttaagttattgatatgatattattgaatggggagttggggagatatatatattattggattttgttggttgtcgtattttagagaggtagggagatttagtttttttaaagggaaattgtttttatattttttagttttaattttttttttttttagtttaaatggtttattttataagttttattttttttgtagaaaataatttttattgataaatttagtttgtcgggaagttttaataaattttagtataaatatttttatttgggttttttggaattgtatttgtgttacgtaagtattatttgtgaaatgttggtatttagtttgggtggatagatgtgtatattgttttgtaatggttttattttatatttagtggtttcggttaatatttgaattttgagtgttataggatatattatataatatgggtaatattgttttttaaattttgtaaatttttgttaagataatgttataaagattttagttgtttttttttagttatgggtaaatattttagtataaagaagagaaagaaatataagaaatataaatttttagggtataatttgatgttttttttttgttggtttttattgatttagttttgttaagtagttaagttaattttaattaaatttattaatttattagaagttttttaaggtagtaggataggtttggagatatttgtatttttgagtatttttatttattaagttgtagtttttaggtttgttgttattagggtgattatttttgtttttttggatgatgaaggggattaggatatggtatataatttaattgttatttataagaagttattttttttttagatttatatggttaatttattgtgaattttttttgaggtttagagttttttaagatgatttttgttttagtagtttatgggttagttatgaatttgtattgaaagttattatttatgtagttattttgtgtttttagcggtatatgtttgtttttgtttttttggttttgatgattagttttataatttttttgtagataggaggaaatggagaagaatagatattatggggaaggggataattgtgttgtttatttgttatagtttaggttttgtgttatatttttatatagatttttttttgtttatataatagttgtgtaaagtggatagatatattgatatttatttttaaaatgagtataaatttatagtgattttatagaagaatttaaggtttaggttattttgtttatggagtggttatttttttatttttttatttttttaataaatttgtttttattttgaaaataaaaagaagacgaagacgaagacgacgaagaagaataagaggaagaggaagaagaggaagaggaagaggaagaagaagaagaagaagaggaggaggaggaggaagaagaagaagaggaagaagaagaagaagaagaagaagaagaggagaaggaggaggaagaagaagaggagaagggggaggaagaagaagaagaagaagaagaaattatttaaggtttagaaagattaatttatttgttttagattttggttaggttaggattgaaatttagtttagttatttttttttatattatagtttttttaaagaggttattgattttttttttttgttttattgtatggttaatataagtaagaattatatttgtttttatggtgttttttttgggttgaatttttattttatagagtaattatttagtttataattttttgaaaatttggggaggatttttggtaataaggaaagaaatgattttaaaattttatataggttatagggaaagttttttatttggttatggattagagtgattaattattttggtttgtttaggatttttttgattttattattgaaagttttatattttgttaaattttttagtttttgaaaaatttagataattggattattttaaattatgaatttttaaagggtattggtatttttggtggttgttgttgtaaattttaggtatagttaatgattataattgtattttgttagtgtagtgtttttattagtagagatgtgatttattttattagataatagatagatagatatatgtatatatatatatatatatatatatatagagtaattatataggagtatttaaaaattttagtgagtttgttatttaggaaaataaattattgtagatatattagtaattaatcgtttttattttgattaatttttaattaaattatttatttttaattttttttaattatataattaagatgttgtttatatttagtagtttaaaattgtttttaaatttggattttaaaaataatttattttttgagttagtattgtttttatttttttttttttttttatttttttttttatataagttagttgtaagggaagtggtgggatttattgtgtagagagaagtagaggtttagagaaatgaatgatttgtttaaggtaatataaagtgtatgtatatggttttatttttattttttattttttgtttttatttttttagtttttagttcgagtatgtatttcgttaatttttttttttttggtattttgttttgtgttgggtaaatattgatattttttatatttttggttttagatggagaatgtggtttttttatttagggaatatggtgtttttattaagtttattgtatttttttttcgaatttaatttaatttaagttaatatatatttatttagtatttattgtgtgttagtttaaaatattttgggatgaattagttttaagtatagagatttatttttttataatgtattggtatttggttttaagagtggttttagtattttattttatatatttgaaaaatatataagattatgggttaatattgtagtataatttattagggattattgtatttattgggggataggggaggatttgttgttttcggaataattgtttgtggttgataaagtaatttttttttttatgattttattaagtttttgtgtttttatagtatagtgtagtggtttgaagatagaatgtttgtagttaatttattttttttttttatattagttgtttggttatgggtaaattatttaatttttttatatttatttttttttttgaaaatgtgagtaataatagtttttttttatagggttattgagagggtttagtgggataaattatgtaaagttttagcgcggtttttagtttgtaacgtgtttatgatttattaagagttgatatttttattgtgtttattataagttaagagttgtttagttttttttagatttttttttaatatttagaaaggagtgtaaggaaagtaagatttagaaaggagaatggtttgtttattagaggtttattttattttattttatttatttttatatatttttttttagagagagcgtttttttttattgtttagattggagtgtagtggtgtgatttttatttattgtaatttttatttttcgggttttagtaatttttttgttttagttatttaagtagttaagattgtagatatgtattattatgtttagttaatttttgtatttttaatagagatagggttttattatgttggttaggtaggttttgaatttttgattttaagagatttatttattttggttttttaaaatgttgggattataggtgtgagttattacgtttagttttaggggttaattttaaattagaaatttaaaattagagtttatatattaatgattttgagagtttttttttttgttttatataaattttaatcggaggttgtaaattggtagtttataatttaaatattttatttgtttgttttattgtttggtttaattagaatattatatataatgaaattagaatatcggatttttttggaaaagcgagaagttttggttatttgagtttgtatttttttgtgataattggtggaattgatttgtgttaagtttttaattttttatagtttttatttttttttattaattaatttttagattttgtggtttagtgttatattttattagtattttttattgagtttatattgtttttttttttatttaatagggttattttattaatttttttattttattaatagtggaaaatgatttttatattttaaggattttatgatttttgttatagtagttatatttttttgtttatttgttgttttagtaggtattaggtttgtagtttttgttttagagtgtttgtatggttttttatggatgttttttcgtgtttagattttttagataggtttggagttttatgcgtttgatatttttttggacgtttgtttattagagtttgaaagtatttgataaatattaattgtagatattttttttttttattttttaggtgaaaaaatgagagtggaaggagtttatttaaagttatggggagggttttataggataggaggttttttgaggttttttagattttaatttaattgagttgttgtttataaagtagtattcgggtagtatttgggttatagttttttttagggtggagttgtttttttttttagagtattttagagagtataaggaggagtttagtttttttttttatatatttatagagggttggttagtatgaggagatgggtcggttgatggttgatttgatgttaagtaggtttagtttttaggagggtgatttaggttagtagaaattaaattggtttttatttgcgtaagatgggaggttatatgtagagaattgagttgggttttcgtgtttattttaatttcgattgtcgttagtttatgtatgtgtgtatatatttatttaaaatatatgtgttggtttaattttgtgtgttaggtatttttttaggtattgggaataagttagataaggtttttaacgttttaataaaggaaaatagataagaaataagttagtaaataaaataattttatagggtatattgttatagggaaaatttaaagtaggatatgtttttgagggatttaggagtgggtggttattttagggaaagtggttagggaagttttttttgagagggtgatataagagtggagatttgagtaatgttaaggaaggggaagaatattttaggtggagggaatagtaagggtaaaggttttgtttgagtattacgtggaagttatgttttagggaataatagggtttatttcgtttttagttatttttatgttttatatttggtttttgtcgtgatattgtttataaggttagatattttttttttgttttttttagaagtatttgatgttttgaatattttttttttttttgtcgttgggagcgaatttgtttgtagttttatgtttttgtattttgttattagggagtagataatttataaatgtttaaagttatttaagttgatggggagtagtggtaagagatttttgggtaggacgaagtttcgggtttagtttttaggtttgtagttaattagttgtgtgtgtgtgggtatattatttttgttttttagattttattttgatagttgtaaaatggatttgatgttatttgtttttattttagatttagggtttatcggaagtatgaatgatacgtagtatataaaatgttttgtaaattatatgtatttatataggtttttgttgtaggtaatgtttttatatatatatgaaatagagaggaaggagtagattagtttattggttgttattaattttgttatttataatttgttttttttgatagggaagaatttttttatttgtagaagggtttataatttataaattttttaatagggatttggtaagggtttttaattttttttaattttgtagatttggatttatttttagggtttttttatttaatttatagggtttgaatgggggtgggaggggtagggagtcggttataggaaagttttttatttttcgtttcgtttgggtgttttcgatcgtaggattttttatggggtttttattttttgtttttttcgtttggtttattaagatgtaatgttaaggtgtgtaaggtttggttggaaattttcgaagtagtttttgtagagaaatttttgttgattaaagaattagaaattagatttgtaaatttggaaatttcgtaaatgttaattttgtaaatttagaaagttgggtattggggtagtttgggaatttgttaggatagtttgatgtgttattatggtgttgtatttttttgttatgataataggaggaggatatattaaggtgggttttggtggttagaggtttaaattttagtattatgaattatagttgtgggattttgggttatatttataaaatgagagtaagataagatttttgtttattttataaggtgtttgtgaagattgggttaataattgtaaagtgtttggtatgtggttggtattatttaagtattagttattattattagaggaaatagattggattttttttttggggagttaggggtttagttgggttatgagagagaaaattaggtttttagttagggttaggggattataagttaattagtatataaggttgggtatttttaggtggttttaatattgggatatcgagggtaaaggataatttatagggtatttgtagtattttagtgtttagttagaatttttttttgtaagtttgtttttttttttttttaggttatgaagttttgatggattagtggtttagtttagggtatttagtgtatttgagaagtttggagtttaatattttagagatggagaacgttgggagtagtgggagagttggtatttgggaatcgtggaattttgagtgattggagatttttgattatggtgaagggcgttttgaagaattttgaggatttataattttaatgatggtgattggttatttgttttggtattaatttgttagtttgtggtataggaaagaaggaggtaggggaagggtagaaggaaagggaggtattaggaatggaggagtaagatattgaggtttaatgttattagaattttttttttgaattgagatagttataggtgaagttttttagtaggagagattttaaggtttttaaaggaatttttattatgggaatggaaatttagattatatataagtaggggggttttggatgtcgtgagaagattgagagtttgggtgaatttttttattttagttaggggagaggtcgattttgtttttttttagtttagatatataaggttagagtaagggatttgaggtttgaaaatatatgggattagttttataattttgatgattgtaaatttttgagttgtttgttaatttgtttatttacgatcgtagttgtttacggttatagataagtttttaagtttttgtagagtttttaagaatttgtttagtttgtttagtttttagatttagtttgtgaaatagttttttttgttttttgaattttttttggtttttaaatttattttttttttttattttaggattttgatataggtatggaatattttttttttttttgttttattgattagttatttatttttattttttaagattttagtttagattttgtatttatgtgatttttcgtgtaatatttgttttttagggtaggttatagtaagtatcgtgtttattttgtttatttttatatttttagtttatagtttaggatttggtttatagaaaaataaatgggaaattattatttatatttttatttttttttttttttttatatatatatataaaatataggatatatatatatttatatacggatttatatattattataaataaatgagatatttgattttaattttgtaagtggttatatattgaaatttttaagttatattaaatgtggttaagatatatagattttttttaatttgtaatttatttttttgggagttatttttatcgttattattataatttatagatttagttgattatatatgtatttgattttgtttttaggttatggtttattggatttaacggtgggtagttgttttaaattaagttagtattaggaataagaaattgggattagagtttataggggcgaggtatttggtaattgtttttaaattgaggatttttgaatttataagttttagggtggttattttttgtaggtgtatagagaagtagagaagattattttgttgagagagaagaataagtaaatagatagaggtaggaatgataatattatggttttttgatagagaaataattattattgttttaattttttataatttttttatttttagttattgttttttataacgtttggttgtattttttgttattgtgttatattttataaattttttattatagttaaaattagtttaagtatgtttgatttttgtaattaaagttttatttaaataattttataagagttaataagtaatttataagggaattgaggagttaatataaataaatagagggaattaatttagtaaggtatatattgaagaatttttgattatattggtatggtgtatttatagttataaagtttatagatatgagttcgtgggtttagtaatgtatgtgtgaggttttgtttgtttagtatttagttttatgttgttgagtagttttttttttttttagtttaattatttttaaattattttattgaggtacgattgatatataaaaagttgtatatatttaatatttatattttaattagtttggggataagtatatttttatgaaattattattattattaaggttaataatatatttattattttttgaagtgtttttttgttttttaattattattattattattattattggtaagaatatataagatatatttttttagtaattttaagtatataatatagtattgttatttataggtattatgtgatatattaatagtaaatttttagaatttatttattttgtataattgaaattttgtattttttaattattatttttttatttttattttttttttgtttttgataattagtagtttatttttttttttaagtttgattattttagattttatatataagtgagtttttgtaagaaatgtttttttgtgtttgttttattttatttagtataattttttttaggtttatttatgttgttataaatgttaggatttttttttttttaaggttgaataatattttagtgtatgtatatattataatttttttatttatttatttattagttgatatttaggttttttttatattttggttatgtgaatagtgttgtaaattttaattagtttattttatttttagttatagtacgtcgggtacgtgatttaatttagatcgatacgaatttttttgatattatttaagttgaaattgaagggaagaggtgtagtttttattttttttgtgttgtaaaagataaggtggtagagtcgttagttagttagattaaggtggggttatgttatttgtaataataataaataattataataaaagagttttttttgt

SEQ ID NO: 1007 - DNA, 5185 bp, Artificial Sequence
  chemically treated genomic DNA (Homo sapiens)
ttttgtgacgtttttttttagaagagtagtttaattaaaaatagtaataatataattaaaataagtataggtatgaaaatgtatattaatattttattatttaaattttttatatttttataaaaagaagaatttttttttatattatgttaaaaatgaaagaaataaggaatggagaggatagattgaagaaaagattttttttttttataaggagatgttttattaattttatatattttttttagaattttttgttttggtgggtttgttatgaacgaaaattaatggttttgtgatatttggaggttatttgatatatttattttaaataatttgtttattttgttttaatgattattatttgttatttaagttcgagaaagttgtaattttaattgaagttattagttgtgtgatttaggattagttatttttttgtgtattttttttatttatttatgagatagttattacggtaattattttatagggttattatgaggattaaatgaatttataaatgtaaaatttttaatattagtgtttaatatattatagatatttattaaatagtaattaatattattttattataataattatattttatattgtatggtagttattatatattttgttttttagattatgaattttttgaaagttagataattatttttaatttttatttttattattaagtgggtatattttagattttaaagtttagagtatttgtaagaggaaaaaggaaaggagtttttattttttatttttaggtttgtaggttaggatttgataagttttatgtttatttagtatttattgtttttttaagataggaaaaaggttttgtatatttgtgtgtttgcgtgaagtaaaaggattagattagggaaaataggtttatttaaaagataaaaatttattaatagttagatatagtgtgtggtttaatagttgtaagaattgatgaagagagggtaatgagggattagttttatagtagtgattttttaatatgggaagaggtttttgtttttttttttagtttttgtgtatatttttaacgaataagaggatagaattttaagttaaggatggtaaataatatagattgttattatttttaggaaaataggtgataatttgtgagaaagaatatgtatagtaaaagtcgtagatttaaatttaaattgtttaattaatgatagattagattaagaaaattggttatataatatttatggaatatttgtcgtttataaaaaaagaatgagtttatgttttttgtaggattatggatgaagttggaaattattatttttagtaaattatcgtaaggataaaaaattaaatatcgtatgtttttatttataggtggtaattgattaatgagaatatatggttataggaaggggaatattacgtattggggtttgttgtggggtggggggagtggggagggatagtattaggagatatatttaatgttaaatgacgatttaatgggtgtagtatattaatatggtatatgtatatatatgtaataaatttatacgttgtgtatatgtattttaaaatttaaagtataattaaaataaataaataaagtaaaaaagaaattttaaggatatttaaattgttgtttaggtgaagatggatgatgttttttttgaattattagttattatcgatagagtgaagtgagatggaatagtgggtataattttatttattttattttatgtagtttaatgggtttagaatttattattattattttatattggaaaaaagatgagattatgaggggttagggaggttttgagtttttgttttaattttattattaattaagaatgtgattttgggtaagttattttaatttttgtaaatgttaaattttttattagtaaaatgtgattatataagataataaatttgaaaatattttgtaaaattgaaagtattatggaaataattttttaattttaaaaggttatgaatattattaaaatttgttatatggaagagtatatattatagagatataattgtgattataaatagatttataaaagtggtgttttattatggagggttatagggttgataaagataaatgtattattaagttatgttcgagtttatttagatttttataggaaatatagagtttttagttgaattatttttggatggtgtggaaattgtttaatacgtttttaattttaaagaaatagaattgaattttgaaaatttaagaggtttttatagaaattgataagagatgaattaatataggtattaagttatagattaaattaaagttttataaaattttgaaagagggttagaaagaagaaatttatgggaagtagagttttggaaagttagttttgatggagtgataatatgtgtaatatagtgagtaattttttaggtaggtagttttagggatgggggttgttttttgaaaggatttgggttatttttgagtttaagaggttaagttataaataatgttaagtaattaaaaatagttttttgtttaatagtaaaattttgtatagtaaaaggagaagtagggggtatgatatacgtggtagttagtagtttattagtgattttattgttataattagaaaagttagttgatgtgttagacgtgagaaagcgaaagtatgttatagcgaatgtagtttttttatacgtattttaagaaagaaatgaaaaagttaatttttataatggtgtttattgtgtattaatagagataaattaggggtttaagaatttagttttttatagggttttagaagtatagttatatattgttttattttttaatggaaatagttagagaaatagaaatattaagattggagaatattaaatattttattggaaaagtttttatataggaaaatgtgtgggtttgaatttttttattttggaagggtaaaggtttgagtgatgatgttgggattagatattgaaattttttagagaagtaaaataagtataataaagttgtattttattatattaaataaataatatatagattattaaatagtttgttttttataatagcgttaatgtgattttgatttgaaatgtatagagatattttgtattttttcgtataaaaagtttatgagatttggttttaatttgattttttttttatttttttttttatttgagggattataatttttatttttaaatttgttttatatttttcgaatattatttaacgtatagaaaatttttattgaattatttttttttgttttttgtaaaatattatatttgattgttttttagattgttttaattatttttgtttatgtattttttttaaaatttagtttaaattaattgttttttatttaagattttttatatttattttttttggggtagtaattatttattatttaggattatatttgtgtatgtatatattttttttattataaattaggttttttgaaaaaatataaatggtaagagagtggatttttggagttagaatattttttttttaaattttttttttgttttttattggtaataagggttgagtgatttagagtaaattatttaatttttttgagttttagttttttaatttgtaaaataggagttattattttataagtttgtaagatttatattagattaagtgtttgtttgtatattgtttttttttttttttttttatatatttgaaggtattataggtgttagatgtttgtttaaagattagataatattgttttaaaaaaataaataaaaatatagataatattatttttaaaaaaaaaaaaaaagtttaggtaagaaataaataaggttatagaatggaagttttataaggattttttttgagataggatttttttaagtgtttttaggttaaattagaagtatatattcgtataattgtttagttagtttgtgtattgtattgaggatgaatgaatatttattttaaatattttagttttttgattaaaaataagattatattttataacgattattgttatatttatagtgttttaggtgatttagaggataaataaaaatttattaaagaggtaaagatataaaaacgagaaatatggattggtttatatataatatatataaagtttattataaaattagtattagtatttttgaatgtaaatttttttttgagtatttaataatcgtattttttaaaaaatgtataatagatattaagagatttaaatagatatataattattttaaattaaaatagcgttaaatagtattttaagtttaataagtattttaagtattttaattttagtatttttttagttgatatgtaagaagtaatttattttattgtatgtaattagtttattgtgtggataaaaaggtaaaattattttgaaataggaaattaatatattttttgttttattaataaatttaaatatttattttttttatttgtttatttttgtttttgtttattataatatgttatttatatgtttagtgtagttttatgataaagaaaattttttgagttatttttgtatttttatttttttaaagaaaggaggaaaaattgttttatatagaaggcgttaattgtatgaattagagttattatttaagtgtgggttaatgtaataaagagggattttatttatatttatttagttagtttttgggggtttaaagaaattttaaagagttattagaagaggaaaaatgaaggtaatgtttttttagataggtaaagtttttgaaaatatgtgtaatatgtaaaatattttgatatttttataatatttttttagaattaatagtataaattgtattttttgtttaagagttttttattattttttttaattattatttatagtaattttaatttttgttataatgtataggatgtaatttttgttttgtattgtattaagttttgtatttgttataaatagtgtatttattttaagttttataaagaaaatatagttataattggagtatttattgttggatttatagatgattttgaatggaattaatgtaagtatatttttttttttattaaaattattatatttagtaatttagttggagattattttttaataataatgtattatatttttttaga

SEQ ID NO: 1008 - DNA, 5185 bp, Artificial Sequence
  chemically treated genomic DNA (Homo sapiens)
tttaagaaagtataatgtattgttattaagaaatgatttttagttagattattaaatgtaataattttagtaagaaaggaaatatatttatattaattttatttaaaattatttgtaaatttagtagtaaatgttttagttgtagttgtgttttttttgtagaatttgaagtaggtgtattgtttgtgataagtgtaagatttagtgtaatgtaagataggagttgtattttgtatattgtggtaggagttgaggttattgtgagtagtgattaaagagagtgatagggaatttttgaataagagatgtaatttatattgttaattttggaaaaatattatgggggtgttaaaatgttttatatattatatatatttttaaagattttatttgtttgaaaaaatattatttttatttttttttttttgatgattttttggaatttttttaaatttttaaagattgattgaatggatgtaggtgaaatttttttttgttatattagtttatatttaggtgatagttttaatttatgtaattaacgttttttgtatgaaatagtttttttttttttttttaagggggtggggatataaaagtaatttagaaaattttttttgttataaaattatattgaatatgtgaatagtatattgtggtggataagagtaagagtaaatagatgaaaagaataaatgtttagatttgttgataaaataggaagtgtattggttttttgttttagaatggttttatttttttatttatataatgagttaattgtatataataagatagattgttttttatatgttagttagagaaatattaagattagaatatttaaaatgtttattgagtttgaggtattgtttaacgttattttaatttaaaatgattatatatttgtttaagttttttaatgtttattgtatattttttaaagggtgcgattgttaaatatttagaaaaaggtttgtatttaaggatattgatgttagttttataatagattttgtatgtgttatgtgtaaattagtttatgtttttcgtttttatgtttttatttttttaatggatttttatttattttttaaattatttgggatattatgaatgtaataataatcgttatgaaatatgattttgtttttagttagaagattaggatatttaggataggtgtttatttatttttagtatagtgtataaattggttgaataattgtacggatatatatttttaatttaatttggggatatttgaggagattttgttttagagagagtttttgtaaagtttttattttatggttttatttattttttatttggattttttttttttttttaaagatggtattgtttgtgtttttgtttgtttttttaagataatattgtttggtttttaaatagatatttagtatttataatgtttttaggtatatagaaagagagaaaagagaatagtgtataggtaggtatttagtttaatataagttttatagatttgtgaagtgatggtttttattttgtagattagaaaattgaggtttagagaagttaagtaatttgttttaggttatttagtttttattgttagtaaggggtagaagaaggatttgaaaagagaatgttttgattttaaaaatttatttttttattatttgtatttttttaaagaatttgatttgtaatagggaagatatgtatatatataagtgtagttttgggtgataggtgattgttgttttaagggaggtggatataaggaattttgaataaggaataattaatttaaattggattttgaggagggtgtataggtaggaatgattaaagtagtttaaggaatagttaaatgtaatattttataaagaatagagaaaaatggtttaataagagttttttatgcgttaggtaatgttcggagaatataaaataaatttaaaaataaagattatagttttttaagtagaaaaaaaaatgaagaaaaggttagattagggttaaattttatgaattttttatacgaaaaaatgtaaaatgtttttatatattttagattaaaattatattaacgttgttataaggggtaggttatttggtagtttgtgtgttatttatttaatataataaagtatagttttattatatttgttttgtttttttaaagagttttagtgtttaattttagtattattatttaggtttttatttttttagaatggaagaatttaagtttatatatttttttatgtgggggtttttttaatgaggtatttgatgttttttagttttgatatttttatttttttggttatttttattagagaatggggtaatatatggttatatttttgggattttgtagaaaattgagtttttagatttttagtttatttttgttaatgtatagtaggtattattatagaagttggtttttttattttttttttgaaatacgtgtggaaaagttatattcgttgtgatatattttcgtttttttacgtttgatatattagttggtttttttggttgtggtagtaaagttattagtagattgttaattattacgtgtgttatattttttgtttttttttttattatgtagaattttattattaaataagaagttatttttagttgtttagtattgtttgtgatttagttttttagatttaagagtggtttaagtttttttaaagggtaatttttatttttgaagttgtttatttaagagattgtttattgtgttgtatatattgttattttattaaagttgattttttaggattttgttttttataagttttttttttttgatttttttttaaagttttgtaaaattttaatttggtttgtagtttgatatttatattaatttattttttgttagtttttgtaaaggttttttgggtttttaagatttagttttgtttttttgaaattaggaacgtgttggataatttttatattatttagagataatttagttagaagttttgtgttttttgtaaaaatttgaatgagttcggatatagtttggtgatgtatttgtttttattagttttatggttttttataatgaaatattatttttgtaaatttgtttatgattatagttatgtttttgtggtgtgtgtttttttatgtggtaaattttaataatgtttataattttttgggattgaagaattatttttatggtatttttaattttgtaaagtatttttaaatttattgttttgtatagttatattttattgataagaaatttgatatttatagaggttaaagtggtttatttaagattatatttttaattagtggtgaagttagagtaaaaatttaaagtttttttgattttttataattttattttttttttagtgtaaaatagtgataataaattttggatttattaggttatatagagtaggatgaatgagattgtgtttattattttattttattttattttgtcggtggtagttgatgatttaaggaaggtattatttatttttatttaaataataatttgagtatttttaggattttttttttattttatttatttattttaattatattttaagttttagagtatatgtgtataacgtgtgggtttgttatatatgtatatatgtgttatgttggtgtgttgtatttattaaatcgttatttaatattaggtatgttttttaatgttatttttttttattttttttattttataataggttttagtgcgtgatgtttttttttttgtgattatgtgtttttattggttagttattatttatgagtgagaatatgcggtgtttggttttttatttttgcgatagtttgttgagaatgatggtttttagttttatttatggttttataaagggtatgaatttattttttttttatgggcggtaagtattttataggtgttatgtggttaatttttttaatttagtttattattggttgggtaatttgggtttgggtttacggtttttgttatatatatttttttttatagattattatttgtttttttgaaagtaatagtaatttatattatttgttatttttgatttaggattttatttttttattcgttaaaaatgtatatagaagttgaaaggaaagataagaatttttttttatattaagagattattgttgtaggattgattttttattgttttttttttattagtttttataattgttaggttatatattatatttaattattggtggatttttgttttttgaatgggtttattttttttggtttggtttttttattttacgtaagtatataaatgtgtaaggttttttttttgttttagaaagataatggatgttgaataggtatggaatttgttaaattttaatttgtaggtttgaaaatggaaaataaaggttttttttttttttttttttataaatattttaaattttaaagtttgaagtgtgtttatttggtagtaaaagtaaaaattaagaataattgtttagtttttaggagatttataatttaaaaggtaaaatatataataattattatataatgtgaaatatgattgttataataaaataatattagttattatttagtgagtatttatggtgtgttaggtattgatgttaagaattttatatttatgaatttatttaatttttatgataattttataagataattatcgtaatgattattttatagatgagtaaaaaaggtatatagagaagtaattggttttaggttatataattagtaattttaattgaagttgtagttttttcgggtttgagtgataaataatggttattaaaataaaataaataaattatttgaaatgaatgtgttaaatgatttttaagtattataaagttattggttttcgtttatgataagtttattaaagtaaagaattttaaaaaagatgtatgaaattgataaaatatttttttataggaaaaaaaaattttttttttaatttgttttttttattttttgttttttttatttttagtatagtatagaaaaaaatttttttttttgtagaagtgtgaaaggtttggatgataaagtgttaatgtatatttttatatttatgtttattttaattatgttgttattatttttaattgggttatttttttaaagaagaacgttataaaa

SEQ ID NO: 1009 - DNA, 6123 bp, Artificial Sequence
  chemically treated genomic DNA (Homo sapiens)
  unsure 3013..3014: n is a or g or c or t
attattttttgtatatatatattttaaagaattgaaagtaaggttttaaagagatgtttgtagatttatgttcgtagtagtattattgataatagttagaaggtagagtaatttatgtgtttattaatagatgaatggatatataaaatgtgattaaatatatagaatattatttcgtttttaaaaagatggaaattttgatttatgttataacgtggatgagtcgtgagtatttgatgttaagtgaaataggttaggtataaatagataaatgtaagattttatttatatgagttttttagaatagttagatttagagatagaaagaatggtggttgttaggagttggggattgtgaagaatgagagttattgtttaatgggtgtagagttttagttttgtaggatgaaaaagttttagagatggttggtggtgatggttgtataatattgaatatatttaatattattgagttgtatatttaaaaatgttgaagatggtaaattataagtgtatttattataattaaaaatgtttatattagaaattaaaggttattttgggtaatatagtgaaattttgtttttataaaattaaaaattaaaaaattagttaggtatggtggtatttttttgtaattttatttattcgggaggttgaggtgggaggatcgtttgagtttaggaattttagataatagtaagttttgatggtattattgtattttagtttgggtgataaagcgagattttttttttttttatatatatatatatatgtgtgtgtgtgtatatatatgtgtgtgtgtatatatatatgtgtgtgtatatatatatatatgtgtgtatatatatatatatgtgtgtatatatttatgatttaaggatatgataaaatgaaataaaataattttttaaattttttataaagattattgggaataggatattttatttatattttgtgagtgattgtaaaggatttttttatagataattttttagttataaatgggaaaagttatttttataaatgatttaaataaatgggatttttatattgttggtaaagagttattttattattgttttaggtagggggaatttgtagaggttttgagtcgtaagttttgagtgtttgagtaatagaaagaagaggttaaatgaggttaggcgtcgtggtttatatttgtaattttagtattttgggaggataaggtaggtgaattatttaggttatagaaggttaagattagtttgtttaatatggtgaaatttcgtttttattaaaaatataaaaagtagttgggtatggtggtaggtatttgtagttttagttattcgggagtttgaggtaggagaattgtttgaattcgagaagcggaggttgtagtgagttaagattatattattttattttagtttgggttttaagagtgaaattttattttaaaaaaataaaaaaataaattaaaaaaatttaaaaaaaggttaaatgtattaaggttgggagatgattggagaagtgatttgttattttttttttaattttttattttgacgtaattttaaatttaaaaaatttttaagtagtataaagaatttttatatatttttattagttattaatattttattatatttattatatttgttttattttttttttttttttttttttttttgagatagagttttgtttttgtcgtttaggttggaatgtaatggcgagattttagtttattgtagtttttatttttcgggtttaagtaatttttttgttttagttttttgagtagttgggattataggtgcgtgttattatgtttagttaatttttttgtatttttagtatatagtgttttattgtgtttgttaggttggtttcgaatttttgattttaggttatttgtttgttttagttttttaaagtgttgggattataggcgtgagttatcgtatttaggaaattgttgattttgtaataggttaaaagggaattttttatttttttttgttttttggattttaggtagagagggtgggagtaattatagttttcgttttattttaggtttttattattgatttttgaatggtttttttttgtatttgtttgtttaatataatagataattatgattttattagttaattgatattttaattattgatattaagtgatatgtatttgtatatttttttattttttgtttttgtttttttttaaatggaagtaattattattttgaattttgtaaaaatatatagttttattatgtatatatttttaaaaagtattgtttagttttagttgttttaattttattttaaaaagtatcgtaggtcgggtatggtagtttatgtttgtaattttagtattttgagaggtttaggcgggaggattgtttgagtttaggagtttaagattagtttgggtaagatggtaagatttcgtttttattaaaaaaaaaaataatagttaggtatggtggtatatatttaaagttatagtaattggggaggttgaggtggggggattgtttgagtttggtaggttaaagttgtagtgagttattgtattttagtttaggtgataattcgagattttgttttaataagtaaataaataaaaagtattttattatatgtaatgattttgatgtttttggtttttggttttttggtgttttgttttttttttttttttttagacggagttttatttttgttgtttaggttggagtgtaatggtgtaatttcggtttatcgtaatttttttttttcgggtttaagcgatttttttgttttagtttttcgggtaattgggattataggtatgtattattatatttagttaatttttttgtatttttagtagagacgggttttttgatagttggttttaaattttttattttaggtgattttttcgttttagttttttaaagtgttgggattataggtgtgagttattatgtttggtgtttttttttgttttttttaattaaganntagagtttcgttttgttatttaggttggagtgtagggtagtttgtattgtattacgaattcggttcggtatttttattttgtaattttagtattttgggaggtcgaggtgggtgaatcgtttaagttaggagttcgagattagtttgattaatatggtgaaatttcgtttttattaaaaatataaaaattagttggatgtggtgacgcgtgtttgtaattttagttatttaggaggttgacgtaggagaattatttgaatttgggaggtagaggttgtagtgagttaagattgtgttattgcgttttaaaaaaaaaaaaaaaaagatattaatataaatttaaatattttataatgataatttatattaattatttaaagtataagttattttttaggagaggtagtaagtgtattttatttttatgtttaagaagaaaggagcgtgattttggtgggagtattaggagtttttattggagtatttgttcgtagagtgagaaacgtttttagagaggaagttatatttgttgtggaatttaagagaattttgttatattttgataagttttttgagatggaagttttattttgtcgtttaggttggagtgtagtggcgtaattttagtttattgtagtttgtattttttcggttttagttatttttttgttttagttttttgagtaattgggattataggcgttcgttattacgtttggttaatttttgtatttttagtagaaatggggttttattatgttggttagattggttttaaattttcgattttaggtgatttgtttgttttagttttttaaagtgttggaattataggcgtgtgttattgcgtttggttaattttttttttttttttttttttttttttttttagaaaagacggtggttttattatgttatttaggttggttttaaatttttgattttaggtgatttatttattttggtttattaaagtgttcggattataggtatgagttattaggtttagttaacgtgatgtgttttggaattttgaattttttggtttgttcggagggttttttttttgttaatatttttgtttgttttttagtatttaaaaaattgtgttttgttttaattatgtaatggttttaagttttagataaatttttagggagtaaaatatatttaattattttataataattagaagagagttttgattaataaataagtaagattgaattttataaaataatttaaagtttaaaattaaagtttattttttgtatgattttttaagagaaagaaatttggaagtaaaatattttataaaatgataatgtatttttaggagtttagggtattgtggtgaaatgatgatggttagtataggttataagttttggggaattatttatgaatttttaggattttttagttcgtcgtatttttttttattatttgaatattggaggttgtttgattagaattttgttaggattttgtttttttattttaggtggtttcggttgatttttgaggacgttatagttttgaggggaggatttagtttatgaagtgttgggtgagattattgttaagaagtgtttgtttattttatttttaacggtaggggaatttttttttttttttatgggcgtagttgaagaaaggatttataaatgaagtttaattttttttattaattttagtttatatttttagtaattgaatttgaaaaaaaaaatttggtttgaaaaattatcgtaaattatattgttattaaaaaaaaaaaaaaaaaaaaatattttttatatttgagatgagagaagagagtgttaggtagttttttggttgaatacgttagtttaatatttaaagagagtaatttttgatttcgatagagattggatggatttataagggtgatagtttaggcggatcgatttttttattttatatttttcggcgcgatgttaaaaagaggttgacggtaattgggttttttgtagagaaagattttcgttttattgtttcggttggttttaagggttaggaagatggatttatatttgttgatgtggggattgtttacgtttattatggtgtttggttgttaggtaggtaagggtttgtgggtgttttcggaatttcgggaaggttgatgggtatttttttttttagttatagaattagagggagtttttaggtagatggttttaagaagggagttgaattttgggttttattttttgtttgtgatttacggggattttagtttatgttttattgttttttggtttgttaagagagtttgaaatagtattaggtttttttgttttttttagtttttgataattaattttgggaagaatagtgtggtatgatatttgggatatttggatgttaatagggtttcgatgagtaggttttttaagaaattattttttattttttaatgaatttttttttattttttgtatttttattttttaattaagaagttattaggaagttttttaagtttaggttaatttgttggagatatgagtatttatatattaaatattgggagaatttaagattttagaaaagtttagttttaaggatgtatatattgtttttacgttttaggaaataatatttaggaatttttttataagtgtaattttatagaaatttttaaaaatatgtatatttatttttagaatattattattttttataattttatgtatatatatgatatgtatatgtatacgtgtttatatatgtaaattttaaattttattttttgttttaaatggattttttcgaagattttttttttttgatattgtttttgttagttagattggagtgtagtggcgcgatattggtttattgtaattttcgttttttaggtttagcgatttttttattttagttttttgagtagttgggattataggtatacgttattatatttggttaatttatttttttgtagagatggggtttttgttatgttgtttaagttggttttgaatttttgggtttaagtgatttatttattttggttttttatattgttggtattataggtatgaattatcgtgtttggttaatatttttttttaaagaa

SEQ ID NO: 1010 - DNA, 6123 bp, Artificial Sequence
  chemically treated genomic DNA (Homo sapiens)
  unsure 3110..3111: n is a or g or c or t
ttttttaaaaaaaaatattggttaggtacggtggtttatgtttgtagtattagtagtatgggaggttagggtgagtggattatttgagtttaggagtttaagattagtttgggtaatatggtaaaaattttatttttataaaaaaataaattaattaggtgtggtggcgtatgtttgtagttttagttatttaggaggttgaggtgggaggatcgttaagtttgggaggcgaaggttgtagtaagttaatatcgcgttattgtattttagtttggttgatagagatagtgttaaaaaaaaaaaattttcgagaaaatttatttgaaataaggaatgaaatttaaaatttgtatatataaatacgtatatatatatatattatgtatatatataggattatgagaagtagtaatgttttaaaagtgagtatgtatatttttaaaaatttttgtaaagttgtatttgtaaggaaatttttaggtgttattttttaagacgtaaaagtagtgtatatatttttgaagttaaatttttttgagattttaaatttttttagtgtttgatatatgagtatttatgtttttagtaaattaatttgaatttaaagagttttttgatagttttttagttggggggtgggagtgtagagaataaaaggaaatttattgaagaataaaagataattttttgagaaatttgtttatcgggattttgttaatatttaaatattttaaatattatgttatattattttttttagaattaattgttaaggattgagaaggataggagaatttaatgttattttaggtttttttgatagattaaggaatagtgaggtataaattggggttttcgtgggttataggtaagaggtggaatttaagatttaattttttttttggaattatttatttggggattttttttggttttgtggttgggaagagggatgtttattagttttttcggaatttcgggggtatttataggtttttatttgtttggtagttaggtattatgatgaacgtgagtagtttttatattagtaggtatgaatttatttttttgatttttgggattagtcggggtagtgaagcggaggtttttttttgtagaaggtttagttgtcgttagtttttttttggtatcgcgtcggaggatgtgggatgggaagatcggttcgtttgggttgttatttttgtgggtttatttagtttttatcggagttaggagttgttttttttaagtattgggttggcgtgtttagttaggaaattgtttagtattttttttttttattttaaatataggaagtgtttttttttttttttttttttgatgataatatagtttgcggtaattttttaaattaggtttttttttttaagtttaattgttggaggtgtgggttggggttgatgagaaggattgaattttatttatgaattttttttttagttacgtttataaaaggagagggagatttttttgtcgttgaaggtagggtgagtaagtattttttggtagtggttttatttagtattttataagttgagttttttttttagggttgtaacgtttttaggagttagtcgggattatttgggatgaaggagtaaagttttgataagattttggttaggtagtttttaatatttaaataatggagaaggatgcggcgaattgaaggattttgagaatttataaataattttttaaggtttataatttgtattagttattattattttattatagtgttttgggtttttgaaagtgtattgttattttataaggtgttttgtttttagattttttttttttaaaggattatgtaaaaagtgggttttggttttaaattttggattattttgtaaaatttagttttgtttatttattgattagagtttttttttgattattatgaaatggttgagtgtgttttgttttttggaaatttgtttaagatttaaagttattgtatagttagagtaaaatataattttttaaatattagaaagtaagtaaagatattaataaaaagaaaatttttcgggtaagttaaggaatttagggttttaaaatatattacgttgattgggtttggtggtttatgtttgtaattcgagtattttggtagattaaggtgggtggattatttgaggttaggagtttgagattagtttggatgatatggtgaaattatcgttttttttaaaaaaaaaaaaaaaaaaaaaaaaaaaaaaaattagttaggcgtagtggtatacgtttgtaattttagtattttgggaggttgaggtaggtagattatttgaggtcgggagtttgagattagtttggttaatatggtaaaattttatttttattaaaaatataaaaattagttaggcgtagtggcgggcgtttgtaattttagttatttaggaggttgagataagagaatagttggaatcgaggaggtgtaggttgtagtgagttgagattgcgttattgtattttagtttgggcgatagagtgagatttttattttaaaaaatttgttaaaatatgataagatttttttaaattttatagtaggtataattttttttttaggaacgttttttattttgcgggtaagtgttttagtagaaatttttagtatttttattaaagttacgtttttttttttttgggtatgggagtagaatgtatttgttgttttttttggaaaatagtttatgttttaagtagttaatgtggattgttattataaaatatttaaatttatgttaatgtttttttttttttttttttggagcgtaatggtataattttggtttattgtaatttttgttttttaggtttaagtgatttttttgcgttagttttttgagtagttaggattataggtacgcgttattatatttagttagtttttgtatttttagtagagacggagttttattatgttggttaggttggtttcgaatttttgatttaggcgatttatttatttcggttttttaaagtgttgggattatagggtgagggtatcgagtcgaattcgtaatatagtgtaagttgttttgtattttaatttgggtaatagagcgagattttgnnttttaattaaaaaaaataaaaaaaagtattaggtatggtggtttatatttgtaattttagtattttgggaggttgaggcggggggattatttgagatggggagtttgagattagttgttaagaaattcgtttttattaaaaatataaaaaaattagttgggtgtggtggtgtatgtttgtaattttagttattcgggaggttgagataggagaatcgtttgaattcgggaggaggaggttgcggtgagtcgagattatattattgtattttagtttgggtaataagagtgaaatttcgtttgaggaaaaaaaaaaaaaataaaatattaaaaaattaaaaattaaaaatattaaaattattatatatggtaaggtattttttatttatttatttattgaaatagggtttcggattgttatttaggttggagtgtagtgatttattgtagttttgatttgttaggtttaagtaatttttttattttagtttttttagttgttatgattttaggtgtgtgttattatgtttggttattgtttttttttttaatagagacgaggttttgttattttgtttaggttggttttgaatttttagatttaagtaattttttcgtttgagttttttaaagtgttgagattataggtatgagttattatgttcggtttacgatattttttaaaataaaattaaaataattaaaattaaataatgttttttaggaatatatatataataaaattatgtatttttataagatttaggataatggttatttttatttgaagggaggtagaagtagaggatgggggaatatataaatatatgttatttaatgttaataattgagatgttaattggttgatggggttatagttgtttgttatattaaataaataaatataaaagagggttatttagggattagtgatgagagtttgagatgaggcgaggattgtgattgtttttattttttttatttgaggtttagaaagtaagaaagaatgaagagtttttttttgatttgttataagattagtagttttttgggtgcggtggtttacgtttgtaattttagtattttgggaggttgaggtaggtagatgatttgaagttaggagttcgagattagtttggtaaatatagtgaaatattgtatattaaaaatataaaaaaattagttgggtatggtggtacgtatttgtaattttagttatttaggaggttgaggtaggagaattgtttgaattcgggaggtggaggttgtagtgagttgagatttcgttattgtattttagtttgggcgataagagtaagattttgttttaaaaaaaaaaaaaaaaaaaaagaggatgaagtaaatatggtaaatatggtaaaatgttaataattagtgaagatatatggagattttttgtattatttaaaaattttttaaatttgaaattacgttaaaatgagaagttaaaagagaaatgataggttatttttttagttattttttaattttgatgtatttggtttttttttaaatttttttaatttatttttttatttttttgagatagagttttatttttgaagtttaggttggagtggaatggtgtgattttggtttattgtaattttcgtttttcgggtttaagtaatttttttgttttagattttcgagtagttgggattataggtgtttgttattatgtttagttattttttgtatttttagtagagacggggttttattatgttgggtaggttggttttgattttttgtggtttagatggtttatttgttttgtttttttaaagtgttggaattataggtgtgagttacggcgtttgattttatttggttttttttttttgttgtttaaatatttaagatttacgatttagggtttttgtaagttttttttgtttggagtagtgatagggtgattttttattagtaatatgaggattttatttgtttggattatttgtaaaggtaattttttttatttgtaattaaaaagttatttgtggagggattttttgtagttatttataaagtgtgaataaaatattttgtttttaataatttttataaaaaatttaaaaaattattttattttattttgttatgtttttgagttatagatatatatatatatatgtatatatatatatatatatgtatatatatatatatatatatatatatatatatatatatatatatatatatatatatatatatatatatatatagagagagagagaatttcgttttgttatttaggttggagtgtagtggtgttattaggatttgttgttgtttagaatttttgggtttaagcgatttttttattttagtttttcgagtgggtgggattataggagggtgttattatgtttggttaattttttaatttttaattttgtagaaatagggttttattatgttgtttagggtggtttttaatttttaatgtaaatatttttaattgtggtaaatatatttataatttattatttttaatatttttaagtatatagtttagtggtgttaaatatatttagtgttgtataattattattattaattatttttagaatttttttattttgtaagattgaaattttgtatttattaaataataatttttattttttataatttttagtttttggtagttattattttttttgtttttgaatttgattattttagggaatttatgtgagtggaattttatatttgtttgtttgtgtttggtttattttatttagtattaagtgtttacggtttatttacgttgtagtatgggttagaatttttatttttttggaggcggagtaatgttttgtgtgtttagttatattttgtgtatttatttatttgttgatggatatatggattattttattttttggttgttgttaataatgttgttgcgaatatgggtttataaatatttttttgaaattttgtttttaattttttggggtgtgtatatataaggaataat

SEQ ID NO: 1011 - DNA, 5270 bp, Artificial Sequence
  chemically treated genomic DNA (Homo sapiens)
ttttttaggttatagttgttttttttttttgttttttttgatggtgtaggttggatgaggttgttttatttttgggtttttgttttttataggtatattattttaaatggggattttttaattgttttttttattagattgggtttgggatggagggtttgttttgtatcgattgggttttaaggaagttatgattttgtagtagggaatagaaaggcgagggtgtataggtggaggttgtgtaggttttggggatggagtgtagagttaggttgggataggaggttagggttttttagttgggttcgttcggtggtttttttttgagttttttgtttaggtgagtaggggatatttggttgtattgtttggttggttaagaattttgagttgttttttgtggtgataaaattaggcgatgttattagggttattagcggaaatataatcgaggttatgggtagattaaatttgatatttgtgatgttatggaaagggtggcggaggagtttgttatagtgattgaggtttaggtttttgtttgtggcgggtattttagaaaattttattaggtttgtgggggtgagtgatgggaagaaggaggtatgtatttttagttggattggattttgagggttaggatttttaataatgtggtttattttatagggatggggttaggtttatagggatttattagataggggtttagagattttttttgaaatttttagggttttggtagattttgggttgtagttttgggttggtttttttgttcgggttttggtatatttttttttatgtttgttttaggggtgggtacgtgtgtttatttttttttttgatagtaattagtttagtttataaaggaggttttttttaagtcgggttgggttgatataaaggtttggggtggaattattattttataggggattaggtttttttttaagggttggtaggattgtcgtttttggaggagggaagtggtgtttatgattttgtatgaagtttttatagagttaaggtaaattttgaaggagatttttaggatgatttaggttatgtttcggtttaagggtttatagaagcgttgtggtggttaattatttagatatttttggtagtttttttggaatgaggtttgtttttaggaatatgtttttttatttttttttggtttatcgaacggtagtaggtattgggttgtagttattgggttttttcggggttcggggttgtattattttttgttttttttgttttgtttagttggtttttttgtttattttagtttttttttatggttttattttttgtttttggggttttttattttatatttttgtttgttaaggttttgggtttttttaattttttcgttttttgattttaggttgttagttttttaaggttatttttaggtagttatagtttaagttattaaattttattatttttattgtttttagttttattttaggggttgatttgatttttattttatagagaatatagaagttattgtttttttttattataaatttgtggattaattaggtttattttattgtatttattttatttagatggattgggttatttaggtagtttttttttgagttttttgcgaggagttcgtgatagttgatggtggggttttgtttgtgttggtcggttagttattttatttattttcggtttatttttttaagagaggaaggagtttaaatttttgtgtggaaggtgcgtttttgattttgtgatttttttggttgttttattttttttttttttttaaaataaaattttaaagaattttttatttttcgttttatcgttattcgttttttagtttattgttagaggttttgttttattatatattgaaattatttcgttagaggttttagggattttttcgttagtaattagagtggttatattttatttttattttgttgtttttttttgttatatggtattattttttaaggtcgttattgttcgatgttgtttagggggtgtttagtttttgggttggattgttttgtttattttagttttagtgatgttattttttagttatattagtttagtttttttgagatttagtttttttatttggaaaatggggttaataatagtatttgttttatagtttattatgaggattaataagtttagttatgaaaagaatttagttttttatattttataagtgttatttaatagaagttagttgtgagagcgtttttttttatttagttttttttatttcgtaagaatttatttagtttagttttttattatttgttttttagaggatttttaatatttttttattggttattttgttgttttgaatttttttatttttttttttatagtaggtgtatttgagttttatttcgttttttttggttgaaaatttcgtaagttttttaatgtttttagtatgaagttttaattttttttgtttttaataaattatgtgtatatatataatttttttggagagatggttttattttaacgtttaggttggagtgtagtggtataattataatttattgtagtttcgattttttaggtttaggtggtttttttatattagttttttaagtagttgggattataggtgtgtattattacgtttggttaattttttgtattttttgtagagatgaggtttcgttaaattgtttaggttggtatatatttatttttaaaatgagaaaaatattataaatgttaagatttataatattattatttaggattttgtgtgtatgtgtggttataatataaagttttgatttttaaagaaataaaaaaaaatataggaatgttttgtttttatagttttaaatttattgaattttaaaattttttagaaaagtttatttatattaaaaaaaatatagtttttttttgtaaggaattatattatttgtgtataagtttttaaaacgtttatatagatagtaatattaaggtatagttgagtatgtaaggaataaattttgggttcgtggggtaataggggattttatcggagttaagattgttgaggtagttagattagagttttttaaatgtattgaattattgaggattttattaaaatgcgatttttgatttagaaagtttgggttggggtttgagggttgatatcgttaataagttttcgggtagggttgatttgtaggtttgggattataggaagggtagtaagattggaaatttgtttttttataagattgagttgttagtggaggttattatgtttgttttatttatagtaagtgttttgtagacgtttgttgaatgaattgtgtttacggagtacgtaagttggtgttaaggtttttttttgtgtgttgagttgtgtttgttagattttatttcgggtttagaatttagggttttttttggtttagggtttagtttggggttgagttaggagggtatattagttatagaaattatttttatagtatggttttgagttatagtttttttatttgtttttttatagttatattttggtttttgtttttatttgatttgtttatgtttagaagtttaaagtatttaaatttcgttgttttagtataattttttatttcgtattttttatattgattataatatatcgtattatgatttagattttggtttttttttattgttttttttttttttttattcggggttaattattttgaagaagttttttatatgtttttgttatatttatttttttattaaaagtttttattttatggggtgggttaggtaggttttaagataggttcgtattaggaggatttttttttttttaggggttgttttttgggataattattttcgtttttttgggttttttgttttttatttggttgtagttttttaggttttttgtggatttttttatggtttgtttttatttatattttttttttgtaaattttgtttattgggtttgtatttggtaaatttatgtttagtatagacggggattaagattttttaatataattgttttttgttaatttttgttttagtagtttgaggtttagtttgaaattagggagttgtttttttttttttttttttgattttattttttagattatgttaattttgttttttaaattttttaggttagttttttttttagtttttagtgatagtgtttttaggtatttgagtttagttttcggtgttattagagggattgttaggggttgtagtcgggttttttgtagaggttgagttttatacgtagggaatagttatgttattgttagtagattagtaagagaatggttatttggggtttgagcgttttcggttatttattagaaataaagtgttaaggagaagttgttcgaagtttatgggataaattattggggattggaatattagtaattttgtattgggaagcggtattaagagatgtgttttttagagtttgaggttgaacgtggatgtttagtagcgtgatcggttattagataaatttttatttgttttagtggttttttggttatttattaggattaagtagggcgggtagtagagggttagggtagtttaggtgatggtagatgagattttattgggtaggaggttttagtgagttgagttaggttttttttttttgttataggggtttttttatttgttgttatgttttttattttttattttttttgataagatgaagtgataacgtttaagtaatttttttttttgttttattgattttgagtattagaaagttatggatgaataattacgtttgtggttttttatggaggttttatgttagataaagattttttcgacgtttgttttatattattattttttttcgttttgttcggggttgtgggtattttgttgttgtatatataaggcgggaggttgttgttaattttttagagttttacgaaggattagaataagatagagtgttttttgtcgatttaaatatgagtcgtttgttcgttttgtttttgttttaatttttggttcgtttcggattttaagtttttatgatttagataacgtttttgaagataagttgggttaattgttttaatatgatcgatgaaattataatatatttaaagtagttatttttgtttttgttggtgagtagtttggataagattggtttgtagtagtgaggggtggtggttgtttaaggttaaaaggttttatgggtttttttttttttttatttttatagg

SEQ ID NO: 1012 - DNA, 5270 bp, Artificial Sequence
  chemically treated genomic DNA (Homo sapiens)
tttgtgggggtgaagggagagaaaggtttatgaggttttttggttttaggtagttattattttttattgttgtaggttagttttatttaagttatttattagtaaaggtaaaggtggttgttttaagtgtgttataattttatcgattatgttagagtagttaatttagtttgtttttaaggacgttgtttgggttatgggagtttggagttcggggcggattaggagttggagtaggagtaggacgggtaggcggtttatgtttggatcggtaggaggtattttgttttgttttggtttttcgtggggttttgaagagttggtaataatttttcgttttatatgtgtagtagtaaggtgtttataatttcgggtaaggcggggggaggtggtggtgtggggtaggcgtcggaaggatttttatttgatatggaatttttatagaaaattatagacgtaattatttatttatgattttttagtatttaagattagtgaaataagaaaaaagattatttaaacgttattattttattttgttaaggaggatgagagatgggaagtatggtagtaggtgagaggatttttgtggtaggaaggggaagtttgatttagtttattgaggttttttgtttagtgggattttatttgttattatttggattattttggttttttgttgttcgttttgtttggttttggtgggtggttaggaggttattggaatagatgagagtttgtttggtagtcggttacgttgttaaatatttacgtttagttttaggttttgagaagtatattttttggtgtcgttttttaatatagaattattggtgttttagtttttagtggtttgttttatgggtttcgggtagtttttttttgatattttgtttttggtggatggtcgagggcgtttaggttttaggtggttatttttttattggtttgttagtagtggtatggttgttttttgcgtgtgggatttagtttttgtaggaggttcggttgtagtttttggtagtttttttggtagtatcgagagttgagtttaggtatttgaggatattgttattgggagttgggggaggggttggtttgggaggtttaggaggtagaattggtatggtttgaggggtgaggttaagggaggagaaaggagagtaattttttggttttagattgggttttaggttgttggggtagggattggtaggagatagttgtattgagaggttttgattttcgtttgtgttgagtatggatttgttaggtgtaggtttagtaggtaaggtttgtagagaggggatgtgagtggggatagattatggggaaatttataagggatttgagaaattgtagttagataggaagtaggaaatttagaagggcgggggtggttattttagagggtagtttttgagagaagaggggtttttttgatacgggtttgttttggggtttgtttgatttattttatggggtaggggtttttggtaaagggatgagtgtgataggggtatgtggaagatttttttaagatgattggtttcgggtgggagggagaggagagtagtaaggaaaggttagggtttgggttatggtgcggtgtgttgtgattagtgtgggggatgcgggataggaggttatgttgaggtagcggaatttgggtgttttgggtttttgagtataagtagattaggtgaagataaggattaggatgtggttgtggggaggtaggtgaagaggttgtgatttaaggttatgttgtgaggatgatttttgtagttgatatgtttttttggtttagttttaggttgggttttggattaggaagagttttaggttttggattcggagtggagtttgataggtataatttaatatatagaggggagttttagtattagtttgcgtatttcgtaggtataatttatttaatagacgtttataaagtatttgttgtgaataaaatagatatggtaatttttattagtagtttagttttgtgaggagatagatttttagttttgttattttttttgtggttttagatttgtaggttagttttgttcgggagtttgttagcggtgttaatttttaggttttagtttagattttttgaattaaaaatcgtattttgataagatttttagtgatttagtgtatttgaggggttttgatttaattattttagtaattttagtttcggtagggttttttattgttttacggatttagagtttgttttttgtatatttaattgtattttggtgttattgtttatgtaaacgttttggggatttgtgtataaataatgtgattttttatagagaaaagttgtattttttttagtgtaagtgggtttttttagggaattttaaagtttaatgaatttaaagttgtggagataaaatatttttgtatttttttttgtttttttaaaagttaagattttgtgttgtaattatatatgtatataaaattttgaatagtagtattgtaaattttgatatttgtagtgttttttttattttaaaaatgaatatatattagtttgagtaatttggcgaaattttatttttataaaaaatataaaaaattagttaggcgtggtggtgtatatttgtggttttagttatttaggaggttgatgtgggaggattatttgagtttgggaggtcgaggttgtagtgagttgtgattgtgttattgtattttagtttgggcgttggagtgagattatttttttaaaaaaattatatatatatatatagtttattaaaggtaaaagaggttgaggttttatgttaggagtattggaggatttgcggggtttttaattaggggaggcgaggtgaagtttaggtgtatttgttgtgggggaaaggatgagaaagtttaaggtagtagggtggttagtgaggagatattgggagttttttggaagataggtggtgggaagttggattaggtaggtttttacggggtggagaggattgggtgaagggaagcgtttttatagttgatttttattgagtggtatttgtgaagtgtggagaattaagttttttttatggttgaatttgttaatttttatgatgaattgtgaggtaggtgttgttattagttttattttttagatgaagaaattgagttttagagaagttgagttgatgtagttaggaagtgatattattgggattgagataagtagaatagtttaatttagaggttgagtattttttgggtagtatcggataatgacggttttaaaggatgatgttatgtggtaggaggggatagtagggtgaggatgagatgtaattattttgattattgacggggagatttttgaggtttttggcggagtagttttagtgtatggtggggtaaagtttttggtagtgggttgagaagcgagtgacggtgagacggagggtagaagattttttgaagttttattttgaaggaaagagggggatggggtagttagaggagttatagggttagagacgtattttttatatagaagtttgagttttttttttttttaaggaggtgagtcgggaatgggtgagatggttggtcggttagtataggtagagttttattattagttgttacgggtttttcgtagagagtttagggaagggttgtttgggtggtttagtttatttgggtggggtaggtgtagtggggtgggtttggttggtttataggtttgtggtgggaggggataatggtttttgtgttttttgtgaaatagaggttaagttagtttttgaggtggggttagaagtaataagggtggtgaggtttggtggtttgagttgtgattatttggaggtgattttgaggggttggtagtttggggttagagggcgaggaggttgggaggatttagggttttggtaggtaagaatatggaatggaaggttttagaggtagggagtggggttatgggaggaggttgggatgggtagggaggttagttgggtagagtaaaggaggtaggaggtggtgtagtttcggatttcggagaggtttagtgattgtagtttaatatttgttgtcgttcgatgaattagggaggaatggagggatatgtttttaaaagtaaattttattttaaaggggttgttaaggatatttgggtagttggttattatagcgtttttgtgagtttttggatcgaggtatagtttgggttattttgggggttttttttaaggtttgttttgattttataggagttttatgtaaaattatgggtattattttttttttttagaggcgatagttttgttagtttttgaggagagatttggttttttgtaagatggtgattttattttaggtttttgtgttaatttagttcggtttaggggaaattttttttgtgggttgggttgattgttattaagaagggaaatgagtatacgtgtttatttttggggtaggtatgagggagggtgtgttagggttcggataggagagttagtttaagattgtagtttagggtttgttaaagttttggaggttttaggaggggtttttggatttttgtttaatggatttttgtgggtttgattttatttttatggagtgggttatattgttggaagttttggtttttagggtttagtttaattagaggtatatgtttttttttttttattatttatttttataggtttagtggaattttttggggtattcgttataggtaagaatttgggttttagttattgtgataagttttttcgttattttttttatggtattataagtgttagatttaatttgtttatgatttcggttgtattttcgttggtggttttgatgatatcgtttggttttgttattatagaaggtagtttagggtttttggttagttaagtagtgtaattagatgttttttgtttatttgagtagagagtttaggaaaaagttatcgagcgggtttagttggagagttttggttttttgttttaatttggttttgtattttatttttaagatttatatagtttttatttgtgtattttcgtttttttattttttgttgtagggttatggtttttttggggtttagtcggtgtagagtagattttttattttaggtttagtttaatagagaagatagttggagaatttttatttagaatgatatgtttgtgggagatagaagtttagaaatgaggtagttttatttagtttgtattattagagaagataggaggaaaggatagttatgatttaaagga

SEQ ID NO: 1013 - DNA, 5474 bp, Artificial Sequence
  chemically treated genomic DNA (Homo sapiens)
taaatgtatttattttttagagtaattttatgagatagggatagttatgatttttattttatagatgaggttgagtagcgtgtttaaggttatatagttaggaggtatagtagttaggtttgatagattatttgggtttagcgttcgtttttttagttatcgtgtattatagtagtttttgttaatagattttttttttggatgatatatgttaagtattttttatggaattatttatttgttttttataaggaagagttatattatttttattttataggtgagaaaatcgagatttagagagagttaatgatttatttatggttatagagttgataagggtttatttgttggatttttaaacgtagtgtttataattgttacgttttagggtttgaaggaaaaattttgtatttatggaggggtcggcgttggtttttagtttttatataggggaggggaaggggtttgtgatcgatatagttagagatagtagtatttaattttttttttgaattttggtgttaggtttattatatttcgttaaggtattgtttatggttttgtaggttcggagattttttcgtagtggtggtagtggtggtgattattgtttttttttttgtttttgataatgtaggtatttattttttttatttttatttatttgtcgtatttgtagttgttatggtgttgtttttgtaggcgaggatggtttattttttatttttgttttttggggagatttttggttattttcgaatgttttggatagtttatttttttatttttggttttattttattattgaaataaataaaataagttggattttgtttttgagttgaaggtgtttatttaatattttttttttatttattagttttgtttttagagttttaagtttagggtttgttttttagtgggtgtttagaaaaatattagatggatatataaatggttgttttattgtttttatagacgttttagaatttcgttttttttattagttttttttttgtattttcgattttttttgagaatttatttggtagaagttttttatttagtaagttcgtagtttgatgagtttttttttgtgttaattggaatcgttgttgtattttattttatataatagtttatcggatttaaagtttttatttgttttggaagtaattatttgttttttttataatttttttttagtttgtgtagtgaagaattaatttttatttaagaagtttggtttttgttttggtttttgggaggttttattagttataaatttttggagtaaataacgtggttagtttttgttattagtttttaggaggtagttttaaatttttagggattttttaagtgataggagtattttattatttatggtggtttttgagagtttatgcgagtgaagtgatttatggtgggttttaggtagtttttgttgataatacgattatggaggggttggttacgttattgaggttttgtgatattagtttggtttttcggaaggagattaggaagatgagtttaatttagtggttaatgagtttattaattatatttatatgataagatttaaataaaaattttggattttaaagtttaagtgagtttttttgtttagaaatagttagtattttgttatacgttaaagtgttgagaaggtgatgtttttgacgttatacggggaagataatgagagttttgtgtttgggttttttttttatttcgtttttgtgtttttttttttggttggttttgatttgaatgtttttgttatgataaaattgtggttttacgtatagtatttttttgagttttgttagttattttagtgtattttggaatttgaggggtagtggaaatttttagatttgtagttagttagtagtgagggtgggttgggaatttttgaatgtgtagttggcgtttgaagtaagggtagtgttgtgggggattatattttttatttgtgaggtgtggtttattttaggtggtttggtatttgaagttattgtatttagtttggtaattttgttgtttagttttaatggaaggattttaaatatggtttaaggattttttgatataattatttagatttttttttttatagaatttgaggtattgcgataagatttaaaattatatatagatagtggaatattatatagttttaaaaaagaaggaaacgttgttatttattataatatggatgaatttggaggatattatgttaagtgaaaaaatttaggtatagatagataaatattatatgattttacgtatatgtgaaatataaaaaagttaaatttagggaggtagagagtaggatgatggttattaggggttgggagggtggtgattaggaagatgttggttaaaggatataaaattttaattgggaggagttaagttaaagagagttattgtacgatatggtgataatagttgatattaatgttttgtatatttaaaaattatgaagataggttaggcgtagtggtttatatttgtaattttagtattttgtaggggttgaggtgggtagattatttgaggttaggagttcgagattagtttggttaatatggtaaaattttgtttttattaaaaatataaaaattagttgggcgtggtggtaggtatttgtaattttagttattcgggaggttgaggtaggagaattgtttgagtttaggaggtagaggttgtagtgagttgagattgcgttattgtattttagtttgggtaatagagtaagattttattttaaaataaataaataaattatagagtagattttaaatgtttttattaaaaataaatatgtgaagtattgtataagtagtttgatgtagtaattttataatatgtatattttaaaatattatattatatagtataaatatgtgtaatatttatttgttaatttaataataataataataagggaagaaaagatttaaaatagaggtaaaattttggtcgggtatggtggtttacgtttataattttagtattttgggaggttgaggtgggtggattattttgaggttaggagttcgatattagtttagttaatatggtgaaattttatttttattaaaaaaaaaaaaaaaatatagaaattagttaggcgtggtggtatgtgtttgtaattttagttattcgggaagttgaggttggagaatgttttgagtttaggagattaaggttatagtaagttatgattattattgtattttagtttgggtgatagagtatgggggtagggggtggtgaggggggggcggggaagtggaatagaggtaaaattttagtaatatatatttttagatgattttttagaataaatttatagggaggtttaggtatagtggtttacgtttgtaattttagtattttgggaggtcgaggtaggcggattacgaggttaggagatggagattattttggttaatacggtgaaatttcgtttttattaaaaatataaaaaattagtcgggcgtggtggtaggtgtttgtagttttagttattcggggaggttgaggtaggagaacggtatgaatttaggaggcggagtttgtagtgaattaagattacgttattgtattttagtttgggtgatagagtaagattttattttaaaaaaaaaaaaaaaaaaaagaaatttatagggaaaagaaggttagagattaagggaagggaaggttttgggagaaaagtagggggtaggtagggtttaagaattttgttgtttatgagtttttattgggaggtggggtggttttgtatagggtttaggtatttgagtgagtggtggggtttttacgtttattgttggggtgaggtaatgagtattttattgtgtttatatgaatttaataaaaaataagtagggcgggtggtggggtattgattaggagggttgatttgtaagttggtaagattgtagtttttttttttaattagttgaggatgtgtttaggttttatttaaaaagtgggtatttttggttaggtatggtggtttatatttgtaattttagagttttgggagattgaggtaggaggattatttgagtttaggaatttgagatgagtttaggtaatatagtgagatttttatttttattaaaaaataaaaataaaaatgagttaggtatggtgcggtggtacgtatttattgttaggggggttgaggtgggaggattatttgagtttgggaggttgaggttgtagtgatttttgattataatattgtattttagtttgggtgatagagtgagattttgttttagaaaaaaaaaaaaaaaagttatttttgaaattttagaatagatttattttgttaagggtttttttatgggtaaggattttatggatttgttgggatttaaattaggttttatttgatacgatttgttttttttaaaatatttaaatttgggagaatattgttttttagtgttggggtaggagagtttgtttgttattttgtttttatgtagagaaggagttttagattagtttttttatgataggatagtttttaagatgttatttgtatttggaagaagttaggttaaaatattttttaagtaaaatttttttgatattattttatttttttttaggaggattgtattataataaattcggatatttgtggttttttttttttatgtaaagtaaaaagttagtagtagttttaagttgataagattaatttaaagagtaaattatggtgtaattttttatgttgaaattttgtagttaattttttaaaaaggttttatttttttattggtttgattttataggaatattttatttgtttgtgaggtatttttttttttggaagagaggtgttgattggttttaagtgattgataatttggtgtaacgaaaatttttaatgtaaatttattttttttcggttttagtaattttaaatttatatatagagatatttttgttagtattgtatcgttagttttttttgataaattaattgttttatattgttattgtaaatcgatatttattaatgggttttattttttaattgtttttttttttgttttttttgttagtatgtgtcggtaattttgtttacggatataagtgcgatattattttataggagattattaaaattttgaatagttttatagagtagaaggtgagtatttatttggtattatttttttagatgttttggtgatgtttttagtatttttaggtatgaaaacgttaatagttgttagagaagttggaattggtggttggtggtagtttagggtatatagcgaggttttttttttgttatttttttttttgagggtttgtaggaagtttttttagttggagggagtgagagttgtttattaaggatttttttgttcggttggaggttaattttgttttttgtttttttatttttgtttggattaaga

SEQ ID NO: 1014 - DNA, 5474 bp, Artificial Sequence
  chemically treated genomic DNA (Homo sapiens)
ttttggtttaggtagaaatgagagagtaagagatagagttaatttttaatcggatagagaagtttttgatgagtagtttttattttttttaattgaggaaattttttataaatttttagaaaaaagagtggtaggggagaagtttcgttgtgtgttttggattgttattaattattagttttaatttttttagtagttgttaacgtttttatgtttagaaatattgagagtattattagaatatttggagagatggtgttagataggtatttattttttgttttgtgaggttgtttaaagttttgatgattttttgtaaggtgatatcgtatttgtgttcgtggataaagttgtcggtatatgttagtaggaagaatagagggggaagtagttgggaggtgagatttattaataggtgtcgatttgtagtgataatgtgaggtaattagtttattaggagaagttaacgatgtaatgttgataaagatatttttatatatagatttaaaattgttgaaatcgagggaaaatgagtttatattggaaattttcgttatattagattgttagttatttggggttaattagtattttttttttaggagaaaaaatgttttataaataggtaaaatgtttttgtgaaattagattaataggaaaatgaaatttttttaaaaaattaattataaagttttagtataggaaattatattataatttgttttttagattaattttattagtttggggttgttgttggttttttgttttgtatagaagggagaggttataggtgttcgaatttgttgtaatgtagtttttttggggaaagatagagtaatattaagaaagttttatttgaaaagtattttaatttggttttttttaagtataggtggtattttggaaattgttttgttatggaaaagttgatttggggttttttttttgtatagaggtagaataataggtagatttttttattttagtattgggggataatgtttttttaagtttaggtgttttgagaaggataggtcgtattaggtgaggtttagtttgggttttagtaggtttataaggtttttatttataaggaagtttttggtaaggtaggtttattttgaggttttaggaatgatttttttttttttttttttgagatagggttttattttgttatttaggttgaaatgtaatgttgtgattagggattattgtagttttaattttttaggtttaagtgatttttttattttagtttttttagtagtaggtgcgtgttatcgtattatgtttggtttatttttatttttattttttgatagagataagagttttattatgttgtttaggtttattttaaatttttgggtttaagtgatttttttattttagttttttaaagttttgagattataggtgtgagttattatgtttggttaggaatgtttattttttgaatggaatttaaatatatttttagttaattaggaaaaagagttatagttttattaatttataaattagtttttttagttagtgttttattattcgttttgtttgttttttattgaatttatgtggatataataaggtgtttattgttttattttagtagtgaacgtaaggattttattatttatttaggtgtttgggttttgtgtaaggttattttattttttagtaagggtttatgggtagtaggatttttgggttttgtttgttttttgttttttttttagaattttttttttttttggtttttgatttttttttttttatgaattttttttttttttttttttttttgagatggaattttgttttgttatttaggttggagtgtagtggcgtgattttagtttattgtaagtttcgttttttgggtttatgtcgtttttttgttttagttttttcgagtagttgggattataggtatttgttattacgttcggttaattttttgtatttttagtagagacggggttttatcgtgttagttaggatggtttttattttttgatttcgtgattcgtttgtttcggttttttaaagtgttgggattataggcgtgagttattgtgtttgggtttttttatgaatttattttggaagattatttaaaaatgtgtgttgttaaggttttgtttttgttttattttttcgttttttttttattattttttgtttttatattttgttatttaggttggagtgtagtggtgattatagtttattgtagttttgattttttgggtttaaggtattttttagttttagtttttcgagtagttgggattataggtatatgttattacgtttggttaatttttgtattttttttttttttttagtagagatggggttttattatgttggttaggttggtgtcgaatttttggttttaaaatgatttatttattttagttttttaaagtgttgggattataggcgtgaattattatgttcggttaaggttttgtttttgttttggattttttttttttttattattattattattaaattgataaataagtattgtatatatttgtgttgtatgatataatgttttgaaatgtgtatgttatggaattgttatattaagttatttatataatattttatatatttatttttggtaagaatatttaaaatttattttgtgatttatttatttattttgagatagagttttgttttgttgtttagattggagtgtaatggcgtagttttagtttattgtaatttttgttttttgagtttaagtaatttttttgttttagtttttcgagtagttgggattataggtgtttgttattacgtttagttaatttttgtatttttaatagagatagggttttattatgttggttaggttggtttcgaatttttgattttaggtgatttatttattttagtttttgtaaagtgttgggattataggtgtgagttattgcgtttggtttgtttttatgatttttaagtatataagatattgatattaattgttgttattatgtcgtataatggttttttttaatttaattttttttagttgaaattttatattttttgattaatatttttttgattattatttttttagtttttggtgattattattttattttttgtttttttgagtttggtttttttatattttatatatgcgtgagattatgtggtatttgtttgtttgtgtttggatttttttatttagtataatgttttttaggtttatttatgttgtggtgaatgatagcgttttttttttttttaaggttgtatagtattttattgtttatatatagttttggattttatcgtagtgttttaagttttgtgaaggagagaatttggataattgtattaggaggtttttagattatatttaggatttttttattgggattgggtagtaaggttattaaattaaatgtagtggttttagatgttaaattatttgagatgagttatattttataggtgaggggtatggttttttataatattgtttttgttttagacgttagttgtatatttaggggtttttagtttatttttattgttgattggttgtaaatttgggagtttttattattttttaggttttagaatgtattaggatgattgatagaatttaggagagtgttatacgtaaggttatagttttattataataaaagtatttaaattagaattagttaaaagaggagatataggggcgagatggaggaggggtttaaatataaagtttttattgtttttttcgtgtggcgttagaggtattatttttttagtattttgacgtgtgataaaatgttgattatttttaagtagggaggtttatttgagttttggggtttagagtttttatttgagttttattatataggtgtggttgatggatttattggttattgggttgaatttatttttttggttttttttcgggaggttaggttgatattatagaattttagtggcgtggttagtttttttatggtcgtattgttagtaaaaattatttagggtttattatgagttattttattcgtataaatttttagagattattatgaataataagatatttttattatttgggaaatttttaggaatttggggttattttttgggaattggtgataaggattagttacgttgtttattttaagggtttgtagttggtaggattttttaagagttaggataaaggttagattttttggataaaggttgattttttattgtataaattggaggagagttatgagaagagtaggtggttgtttttaaagtaggtggggattttggattcgatgaattattatgtggaatgaagtatagtagcggttttagttaatataggagggagtttattaagttgcggatttgttgggtggagagtttttgttaaataggtttttaaggagagtcggggatgtagaaggggagttggtggggagggcggggttttggggcgtttgtgggggtagtggaatagttatttatgtgtttatttggtgtttttttaagtatttattaaagggtagattttgggtttgaggttttgagggtagagttggtgagtgaaaagggaatattaggtgggtatttttagtttagaagtagaatttagtttgttttgtttgttttaatggtgaaatgaggttaaagatgaaaggataaattgtttagaatattcgagagtgattaggagtttttttagagggtagaagtgggggatgggttattttcgtttgtagggatagtattatggtagttgtaggtgcggtaggtgggtagagatggggaaggtgggtgtttgtattgttagggataaagaggagggtagtgattattattattattattattgcgaaggagttttcgagtttgtagggttatgggtagtgttttggcggggtgtggtgggtttgatattaaagtttaggagggaggttgaatattgttgtttttggttgtgtcggttataggttttttttttttttttgtgtgagagttgagaattagcgtcggtttttttatggatgtagagttttttttttaggttttggaacgtagtagttatgagtattgcgtttgggagtttagtaaatgagtttttattaattttgtgattatgagtagattattaattttttttgggtttcgatttttttatttgtgaaatgggaataatgtggtttttttttgtgaggagtaagtgagtggttttatggaaagtatttggtatgtgttatttagaaagggggtttgttaatagaggttgttatagtatacggtggttaagagagcggacgttgggtttaggtggtttgttaggtttggttgttgtgttttttggttgtgtgattttgggtacgttatttagttttatttgtgaaataggggttatagttgtttttgttttatgaagttgttttgaggaatgaatatattta

SEQ ID NO: 1015 - DNA, 5880 bp, Artificial Sequence
  chemically treated genomic DNA (Homo sapiens)
aagtttatgtttatttaaaaatttgtatatgagtgttgatagtagttttatttataattgttaaaaattggaagtaataaagatgttttttaataggtagaatggataaattgtggtatatttatataatagggtattatttagttataaaaggaaatgaggtgtgaagtttggaaaagatattgaggaatttgaaaagtatattgttaagtaaaagaagttagtattaagagattatatattttttgattttaattacgtgatattttgaaaaaggtaaaattatggagatagtaaaaaaattagtggtttttagaatttaggaagaataggtagagaattggggatttttagggaagtaaaattattttttatttttttttttttttttttagagatagggttttattttgttgtttaggttggagtgtagtggtatgattatagtttattgtagtttcgaatttttgggtttaagggatttttttgttttagtttttgagtagttgggattatagtgtattattatgtttggtttgttttttgttgttgttgtttgtttgtgttttttggtagagatcgggttttgttatgttgtttaggttgggaaattattttttttgttgttatatgtgtggatttatggtattatatattgttaagatttagaatttggttgggtgtattggtttatgtttgtaattttaatattttgggaggtcgaggttggtggattatttgaggttaggagtttaaaattagtttggttagtatggggaaatttcgtttttattaaaaatataaaaattagttaggcgtgtatttgtagttttagttatttggaaggttgaggagtgagaatcgtttgaatttgggaggtataggttgtagtgagttgagattacgttattgtattttagtttgggtgatagaataagattttgttttaaagaaaaaaaaaagatttagaattgtgttgtagaggttaggtatagtggtttatgtttgtaattttagtattttaggaggttgagatggaaggataattttagtttaggagtttgagattagtttgggtaatgtagtaagattgtttttaaaagtataaaaaaaaaaaagtttagtgtggtggtatgtttttgtagtttaagttatttagaaggtagaagtaggaggattttttgagtttaggagttttaggttgttttagtttgggtaatagagtgagattttgtttttaaataagtaaataaatataaaataaaataaaataaaataaaatttcgagaaatagtgaaataatgtatgttatggattttagtttataataatgtattagtattataaggaaggtattatatattaatgtaagatgttgataaaagaggaaattttgtatgggggagagggatgtatgggaatttttagtattatcggtttaatttttttataatttataatggttttaaaaaataaattttattagttttaaagatcgaaaggtttggaaataagtaagcgtgttaggatataatgaggattgagtttatattgaggtaagatttgggaatttttagatgggggaatagaggttttattattttggtgtttttggatttgtttttaggattgacggagtagttatagataaagtttgggtattttgggtaggaatttgaatagtgggattgtatgtaagaagatatttattattttttttgtattcgagaataatgttttgttttttttaattttgtaatttgatataattttagattggcgggaaagttgggagaagagtataaagaattttcgaagtttttttttttagattttttgaatgttttagtttttgattatagttgtgttttttttgtttgtttttttaatgttacgtttatttttattttataattaagtaatagattaaggtaataggtttcgattttgttttttttttatttttattttgataagaatagtaattgatattttgaatgtttaatttacgttaggtattattttaggtattgcgatacgtattttgttattttattattttatagttttatgaggtgggtttattattatttttattttatagatggggaaattgaagtatagggaggatgatttattttgtttaaagttatatagttaatacgtagtagagttggtatgttaatgtcggtagtttagaggtaagcgaggaaatcgacgaaggatgatttgattgggaaaataggatgggagtttagtttgggagtttaggaggggatatagtttaagttatatatttttaaaggattttaaaggtagatttttgttgtcgtttttcgatgatatggggtataaatttagaaatatagataggataaaggtagtttgtagggttgaattgtttgggatgaagtattaatcgtgtgggtgtgcggatgtgtgagtaatgagtgtgagggagtatgagtgtggacgggagtggaagttatatttaatttagaggatttttattttttttgaaatttaagtttttaggaaagttttttttgtggttttttttttttagtttttttagcgtttgtttgggttgtttttagtacggggtttattatatttaattgtttatatttgtttattttaattgtttacgtttgtttatttgttagtgttttaattaggtttttagggttaggaagtaggggttggatttattttttgttttttttagtttttagtttacgatttggtatatggaggtatttataaatagatgtcgaaggatgggagtttttttatatttttacgttatttttaggtatttgtttatgttgttttttttatttgtatgtttttttgtattgatttaggtattggttagaggttattttttttaggaagttatttttgattttagggaattgatttatttttattgttatttttgggggtgggttggtggttgttttgtttatttggttgtaaggttttagagggtagggattgtgtttgttttatgtttttaggtttgcgttattagcgtttgttataaggttagatatatagtaggattaagatagattaagtatatgaaagaatgattgatatatgggttaggcgtggtggtttatatttgtaattttagtatttcgggaggtagaggtaggtagattatttgaggttaggagtttgatattagtttggttaatatagtgaaattttatgtttattaaaaatataaaaatgagtcggacgtggtggtgtacgtttgtaattttagttatttaggaggttgaggtaggagaattgtttgaatttaggaagtggaggttgtagtgagttgagattatttattgtattttagtttaggtaatggaatgagattttatttttaaaaaaaaaaaaagaatgattgacgtgtagtggtttttgttttgggaagttaatttttattttttattatagtatttgattttattgggtagtttttggtttttatttttaaattgagagttttttgagggtagtagggggttaaattattttttgggtttttagtattgtttagtgtgagtttaaatattttttattttttttgttttcgttttttttttatttagggttttatagttatgtcggtttttagtaattttttttgtaggttgagttggtttttatagggtttttgtattagtttttttttttttttatataagtttttttttataggttttttagagttttagtttaaatggtttttatttaaaaagttttttttagattatttgttttattggtttaagaggtttttattttttttttgggtttttttgatttgaaatattttgttgagtgttttttttttagttatttggttgtattcgggtttttatggtgtttagacgttaatggtttatggggtttgtgttcgaattttagttttatttttgtttttgtttatttgtagagtgattttgagtttttttttttttttttttaaaattttataaatgttaatttttgtagataggggtttcgttaatagggttgtttaggttggtttcgaattatggggtttaagtgattttttcgttttagttttttaaagtgttgggattataggtatgagttattttgtttaatttattttgaattttttaaggattttgtgttttagttttttgatttgtaaaatcggtgatagtattatttttttatagggtagttgttaggattgaacgagttaatatttgtagtgttcgatagattgtattagttattgattgaagggttgttttattatttaaatgtggttggagtaggagttgggtaaatatttattgaagaatgtgtaattatttttatttggaagtcgggttgttaggaaggggaggaggattttagtcgtttagttttttttttataaacgtaattgtttcggcgtaaaagaggtcgcggaggttaggtaggagtaggttttggaggtttggtcggcgtgggcgttttatttcgagattaaggggatttattgtagagtttttcgttgggcgtgatttcgggttgtagcgtgggaggaagcgcgcggtaagatatttagcgaggtgttggggtcgtttttaggagaggacggcggttcggattgttcggcggcggcggcggggatagcgataggggcgcgaggtggtcgggattcgggtcgggcgcgtcgggcggggcggcgtatgtaaatttgtcgggcgtcggggcggggagtaggaagtcggggcgggttgggttttcgcgtttaggaaagtttcgcgcggcgcgggttagggaagggttatttaggggttttttatttttcgtttgggcgttcggacggcgaatggagtaggggcgcgtaggtaggattcggggttcgcgcgcggatcgggttgcgaaggtatcgttcgggtacgtcggttgagggcgttcgggaagggttcggtcgtcggcggggattacggggattatttcgatttcgagcggggttcgagttcgcgattttcggtgcgcgcggagtagcgttcggtttcgtttttgtcgtcgaacggtagcggaggcgcgaggttcggggtacgtggatatttagcgttttttaaagtcggtgttggtagtgagattttcgtcgggacggtttgcgggggtggggggtttggggttaggttgtcggaggttacgtagtttttttttttcgggtagtggcgtttagttttgcgtttaggaagttagtgaggatttcggagagagaaagggtggggaaagttttgagaattgtaaatttgagtagtaggttagtgaatcggggcggttttcgttttcgaatattagatggatttaataatcgcgattattgattgggatttgttttattgaaaggatgttaagtgaaattttttattaatttttttgtggtcggtgttgtgcgttatggatattgtatagatgaggttattaagattttagtcgttttagtaatttgttttaaggtgtcgtttatttgggagttcgtggggtagtaggattagagtttaggtaattttacgttagagttagttgttttttattttttaattacgtttgaggagtttttataataattagaattttcgggagatttgtttaaaatgtagatttttaggtttttgttttgagatttagatttagtaaatttaggaatttgatttttattttatttttaaaaatttattttataaagatggtgttttattatgttgtttaggttggttttaagtgatttttttatttcggttttttaaaatgttgggattataggtgtgagttattgagttttgattttttttttaaataaaatttggattttttagatttaagtaagatagg

SEQ ID NO: 1016 - DNA, 5880 bp, Artificial Sequence
  chemically treated genomic DNA (Homo sapiens)
tttattttgtttaagtttaagaaatttagattttgtttaaaaaaaaaattagggtttagtggtttatatttgtaattttagtattttgggaggtcgaggtgggaggattatttgaggttagtttggataatatagtgagatattatttttataaaataaatttttaaaaataaaataaagattagatttttgggtttattgaatttgaattttagggtaaggatttgggaatttgtattttaagtaaatttttcggagattttggttattgtgggggttttttaaacgtgattgagagatggagagtagttggttttggcgtgggattgtttgggttttagttttgttgttttacggatttttaagtgggcggtattttagggtaagttattaaagcggttggggttttggtgattttatttgtataatgtttatgacgtatagtatcggttatagagaagttagtgggaggttttatttggtatttttttagtaaaataagttttagttaatgatcgcgattattgggtttatttgatattcggaggcggagatcgtttcgatttattgatttattatttaaatttatagtttttagaattttttttatttttttttttttcgaagtttttattgattttttgagcgtagggttgggcgttattgttcggagaagaggggttgcgtggttttcgatagtttaattttaagttttttattttcgtaggtcgtttcggcggaggttttattgttagtatcggttttggggagcgttgggtgtttacgtatttcgggtttcgcgttttcgttgtcgttcggcggtaaggacggaatcgggcgttgtttcgcgcgtatcgagagtcgcgggttcgggtttcgttcggagtcggggtggttttcgtggttttcgtcggcggtcgagtttttttcgaacgtttttagtcggcgtgttcgggcgatattttcgtaattcgattcgcgcgcgggtttcggattttatttgcgcgtttttgttttattcgtcgttcgggcgtttaagcgggaagtgggggatttttgggtggtttttttttggttcgcgtcgcgcggggtttttttgggcgcggagatttagttcgtttcggttttttgtttttcgtttcggcgttcggtagatttgtatgcgtcgtttcgttcggcgcgttcggttcgggtttcggttatttcgcgtttttgtcgttgttttcgtcgtcgtcgtcggatagttcgagtcgtcgtttttttttgggggcgattttagtatttcgttgggtgttttgtcgcgcgtttttttttacgttgtagttcgaggttacgtttagcggagaattttgtagtggatttttttggtttcggaataaaacgtttacgtcgattaggtttttaggatttgtttttgtttggttttcgcggttttttttgcgtcggggtagttgcgtttgtggggggagggttgggcgattggaattttttttttttttttaatagttcggtttttaagtgagagtggttgtatattttttaataaatgtttatttaatttttattttagttatatttggatagtaaaatagttttttaattagtaattagtataatttgtcgggtattgtaaatgttaattcgtttaattttggtaattattttataagggagtgatattattatcggttttataaattaggaaattgaggtatagagtttttaagaaatttaaaatgggttgggtaaagtggtttatgtttgtaattttagtattttgggaagttgaggcgggaggattatttgaattttatagttcgagattagtttgggtaattttgttagcgagatttttatttataaaaattgatatttataaaattttaaaaaagaaaagaaagaaatttagaattattttgtaggtaagtaggagtaggggtggagttgggattcgaatataggttttatagattattaacgtttggatattataagaattcggatgtagttagatgattggggggaaaatatttaataaagtattttaggttaggagggtttaagaagaaagtagggattttttagattagtggggtaggtggtttggaagaggttttttgagtagaggttatttgagttgagattttgaagagtttatgggggaagatttgtgtagggagagggaagagttagtgtaaaggttttgtgggaattagtttagtttgtaggaggaattgttgaaggtcggtatggttgtggagttttgagtgaggaaagagcggagataggggaggtgggagatatttggatttatattgggtagtgttgagaatttagagagtaatttgattttttgttgtttttaaggagtttttagtttgagggtggaagttaaggattgtttaatgggattaagtgttgtggtggagggtgagggttggttttttagggtaggggttattgtacgttaattattttttttttttttttgaagatggggttttattttattgtttaggttggagtgtagtgggtgattttagtttattgtaatttttattttttgagtttaagtaatttttttgttttagttttttgagtagttggaattataagcgtgtattattacgttcggtttatttttgtatttttagtagatatgaggttttattatgttggttaggttggtattaaatttttgattttaggtgatttgtttgtttttgtttttcgaagtgttgggattataggtgtgagttattacgtttggtttatatgttaattatttttttatgtatttggtttgttttggttttattgtgtgtttaattttgtgataagcgttgatgacgtagatttgaagatatgaaatagatataatttttgttttttgagattttataattaagtgagtaagatagttattaatttatttttagaagtgatagtaaagataagttagttttttggggttagggatggttttttggaggaggtgatttttgattagtgtttgaattaatgtagaaaaatatgtaggtggaagggatagtatgagtaaatatttggaggtggcgtgggagtgtggaaaaatttttatttttcggtatttgtttgtggatgtttttatatgttaagtcgtgagttgggggttagggagagtaagaaatagatttagtttttgttttttagttttgaggatttggttggggtattgataagtgagtagacgtaagtaattgaagtgaatagatgtaagtaattgagtgtaataaatttcgtattgggggtagtttaggtagacgttaagaggattagggagagaaggttataggaagggtttttttggaagtttgggttttaggaggaataggaattttttggattaggtgtgatttttattttcgtttatatttatatttttttatatttattatttatatattcgtatatttatacggttgatgttttattttaggtagtttagttttgtaagttgtttttgttttgtttgtgtttttgagtttgtgttttatgttatcgggagacgatagtaaaagtttatttttgaagttttttgggaatgtatggtttgggttatatttttttttggatttttaaattgggtttttattttgtttttttagttaagttatttttcgtcggttttttcgtttgtttttagattgtcggtattggtatattaattttgttacgtattgattatgtgattttgggtaaagtagattattttttttgtgttttagtttttttatttgtaaaatggggataataatagatttattttatagggttatgaaatggtgaaatggtaaggtacgtatcgtagtgtttagaatagtgtttggcgtggattaggtatttaaaatgttaattgttgtttttattaggatgaaaatgagaaagaagtaaagtcgaagtttgttgttttggtttgttgtttggttgtgaaatggagatgaacgtggtattgagaagataggtaaagaaagtatagttgtggttagaggttaagatatttaggaaatttgggggaagagatttcgggaattttttgtattttttttttaattttttcgttagtttgaaattatgttaaattataaagttaaagaaaatagggtattgttttcgggtgtaagagagataataaatgtttttttgtatatagttttattgtttaagtttttgtttaagatgtttagattttatttgtgattgtttcgttagttttgggagtaggtttaaaggtattaagatagtaaaatttttgtttttttatttaggggtttttaagttttgttttagtataagtttaatttttattatattttaatacgtttatttgtttttaagtttttcggtttttaaaattaatagagtttattttttagaattattgtagattatggaaaaattgagtcgatagtattgagagtttttatatattttttttttttatgtaaaatttttttttttattaatattttgtattagtgtgtagtgttttttttataatgttgatatattattataaattaaagtttatagtatatattgttttattgtttttcggggttttgttttgttttgttttgttttgtgtttgtttgtttgtttggaaataaggttttattttgttgtttaggttggagtagtttggaatttttggatttaggggatttttttgtttttgttttttgagtagtttgggttataagaatatgttattatattaggtttttttttttttatatttttagagatagttttgttatattgtttaagttggttttagatttttaagttgaagttatttttttattttagttttttaaagtgttgggattataagtatgagttattgtgtttaatttttgtagtatagttttgagttttttttttttttttgagatagagttttgttttgttatttaggttggggtatagtggcgtgattttaatttattgtaatttgtgttttttaggtttaagcgatttttattttttagttttttaagtagttgggattataggtgtacgtttggttaatttttgtatttttagtagagacggagtttttttatattggttaagttggttttgaatttttgattttaagtgatttattagtttcggttttttaaagtgttgggattataggtatgagttaatgtatttagttaagttttgggttttaataatgtataatgttatggatttatatatgtagtaataaaaagaatagttttttagtttgggtaatatagtaagattcggtttttattaaaaaatataaataaataataataataaaaaataggttaggtatggtggtgtattgtagttttagttatttagaggttgaggtaggaggattttttgagtttaggagttcgaggttgtagtgaattatgattatgttattgtattttagtttgggtaatagaatgagattttgtttttaaaaaaaaaaagaaaaaaataaagaatagttttatttttttaaaaatttttaattttttatttattttttttggattttggaaattattgatttttttattgtttttatagttttgttttttttagaatgttacgtaattgaaattagaaagtatgtagttttttaatattgattttttttatttagtaatatgttttttaggttttttaatgttttttttaggttttatattttatttttttttgtggttgaatagtgttttattgtatggatgtattatagtttatttattttatttattgaaagatatttttgttgtttttaatttttggtaattatgaataaagttgttattaatatttatgtgtaagtttttgggtggatataagttt

SEQ ID NO: 1017 - DNA, 5397 bp, Artificial Sequence
  chemically treated genomic DNA (Homo sapiens)
tagtataatgaaataacgtggaattaagtaaagttatttaaggatttgttgtatttatattaatttaacgagtataataaaagataaagttgttgtaagtgtttgtttgtttatttagttagttatttaataaatttttattttattgtttataataggttagtttttaaggatgaagagatcgatttaataaaaattttatttttaaggagtttatagtttattggtgaaataaaaaggtgttaattgtattatatttatggaatttaaagttttgttttttttttttttttgagatagggttttattatgttgtttaggttagttttaaatttttgggttcgattgattttttggttttagttttttgagtaaagttttttaaataataatggtaaaaataattattaatttttttaatgtgtagtattattatttatttatttaattatttgaaatggaatttcgttttgttatttaggttagagtgtagtggcgttattttagtttacggtaatttttgttttttgggtttaagtaatttttttgttttagttttttaagtagttgggattataggcgttagttattaagtttagttaatttttgtattttagtagaaatagggttttattatattggttaggttggtttcgaattgttgattttaattaatttatttattttagttttttaaagtgttggggttatagatttgatttattatgtttcgtcgtagtattatttttaatatattttttattttaagtagttttagatttatagagaagttttaagattgttagagagtattttagtgtgttttgtatttagttttttattgttaatattattatggtataattgttataattaaggaattaatattggtatattattaaattttaggttttttttaatttttttagttgtgttcgttgtttttattttgtttttgagtgttatttatgatattatattgtatgtagttattacgttttttagaggtttttttggttgtgttagttttttagattgtgtttgtttttgatgattttaatagttttaaggagtattggttaggtattttgtttttttatttgggtatgtgtagtgtttgtgttatggttaggtagaggttattggttttggggaggaagatgatagggataaagttttttttttattatattaaattaaaggtatatgttgttaatatgatgttttattgttattattgattgggattatttagttgaagtagtgtttgattaggtttttttattgtgaagttattttttttatttttttttttttatatagtttttttttttaaaaagttattttgtatattttatttttaatgaaagggggttgtgttttatttttttgagggtgtagtagttatatatattattttgaatttttgggtataggagattaaaattattaatttttatttggagttttgtattaataaagtttttttttttttttgagatggagtttcgttttgttgtttaggttggcgtgtagtggcgtgattttagtttattgtaatatttattttttaggtttacgttatttttttgttttagttttttgagtagttgggattataggtgtcggttattatgtttagttaatttttttgtatttttagtggagatggggttttattgtgttagttaggatggtttcgattttttgatttcgtgatttgttcgttttagttttttaaagtgttgagattataggtgtgagttattatgtttggttaataaagtttttttaaatatattattttataggtttaatttcgagatagtttatagttaggttggggagattatatttatagaggaaaagttaatgatacgaaaattttataagaaatttaattttgtatatttatgtttatagtagtattatttataatagttaaaggatggaagtaatattggtgtttatcgatagattatggataaataaaatatggtatagatatttaatgaaatattatttagttttaaaaaggaagaaaattgatatatgttataatatggatgaattttgagaatagatattatgttaaatgatataagttagttataaaaagttaagtattgtatattaggtatttaaagttattaaatttataaagatagaaagtagaagcgtggttgtaaggtgttgggagaacgggggcgggggttgggagttgttgtttaatgggtatagagttttagttttgtaagatgaaaagagttttggagatttgttatataatattatgaatgtatttaaggttattgagttgtatatttaaaaaaatggttaagatagtaaattttatgtgtattttgttataattaaatatttttaaaagaaatataattttgaataagaagtattttttataattagttttttaataagaatttatagttttgttgtaaaatagaggttgtaaaatggtatattatatagttgttaatatttgaaaaatttagagattatatataataagtaggattttagttttttttttttgttgttgttgttgttgttgtgttttttgtttttttgtttgtttgtttgttttgagatagttttatttttttgcgtaggttggagtgtagtggtgtaattttagtttattgtaattttcgttttttgagtttaagtaatttttttgttttagtttttcgagtaattgggattataggtatatattattacgtttggttaatttttataaaggtttttttgaaaaatagaatgatcgggtaatgtgagtttaggtgtgttatttggtaattattagttggagttgagtagtatttgttatttttagatagattatgtatgttatagttttatgtgatttttattagttttgatgtattatattttgtttattttatttattggttttgaatttttgggtttaagggatttattgtttgggtttattaaagtgttgggattataggcgtgagttattgtgtttagtttaattttttattttttttagagatggagttttattatgttgtttgggttggttttaaatttttgggtttaagtaatttttttgttttagttttttaaagtgttgggattataagtatgagttattttgtttagttttttatgatagaatttaagtatttagaattttgtgtatttaaggtattaaaataataagttatttggtaatttttttgaaatttttatttaagttttaatttttttagtgtaatataaaggtgttagggggaattagagagaacgtttttatattttttgggaagagaaagtttttgttagaatttagttttttttttgagaatattattttaagagtattttgattaagtttattgtgatttttattttcgaaaattttattttcgatagattttttgaagtgagttaaatttttgtagttttaaggaaatattttttaaggaaaatattttttaagtgcgtaaattagatatatttaattaagagtttaaaattttagtataaataaaattaaacgtggtataagaaggtcgttattgaaatttaagattgtttttatttttttagtgtagagttgggattgagtatgtatgaaaggtgtgtttattttttagttgtttttattttttttatataattgtatttagttttggaaaattgttttgggtaatagtttgtgtttggtattatttgtttttgacgtttaagataggtttgaagttaggtttttaggttgtaatatagagttattttgggatgtttattgaagtattttattaaaaataatgagttatatatatttttattatatgtgtttaggttagggaaaaaggaagtgtgtgatttaggagggggttttatttgtatttttttgggattataggtttgagtttaaggaataaaggttgatttttttaattttatggttcgtttaaggtgtgaaaggatatttttatttttatgggatataaaggagaggatatatttatgtattatgtatttgtgatagatatttattggttgtttttttagaatttgtgttttttttattattgggattttatatttttaagttatgtagttgaggtaggattagggttatttttagttttagggagagttaattagtatatattatattttggttatagtttaaggatgaatatgtgatttttgttagaaagagattgaatttgaaagtttttgattaaataattagaaaagtatagtttgtttttttttgttgtttatgaatagaatatatatagatttaggagtttggatattattttgagattttaatgggaaaggtgtttaaggatggagttaaggaagagttattgaagttattaaaatgtaaaagagtttttatttttggattgtttggttttatgagttaatattttttttttttatttttaataattttaggttaggtttttagttattggtaatagaaaggattttaattaagattttagtgaatagaattcgattttgttaaggtttggtagtttttattttaattattgtttttttattagtatttttaattttttttaagatagattaatttagttatagttatagtagaatatagtcgatttgaaaaaaatatttttaatatttatgtattttagtataaaattttgtttagtggtttattttatattttgttttgtatatattttttaagaggaagttaattttttgattttaagaaatgtaaatgtggggtaatgatgtattaatttaaagatttttcgtaatagaaaatgtttttaaaggggggaaatagggatttttattattaaaagataaaagtaaatttattttttaagatataaggtattggaaatatttagttttacgatatgttattattaggtattttttatttgattgttagaaattatttatttttttaaagatagataataaattgattggggacgtagttttgtattatgtattttttttgttaaaggtaaacgtagaacgttttagagttatgaggatgtttttgtatttgagtttgttagtttttggagttgtttacgtgtatgttatttttatagaaatttttataagtgtattggtgaaagagattttggtattgttttttatttatcgaattttgttgatagttaatgaggtaattttttttatgatttttatagtttgtaaagtgtataggtaattatttgtgatggtttttttattatatatagagatttgttataaataataagattttgagtatattagtatatgggtgataattatattattagtaaatattttgttaaaagttatgaatgttggtgtgttgtaaaaatgattgtatttttttttttttttaga

SEQ ID NO: 1018 - DNA, 5397 bp, Artificial Sequence
  chemically treated genomic DNA (Homo sapiens)
tttggagaggaaaggaaatataattatttttatagtatattagtatttataatttttaatagaatgtttgttggtgatgtagttattatttatgtattaatgtgtttagaattttattatttataatagatttttatatatagtaaaggaattattataaatgattatttatgtattttatagattgtaggaattataaagaaaattattttattggttattagtagagttcgatgagtagaaagtagtgttaaggttttttttattaatgtatttgtgggaatttttgtggggatggtatatacgtaggtagttttaagagttagtaaatttaaatgtagaagtatttttatggttttgaaacgttttgcgtttgtttttggtaaagaaagtgtatagtataagattgcgtttttagttaatttattgtttgtttttgaggaaatgaataatttttaataattagatagagaatgtttaataatggtatatcgtgaaattaaatgtttttaatgttttatattttaaaaaataaatttatttttattttttaataataaaaatttttgttttttttttttaaaaatattttttattacgaagaatttttgggttaatatattattgttttatatttgtattttttaaaattagaaaattaatttttttttaaaagatgtgtgtaaaataaagtataaggtagattattaaatagaattttatgttaaaatatataaatattgggaatgttttttttagatcggttatgttttattatgattgtggttagattaatttgttttaaaagaaattgaaaatattggtgggaagatagtgattgaaatggaaattgttaagttttggtagggtcgagttttgtttattggggttttgattaggattttttttgttgttagtgattaaaaatttaatttaaagttgttgaagataaagagggaaggtattggtttatagaattaaatagtttaggaatggaggtttttttatattttgatggttttagtgatttttttttgattttatttttgggtattttttttattgaggttttaagatgatgtttagatttttggatttgtatgtattttgtttatgagtagtaggaaaaagtaagttgtgtttttttgattgtttaattaaaagtttttaaatttagtttttttttgataagggttatatgtttatttttgaattgtgattagggtgtagtatatattgattggttttttttggagttagaggtgattttaattttattttaattgtatagtttagaaatgtggggttttagtagtaagggggatatagattttaggaaggtaattaataaatatttgttatagatatataatatatggatgtgtttttttttttatgttttataagggtggaggtgtttttttatattttgggcgggttatgaaattaggggaattagtttttgttttttaggtttagatttgtaattttagaaaggtataaatgaggtttttttttagattatatattttttttttttttggtttgaatatatatgatggaggtgtatgtggtttattgtttttaatagagtgttttagtgagtattttagagtggttttatgttgtagtttagaagtttgattttaggtttgttttgagcgttaagaatagatggtattaaatataaattgttgtttagaatagttttttaaagttaggtgtagttgtgtaggagaagtagaggtagttgggaggtagatatattttttatatatatttaattttagttttgtattggaaagataaagatagttttggattttagtggcggtttttttgtattacgtttggttttgtttgtgttgaagttttggatttttggttagatgtgtttgatttgcgtatttgagaaatgttttttttgagaaatgtttttttgagattgtagaagtttggtttattttagaaaatttatcgggagtgagattttcgggagtaggaattataataggtttggttaaagtgtttttaaaatggtatttttagaaaagaagttgagttttggtaggagttttttttttttagagaatatgagagcgttttttttgattttttttgatatttttatgttatattgaggaagttagggtttaggtgaaagttttaggggaattgttaaataatttgttattttagtattttaaatatataaagttttgagtgtttaaattttattataggaggttgggtaaggtggtttatgtttgtaattttagtattttgggaggttgaagtagaaggattgtttgagtttaggagtttgagattagtttaggtaatatagtgagattttatttttagaaaaaataaaaaattgggttaaatatagtggtttacgtttgtaattttagtattttggtaagtttaggtagtggattttttgagtttaggagtttaagattagtgagtgaaatgggtagggtgtaatatattaaagttggtgggggttatatgaaattatagtatgtatgatttgtttaaaggtggtaggtgttgtttagttttagttgatggttgttaggtgatatatttgggtttatattattcgattattttgttttttaaagaagtttttataaaaattagttaggcgtggtggtgtgtgtttgtaattttagttattcgggaggttgaggtaggagaattgtttgaatttaggaggcggaggttgtagtgagttgaggttgtattattgtattttagtttgcgtaagagagtgagattgttttaaaataaataaataaataaaaaaataaaaagtataataataataataataataaaaaaggaaggttgaaattttgtttattatatataatttttggattttttaaatgttggtaattgtataatgtattattttgtagtttttgttttatagtaaaattgtgggtttttattggaaggttagttataaaaaatattttttatttaaaattgtattttttttagaaatgtttaattgtggtaaaatatatataaaatttattattttaattatttttttaagtgtatagtttagtagttttaagtatatttataatgttgtgtgataaatttttaggattttttttattttgtaaaattgaaattttgtatttattaaataatagtttttaattttcgttttcgtttttttagtattttgtaattacgtttttattttttgtttttatgaatttgatgattttaggtatttgatatatagtatttggttttttgtgattggtttatattatttagtataatgtttatttttaagatttatttatgttgtagtatgtgttaattttttttttttttaaggttgaataatattttattggatgtttatattatgttttgtttatttatggtttgtcgatggatattaatgttgtttttattttttggttattgtgaataatgttgttatgaatatgggtgtataaaattaaattttttataaagttttcgtgttattaattttttttttataagtgtgatttttttaatttgattgtaaattgtttcggagttggatttgtaaaataatgtatttgaaagagttttattggttaggtatggtggtttatatttgtaattttagtattttgggaggttgaggcgggtagattacgaggttaggagatcgagattattttggttaatatagtgaaattttatttttattaaaaatataaaaaaattagttgggtatggtggtcggtatttgtagttttagttatttaggaggttgaggtaggagaatggcgtgaatttgggaggtggatgttgtagtgagttgagattacgttattgtacgttagtttgggtaatagagcgagattttattttaaaaaaaagaaagagttttattaatgtaaaattttaaataaaagttaatgattttaattttttgtgtttaagaatttaaaataatgtatgtagttattatatttttaaggagatggaatataatttttttttattaagagtgggatatatagagtgattttttaaaaaagagaattgtatggaaaggggagaataagaggaataattttatagtggagaaatttgattaaatattattttagttaggtgattttagttaatggtggtagtgaaatattatgttaatagtatgtatttttgatttgatgtgataagaaaggaattttatttttgttatttttttttttaaaattagtaatttttgtttaattatgatataaatattatatatatttaaatggaaagataaaatgtttgattagtattttttaaaattgttaaggttattaaaaataagtatagtttgagaaattgatatagttagagaggtttttaagagacgtgatgattatatataatgtggtattatggatgatatttaggaatagaataaggataacgggtataattaagggaattggaaaaagtttggagtttagtaatgtattaatattagttttttagttgtgataattgtattatagtaatgttaataatgggaaattgggtgtagggtatattggaatgttttttaatagttttgaaatttttttataaatttaaaattatttaaaataaaaagtgtattaaaaataatattgcggcgaggtatgatgggttaggtttgtaattttagtattttgggaggttgaggtgggtggattggttgaagttagtagttcgagattagtttggttaatatggtgaaattttgtttttattaaaatataaaaattagttaggtttggtggttggcgtttgtaattttagttatttgggaggttgaggtaggagaattatttgaatttaggaggtagaggttgtcgtgagttgagatagcgttattgtattttagtttgggtgatagagcgagattttattttaaataattaaataaataaataataatattgtatattgaaaaagttaatgattgtttttattattattatttaaaaggttttgtttaggaggttgaggttagaggattaatcgggtttaagagtttaagattagtttgggtaatatagtgagattttgttttaaaaaaaaaaaaaaagtagaattttgaattttatgagtgtaatgtagttggtatttttttattttattagtagattatgagttttttgagaataaggtttttattgaatcgatttttttatttttgaggattagtttattgtagatagtaaaataaagatttgttaaataattaattgaatgaataagtaggtatttataataattttattttttgttgtattcgttgagttaatgtgaatatagtaggtttttgaataattttgtttagttttacgttattttattatattg

SEQ ID NO: 1019 - DNA, 6290 bp, Artificial Sequence
  chemically treated genomic DNA (Homo sapiens)
cgatttattagagttttaaatttttgggtttaagttatttttttattttaattttttaaagtgttggtattataggttaaagtgggttatttttttttttattgtttggttttaagagtttttgatatattttaaataaaagttttttgttagatatatttttgtaaatattttttttatgttgtggtttgtttttttatttttttgtattttattttattttattttagatagagttttgttttgttgattaggttggagtgtagtggtacgattttagtttattgtaattttcgtttttcgagtttaagttatttttttgttttagtttttgagtagttgggattataggtattcgttattatatatggttaatttttgtgttttttagtagagatagggttttattatgttggttaggttggttttaaatttttgattttaggtgatttgtttattttggttttttaaagtgttgggattagagacgtgagttattgtattcggtttttttttattttttttatggtattttttgaagtataaaagtttttaattttggtgaaatttagtttatttattttttttttttgttgtgtttgtttttgtattttattgaagaaattattgggtaggtgcggcggtttatgtttgtaattttagttttttgggaggttaaggtgggtggattatttgagattaggagttcgagattagtttggttaatatggtaaaattttatttttagtaaaaatataaaatttagtcgggtgtggtggtatacgtttgtaattttaatttttcgggaggttgaggtaggagaatcgtatgaatttaggaggtaggggagttggtagtgagttgagattatattattgtattttagtttaggcgatagagtaagattttgttttaaaaaaaaaaaaaaaaaaaaaaaaagaaagaaataaaatgaaggttatgaagatttatgtttatgtttttttttaagaattttgtagttttgttttttatttttaggtttttgattttattggaatttatttttgtttatgttgcgaggtatttttttgtatgtggatatgtattatttattgaaaggttgatttttttttcgttgaattgttttgatatttttgttaaaaattaattgattttaaatgcgagagtttatttttgatttttaattttattaaattgatttgtatgtttttaatattttttaaaataattttttttgtttgtatttgtatagaataaaacgtttgtaaatatagaaatatagaataaaagtaagagaaatattaattttgtcgtggtagaatgaattgttggttttatttttttattttttattaggagttgtttatgtttatatttttattatggttttattatggtggaatgtattttgggtttcgtttatttgatttcgggtttggttatgtaatttgtttagttttttgagatgttagggaatgtgatatgagtagatgtttgatgcgtgtttgtgtagttggttttgtttttttgtatttttgttgttattataaaaagattatgttttgggtagttattggttttaaatgaatggtagatatttggaataaatttgaatttattttgtgatttggattttagtttaagattaagtagattttagttaaaatttagatatatgggttataaatatatgtttattatagtttattattgagggatttgtggttgtttgttttgtagtaatagttgattaatatatttattatttagagataattatttttgttagtttgattttttgattaaaaataagattgtaaaaaaaaattatatgtgtgtatatttttttgttgtttttatttaatatttttttataatattttatgttattaaaagtttttgattggtttatatttgtaattttagtattttgggaggttaaggtgggaggattataagttaggagtttgagattattttggttaatatggtgaaattttttttttattaaaaatataaaaattatttggtatggtggtatatgtttgtaattttagttatttcgggggttaaggtacgagaattatttgaatttaggaggtagagattgtagtgagtcgagattttgttattgtattttagtttgggtgatagggtattattttgttttaaaagaaaaaaaaaagttattgataaatattttttttgatatttatattatatattttaattttgagtagttatatatttttttttattatttttatagtatttttattattttattattgtaaaggtataatgaattttgtttttttttgtataaattttgatttatatttttttattatttttatggaattaagttttagaagttgatatttttaataagtttttttaattaaagtttatggtagagttattgaattatgattttcgttttattattatttatatttttatttggttaaatttatattgttttgtttaaaggatgtagatatatttaattttattttttaaaaaaacgatttttgtgaatttttttagtatgttttattatattgtttttggatatttatattttattataaagaattaaattattgttataaaaaattaaataggtttcgtttagtggtttacgtttgtaattttagtattttgggaggtcgaggtgggtggattatttgaggttaggagtttaagattagattgattagcgtggtgaaattttatttttattaaaaatataaaaaaattagttgggtgtggtggtaggggtttgtaattttagttatttaggaggttgaggtaggagaattagttgaattcgggaggtggaggttgtggtgagttgagatcgcgttattgtattttagtttaggtaataagattgaaattttattttaaaataaataaataattttttttaatttttcgttaaaaaaaaaaaaagtttttgttttttattttttcgtttgtgtttatatagaaatatagagatagtgtttttgtatgagtatgtgtttgttttgtttgtttgtttgtttttattggcgtagttaattaaagattatatatttaggaaggtggtatggaaggagtagttagatttaattttttttatattttttatcgtgtttagtatagtgtataggtgtatttaatgaatatttgagtaaatgaatgtaagaaatatatagattattggttgagtgtggtggtttatatttgtaattttagaattttaagaggttaaggcgggtgtattatttgaggttaggaatttgagataagtttggttaatatggtgaaattttgtttttattaaaaatataaaaaattagttaggcgtggtggcgggtgtttgtaattttaattattcgggaggttgaggtaggagaatcgtttgaatttgggaggtagaggttgtagtgagtagagattgcgttattgtattttagtttgggcgatagagtgagattttattttaaaaaatatatatatatatatatagagagaggttattaaagtaggtttttaagttagaaattattgtttttttaatgattaataagtatttttaaggttttattagtgataaatatgttatatgtataaatagatgggtaggatttaaaagagtaggttagatagttgatattatatttaaatttttttgggtgttttttagtaaataaatggatttttttttgttttttgttttatttttttttttttcgaggaaaattatattttttaggtttgataataatttttaatttgataataattgtttcggttttattttggtaattgttaaaatggttattttgggaattttaggtatatacgttgattgtatttgtatagtttttatattgagttttttggaaattgtttttaggaagtttgttttttattttataaatagaattattgatttaatttgggttattatttttttgtatttgttttgtttgagatttttttagttagtttttaaggagatagggaattttgtattatttatcgtttaggttagattgaaggtttttttttaaaggtaattatttattattttttgttttgggttatataataagtattatttttatttatttatacgttaagttatttttttaaagttagttttgttagttagttatttcgaaattttttagaaggaattaaatagaaatggaataaaggataggaaaagttaaggaggtttgttgaaattgaagtattttgaagatagttgggtggtaaaatggatgtgacgtgaggaaggtggttttgggtgtatttatagattaatattgttattgttataatttgtgtaggatgattttaggtgatagatagtagtaatttattatatttagaaacgtattttttatatatatttatttgagggtattagatttgtttataaagtagagaagagttaaggcggttttttaagggtagagaattgttgttattgtttagtgagtggggagagggtattttttaggttttattttttattaaattatgtgttagtgttgtttaggagatagaggtatagtaattattgtagttaaataaggtatataaataaaatagaaatgtaacgttttagagtatttacggaaaatttgtttattttgttattatgagtaaaagttaatttttatttttgaagagagtaaattaattttgaaagagagtgaaaatgtagataagatagttattagataatggttatttggacgagagattttttcgtttgatagtagtttggttgttgggagttttagtttagtttttgtatagttgttttgtataaatttttttttatatttgtttagagaaaacgtgttgttattttattatgaaggaagttgtttgagagtttttaattattatagtcgtgatgatgaaagagtgaagaatcgtttttaagttaaaaagtgtatttagagataaggttcgtttttaatgttttgtcgttgttttttatcgtatggttatcgtattttttagtaagtgggaattaaatgttttatttattatagagtaagtaaataaatattttttttttatgatatgggttgtaataatattttgtgttttattttttaataattttattatatttagggtggggaggagggttaggaaaagtaagaaataatgatttttaaatatatgataaatttgtaaataataaaaaggggaaataaaattttttataattttattattattagtagggatagaattaataatggttttattaaatttgtattattaggtaggttatgttgattttgggtataattttttatttttgtgttttggtttagtaagtgagatgtgtaaattcgtggtaaggtgagttatatgaaaataatatttatggttttgttagtgtttatattaatataagatatttgttttttatcgttttagataattatgtaattaaaatgagaatatatattttgttaagattttttagaaaataaatgagtttttaaaatagggtatagggtttaataaaatattttaggaagttttagagttaagtaagaaatttataaataaagaaataataataaaaagtagagagaggtattttatttaattgaaggaggcgttttgttttttttttttggtaggggtttttggatttttaagattgttttattgtatataaaatgtatttaaatttgttgaaatatgttatttggttttgtgtttattaatgtatttatttaaagtaaggtaagtatatttttatgtagatagaaaaaaggatgaaatggaattaaaaaaaagggggaaaaaggagagatagagcgagaatattttaatatttttgagtttaaaattaataaatatatgaaaagtgatggtgtttttatagttatgtgaataatgtatttagtatttgttttaatgaattattatattgaatattttattatttggtatgatttttattttaagtgaatatgtttttttttatggttatcgaaaaaggaatttatgtagttatttgttagaagtttgtattttaaagtaaaataaagttttagaagttaaattattttatttgtttatattatttgaaatattgtatgggaaatttttaggtaaaatattaaaagtgggttaggtttgttatatattttttagtttgttgtttttttgatttaatttatttttttgttaggttttatcgtatattgtatattagggttgtgtattaatttgtttttattttatatagg

SEQ ID NO: 1020 - DNA, 6290 bp, Artificial Sequence
  chemically treated genomic DNA (Homo sapiens)
tttgtgtggaatagaagtaaattagtgtatagttttaatgtgtaatgtgcggtgaaatttaatagaggaatgagttaggttaggagagtagtaggttggggagtgtgtaataagtttggtttatttttggtattttgtttaaaaattttttatgtagtgttttaaataatataaataaatgaggtgatttaatttttaaaattttattttgttttgaaatgtaaatttttaataaatagttatataaatttttttttcgataattatgaaagaggatatatttatttaaaatagaaattatgttaggtaataaaatgtttagtatggtaatttattaaagtaagtattaagtatattatttatatggttataaaagtattattattttttatgtgtttattaattttaggtttaagggtattaaaatattttcgttttgtttttttttttttttttttttttttggttttattttatttttttttttgtttatatggaaatatgtttattttgttttaggtaaatatattagtgaatataaaattaagtgatatattttagtaaatttgggtatattttatatataatgaaataattttggaaatttaagaatttttattagaaagaaaaagtagaacgttttttttagttagataaagtgtttttttttattttttgttgttgtttttttatttgtagattttttgtttaattttgaaattttttgagatattttattaaattttatattttattttggaagtttatttattttttaagaaattttggtagaatatatgtttttattttaattgtataattatttggagcggtggaaaatagatgttttatattgatgtaagtattaataaaattataggtgttgtttttatatgatttattttgttacggatttgtatattttatttattgagttaaaatataagaatagaaggttatatttagaattaatatgatttgtttaatgatgtaagtttaatgggattattattagttttgtttttgttaataataatagaattataaggagttttgttttttttttttgttgtttataagtttgttatatatttagaagttattgttttttgttttttttaatttttttttttattttgggtgtagtgaaattattaggaggtggagtatagggtattgttatagtttatgttatagaaaaaagatatttatttgtttattttgtggtgagtgaagtatttgatttttatttattgagaaatgcggtggttatgcgatgagaagtagcggtagggtattgagaacgaattttatttttgggtgtattttttaatttagaggcggttttttatttttttattattacggttgtaatggttaaaaatttttaggtagttttttttatgatgggatggtaatacgttttttttaagtaaatatggaggaggatttgtatagagtaattgtgtaggagttgaattggaatttttaataattaaattgttgttaaacgaaagaatttttcgtttagatagttattatttgataattgttttgtttgtatttttatttttttttagagttggtttgttttttttaggagtgggaattaatttttatttatggtgataaggtaaataagtttttcgtgggtattttaaagcgttgtatttttgttttgtttatgtgttttgtttggttatagtagttattgtgtttttgttttttaggtaatattgatatatgatttgataggaagtaaggtttgaggagtattttttttttatttattaggtaatagtagtaattttttgtttttagagaatcgttttagtttttttttgttttgtgagtaggtttggtatttttaagtaaatatgtgtgggggatgcgtttttgggtgtgataaattgttgttgtttgttatttgagattattttatataaattgtaataatggtagtgttggtttgtgggtgtatttaagattattttttttacgttatatttattttattatttagttgtttttagaatgttttaattttagtaaatttttttggttttttttgttttttgttttatttttgtttgattttttttggggaatttcgaggtggttagttagtaaagttggttttaaaaaagtagtttagcgtgtgaatagataagagtagtgtttattgtatgatttaaggtagagagtagtaagtagttgtttttggaaggagatttttagtttagtttaagcgatgagtgatgtaggattttttgtttttttaggagttgattgggagagttttagatagagtagatgtagaaagatggtggtttaggttggattagtggttttgtttgtgagatgagagataggttttttggaggtaatttttaaaaggtttagtgtagaagttgtgtaagtatagttagcgtgtgtgtttggggtttttaaggtgattattttagtagttgttaaaatgaaatcggagtaattgttattaggttgaaaattgttgttagatttgaaaaatgtgatttttttcggggaaaggggaagtaaaataaggaatagagagagatttatttatttgttaagaggtatttagaaaagtttagatatagtattaattatttggtttatttttttaagttttgtttatttgtttatatatgtaatatatttgttattaatgaagttttaaaaatatttattaattattgggaagatagtaatttttggtttaaaagtttgttttaatggtttttttttgtatatatatatgtatattttttgagatgaagttttattttgtcgtttaggttggagtgtagtggcgtaatttttgtttattgtaatttttgttttttaggtttaagcgatttttttgttttagtttttcgagtagttgggattataggtattcgttattacgtttggttaattttttgtatttttggtagagatagggttttattatgttggttaggtttgttttaaatttttgattttaagtgatgtattcgttttggttttttaaagttttgggattataggtgtgagttattatatttagttaatggtttgtatattttttatatttatttatttaaatatttattgaatgtatttatgtattatgttaggtacggtgaagggtataaagaaaattagatttggttgttttttttatattatttttttgggtatatgatttttaattaattacgttaataaaaataaataaataaataaagtaaatatatgtttatatagaaatattgtttttatgtttttgtataagtataaacgaaaaaatgagaggtagggattttttttttttttggcggggggttggggggggttgtttgtttgttttgagatggaattttagttttgttgtttaggttggagtgtaatggcgcgattttagtttattataatttttatttttcgggtttaattgatttttttgttttagttttttgagtagttgggattataggtttttgttattatatttagttaatttttttgtatttttagtagagatggggttttattacgttggttagtttggttttgaatttttgattttaggtgatttatttatttcggttttttaaagtgttgggattatagacgtgagttattgagcgaggtttgtttggttttttatggtaataatttaattttttataataaagtgtaaatgtttaaagatagtatgatagaatatgttggaagaatttataaaagtcgtttttttaaaaagtgaaattaaatgtgtttgtattttttaagtaaaataatgtgagtttagttaaatagaaatatgaatagtaataaaacgaaaattatggtttagtggttttattatgaattttggttaaaggagtttattaaaggtattaatttttagaatttgattttatggaaataatggaaaaatgtagattaagatttatataaaagagagtaaaatttattgtatttttataatagtaaaatagtaaaagtattataggaatggtgaagagaaatatgtaattgtttaaggttgaaatatgtgatgtggatgttaaaaggaatgtttattaataattttttttttttttttgagatagggtggtgttttgttatttaggttggagtgtagtggtaggatttcggtttattgtagtttttgttttttgggtttaagtgattttcgtgttttagttttcggagtagttgggattgtaggtatgtgttattatgttagataatttttgtatttttagtagggagagggttttattatgttggttagggtggttttaaatttttggtttgtgatttttttattttggttttttaaagtgttgggattataggtatgagttaattaagaatttttaataatatagggtattatgaaaaaatgttaagtaaaaataataggagggtatatatatatgtaatttttttttatagttttatttttggttagaagattagattaataggaatagttatttttaggtggtaggtgtattagttagttattgttatagaataaataattatagattttttagtggtaaattgtgataggtatgtatttgtagtttatgtgtttgagttttgattggggtttgtttaattttgggttgggatttagattataaagtgagtttagatttgttttaagtatttgttatttatttggaattagtggttatttagggtataatttttttatggtgatagtaaaagtgtaagagagtaggattaattgtataagtacgtattaagtatttgtttatgttatattttttgatattttaagaggttgagtaaattgtatggttaagttcggagttaaatggacgaagtttaaagtatattttattatgataaggttatgataaggatgtggatatggataatttttagtggggagtgaagaaatgggattaatagtttattttattacggtagggttagtgttttttttatttttattttgtgtttttatatttataaacgttttattttgtataaatgtaggtagaaaaagttattttaaaaaatattagagatatatagattaatttaatagaattgagagttaaaaataaattttcgtatttagggttaattgatttttgataagagtgttaagataatttagcggggaaaagattagttttttaataagtggtgtatatttatatgtaaaagaatgtttcgtagtatagataaaaatgaattttaatgggattaaagatttaaaagtaagaggtaaaattataaaatttttagaagaaaatataggtataaatttttatgatttttattttgtttttttttttttttttttttttttttttttttgagatagaattttattttgtcgtttaggttggagtgtagtggtatgattttagtttattgttaatttttttgttttttggatttatgcgatttttttgttttagtttttcgagaagttgggattataggcgtgtgttattatattcggttaagttttatatttttattagagatggggttttgttatgttggttaggttggtttcgaatttttgattttaggtgatttatttattttggttttttaaagagttgggattataggtatgagtcgtcgtatttatttaatggtttttttaataagatataaaagtagatataataaaagaaaaaaatagataaattggattttattaaaattaaaagtttttgtgttttaaaggatattatgaagaaagtgaaaaaagatcggatgtagtggtttacgtttttaattttagtattttgggaagttaaggtaggtagattatttgaggttaggagtttaagattagtttgattagtatggtgaaattttgtttttattaaaaaatataaaaattagttatgtgtggtggcgggtgtttgtaattttagttatttaaaggttgagataggagaatggtttgaattcgggaggcgaaggttgtagtgagttgagatcgtgttattgtattttagtttggttaatagagtaagattttgtttgaaataaaataaaataaaatataaggaagtgaaaagataagttatagtatgggaaaaatatttgtaaagatatatttgataaggaatttttatttagaatatgttaaaaatttttaaaattaaataataaaaagaaaaataatttattttagtttgtaatattagtattttgggaggttgaggtgggaggatagtttgagtttaggagtttgaggttttggtgagtcg

SEQ ID NO: 1021 - DNA, 5243 bp, Artificial Sequence
  chemically treated genomic DNA (Homo sapiens)
taaattaatttaggtgtatttatttttagaaataatggattttaatgttttagaattatagagttagagtttttaatatgtttaaagtatttcgtggaaattattttattatgaagattagaatggtttttttttatggatttagtttgttaaggaggtttagtttagagggattaagatattttttttttagtaaataattaattaaaagggtaaggaagggaggtaaaagacgttataattaggttagtagaattttttggtttggttattatatgtgatgattttaaatgggtttttagtattttaattttgagggaaaagagtagaggaaattagttaatgttttgtatgtttagtttttgttgatgatattgaatttagagaattgagatttttggagaaattaaagatggtttaaatgattcgtgataataaatgaacgtattattgttcgttgataaattgaagttttttaattataaagtagaattagtggttattattatagaaagtttattttatagatggagaagaggtaaagtattgaaatttagttcgagggatttttttagttatgggggtagggttaaatggggtttttttaggattagtaaagttattttttttattagtaaattagttttagagaagtttgtaattagggtatttttttttaagtttagagatttagggaaaggggtacgggggtgttttaaggtaaagagaatttatattttttgttttcggagaggttattttttttttaagatgtttgggattttttattttagtagggggaaggtaagttatatagtaaaataatgagggtatagaatagatgatttttttatagagttttgaatgagaaatatagtagggtagatgtgttttttttttagtttaggaggagttaggtttagtttttgaatatttttttttttagaaaagttgaggttagattaagaatttattagattaaggagttataataggatattagagttgaggttgtaaagttaggattgagattagattaggtaggaaattgttaagagttttggttattaggtttggttgttttttaatattagttggttttttttaaattgatatattatatgtttttaaaattttttttttaagtaatattattattaaagtaggatattttttagagttttagagtttggtgtttgtttagtgggatttaattttagaagaagttgttaaattatttattgttttagtttataaattttttacgatttggtaataagtgaaattatattttggtagtaattgtaagttttttagtatttaggatttttcgtttttttttgttgtatttttttttgttaaattatagatttatttatttttaatttttagaatatagagaaagagtataatattatattttaatttttgagacgtggagaatatttttttttttgagagtttaagtattaaatggaagttattttttttttttggttttaaatgtattattagattttgaattggattttattattacgtaagaaagtagttatgggtagtaattttgggagatttagataggatatgttagttttatattggtggtataggaagttaagttgttgttttttttttgtgtatttttatttgtttggttttttttgattttagttggcgtttattttatattagttatgatgtaatttagtaattaaagtattagttaataaatgttgatagtatagttttttttggttacgtatttatattaaaatacgggggagagttggggggagagggggatatatgggaaatttttgtatttttttttttattttgttatgatttaaagttgttttttaaaaaatataaggggttgggtatagtggtttacgtttgtaaatttagtattttgggaggtcgaggcgcgtggattatttgaggttaggagtttaagattcgtttggttaatatggtaaaatttcgtttttattaaaaatataaaaagtagttgggcgtggtcgtatgtatttgtagttttagttatttaggaggttgaggtaagagaattgtttgaatttgggaggcggcggttgaagtgagttaagattatgttattgttttttagtttgggtaatagagtaagatttttttttaagagaaaaaataaaataaaataagaaaaaataaagaatgagttttttacgcgaaaaatttattgagatgtaaaggaaggaagttattattgtggaattgtatatgttagttatattaacgtttttggagtaaggtagagtttattttttttataagtaaattttagtttaaagtattgatattaataaagtgttatgttgcgatgtgtagggggtagatagtgtttttaagttttttatatatatgtttttttatagtttgtttttttttgattttagaagtattaggtttttttattttcgagggttattattaggagtttgaattaatggtaattattatgtatagggaaggttgtggaattttgatataaaaatatttagtggagggtttggaaaaagtttagtaggagtaagacgtaagttggattaattatttaaaataagagatttggtttggggattttaatgtttttaaaaaagaaaattattattattttttattttgtattttgtgttataaaatatttttaataaaatatagaattttattttttttgagggaaaatgattgggagattagtttattgttggtatagaggtttggtttatttataatttttttataggtaagatattaggtgaatcgatatagtcgagttggaagagttttttaaggtagagattttgagttaaggaatgtttaaagagttagtatgtattgtgggattattatgcgttaggaattttttatattgtattacgttttatttttataatagttttagaaaggaagaattattattattttcgttttataggtgaataaataagggtataggtttttgatgtaatagttaggattaaatagttgggaagacgagaaaattttttttaggttaggataatagaggatttggttgaaaatataggtaattaggtgttatttttgggaaaaggggttaggagaggaaggagatatttttttttgtatgttttgatgttttatttgaatattttattatgaatacgaattttttatttaaaaaatattttttattgaaaagataaatttgtgtgttgtattgtgttatttagtttaagtatttgaaatttattgaattgtattttttaaaaaatagatagttgagtaaaagtaagtttatattatatagacggattatagtgtacggttgcggagttgggagtagtggtttcgttttatgtaggaaagagaatttggtttaggagtgtttacgttgtttaagataggagagtattaaaaatgaaattatttagttatttttttttatttttatttttatattaaagaattttatcgcggtagaggattatcgtttttgtttagataatcggtgaagaatggatgattttattttttttaataggcgggttttgaaatgttatgtacgaaataaaatttgagtaaatgtttaatagaggttattgttttatcgattttgaagagatttttttttagtaaagtaaagaaatcgattgtgaaggtaatattatgtttggtaaataagtgttttggtgttgtgtaagggtttggttttagtttgaagttattttagagttgtttgggtttttggagattggagggataatttagtttagagtttatttgtatgagattaaggatttttttgtaagagatattattttgagggaagagggtttttgaattagtttgatttaataagaaatttttgggtgtcgacgcggaagtagatttagagtttagagtcgtgtttgcgttcgtagtttttttttagttttttttgattttaaattaagatttatagggagagggagcgataaatataaattttgtaagatgttataaggtttttttttgatatttttaataaagaggtgagtagtattttttttttttttgttttgaattaagtgggttttagtaattttagggttttaggagatttggggtttatgtaggtgttttagtgaaatagtggtgaagagatttagtggtaatggggagagtattggtagtataaggtaaatttttggtatagagagtaaagtttttattgggaggatttttaaggggttatttgggagagggtagggtagtagttaattttttttaagtgggttgaagtaggtgaagaaagtggtagaagttacgcggtggtaaaaaggagttatatattttatttggagacgttttgaagtaattgtacgaaatttgaggatggttaggtagttttataatagtcgtttatagggagagttagaatatagaagaatttagatgattggtagtattattttttttataattttaggtttggggggttgcgatggagttagaggaaatttagtttagaatatttttggtttttataaatataaattaattggaacgttaaattttagtttgttaatttggttattgaaaaaaaatttttttttttttaaaaaatatagttttagtttattttttttttttttgtaaaatttcgtgtatgattttagttttattttttgttaagatatgttaaagtgttgagttattaataaaagaaaaaaagaaagtaaaggaagagtggttttgttttttagcgttagttttaatgacgatttaagttgtatttttttttttagttgtgttttgttatgttaaaggacgttatattgtataattttaataaggtttttaattagttttattcgttttggttttatttttattttttaataaagatttattaaatgtgggatttttttatgagttttaatattagagttttaatttttaataaatataggattggagatgtttgaggtttattttgttttcgagtttatcgggaacgaaagagaagttttattttttttttaggagtttagttatgaattttttttttataagtaagtgtaggaaatttttagttttggaattgttagcgcggtcgagttttgtgtgagggaggggtgtgtggtttagggagggttggcgggcggttacgagtagaggtaggtttttagttgtgttgttagtttatttttgcgttcgttttttttcggtatagg

SEQ ID NO: 1022 - DNA, 5243 bp, Artificial Sequence
  chemically treated genomic DNA (Homo sapiens)
tttgtgtcggaggggagcgagcgtaggggtgagttgatagtatagttgggagtttgtttttgttcgtggtcgttcgttagttttttttgggttatatattttttttttatatagggttcgatcgcgttggtagttttagggttaaggattttttgtatttatttgtggagaaggagtttatagttgggtttttggaggggagatagagtttttttttcgttttcggtgggttcgagggtagaatgagttttagatatttttagttttatatttattgggggttgagattttaatattgagatttatgggaaaattttatatttgataaatttttgttggagggtgagggtggggttagagcgggtggggttgattggaaattttattaagattgtgtaatgtgacgttttttagtatggtaagatataattagggggaaaagtgtagtttaggtcgttattgaggttagcgttaagaagtagaattattttttttttatttttttttttttttttattagtgatttagtattttggtatgttttgataaagagtaaagttgaagttatgtacgaagttttataaagagaaaaaaaataagttaaagttatgttttttgaaaaaaaaaaaatttttttttagtgattagattaataggttagaatttagcgttttagttaatttgtatttgtaaaaattaaagatgttttgaattgagttttttttgattttatcgtagttttttaagtttgggattatgaagaaggtaatattattagttatttgagtttttttgtgttttggttttttttgtgagcggttgttgtagaattgtttggttatttttaaatttcgtgtagttattttaaggcgtttttaggtggagtgtgtgatttttttttgttatcgcgtggtttttgttattttttttatttgttttagtttatttagaggaggttggttgttgttttgtttttttttaagtgattttttgggaatttttttagtgaggattttgttttttgtgttagaggtttgttttgtgttgttagtgttttttttattgttattgagtttttttattattgttttattggggtatttgtatgggttttaggttttttggagttttgaaattattgaagtttatttggtttagggtagaaagggggagaatattatttatttttttgttggggatgttaaaggaggattttgtggtattttgtagagtttgtgtttatcgttttttttttttgtaagttttgatttgaaattaaaagaagttagaaggaaattacggacgtaggtacggttttaggttttgaatttgttttcgcgtcggtatttaagaattttttattgggttaagttggtttagaagttttttttttttaggatggtgttttttgtaggaggatttttggttttatgtaaatgggttttagattaggttgtttttttagtttttagagatttagatagttttgagatggttttaggttgaaattagatttttgtataatattaaaatatttatttattaaatatggtgttatttttataatcggtttttttgttttgttaagaagagatttttttaagatcgataaaatagtgatttttgttgggtatttatttaagttttgtttcgtgtataatattttaggattcgtttgttggggaaagtgaggttatttattttttatcgattgtttaaatagagacggtggttttttgtcgcggtgggattttttggtgtgaaaatgaaaatgggggaggatggttggatggttttatttttagtgtttttttgttttaagtaacgtagatatttttgaattaagtttttttttttgtatgaaacgaagttattgtttttagtttcgtagtcgtgtattgtgattcgtttatgtaatgtgagtttgtttttatttaattatttattttttagaaaatataatttaataaattttaagtatttgaattgagtgatataatataatatatagatttatttttttaataaaaagtgttttttaaataggaagttcgtgtttatgataaaatgtttaaataggatattagggtatgtagggaaaagtgtttttttttttttttggtttttttttttagaggtagtatttaattgtttgtatttttaattaaattttttgttattttagtttgggaaaggttttttcgtttttttagttgtttgattttggttgttatattaaggatttgtgtttttgtttatttatttataaaacgggggtaataatagttttttttttttagggttgttgtgaagatggaacgtgatgtagtgtaaaaaatttttggcgtatagtaattttataatatatgttagttttttgaatattttttggtttagagtttttgttttggagagtttttttagttcggttatatcggtttatttggtgttttgtttatgaaggaattatgaatgaattaggtttttgtgttagtaatgagttggttttttaattatttttttttaaaagaaatgagattttatgttttgttgaaaatgttttatggtataaagtgtaaaatgaaaaataataataatttttttttttgagaatattaagatttttaaattaggttttttgttttagataattagtttagtttgcgttttgtttttattagattttttttaagttttttattaagtgtttttatgttagaattttatagttttttttgtgtatggtgattgttattaatttaaatttttgatagtggttttcgagggtgaaggggtttgatgtttttggggttaagaaagggtaaattgtgggaaggtatgtgtgtagggagtttggagatattgtttgttttttgtatatcgtagtatggtattttattagtattaatgttttgggttggaatttgtttgtgggagagatgagttttattttgttttaaaaacgttaatgtaattgatatgtgtaattttataatgatagttttttttttttgtattttaatggatttttcgcgtggagagtttattttttgtttttttttgttttgttttgtttttttttttgagaaggagttttgttttgttgtttaggttggagggtaatggtatgattttggtttattttaatcgtcgttttttaggtttaagtaatttttttgttttagttttttgagtagttgggattatagatgtatgcgattacgtttagttattttttgtatttttagtagaaacggggttttgttatgttggttaggcgggttttgaatttttgattttaggtgatttacgcgtttcggttttttaaagtgttgggtttataggcgtgaattattgtgtttagttttttgtattttttaaagggtagttttaggttatagtaaaatggagaggaaggtatagagattttttatatatttttttttttttttaattttttttcgtattttagtatgaatacgtgattagaaaaggttgtgttgttagtatttattaattaatattttagttgttggattgtattatagttgatgtgaagtgagcgttagttgagattaagagaggttagataaatgggagtgtatagggaggaagtagtaatttggttttttatgttattagtgtggggttggtatgttttatttggattttttagaattattgtttatgattgtttttttacgtgatggtggagtttagtttagaatttagtaatatatttgagattaagggggaaaagtagtttttatttggtatttaagtttttaggaggagaagtgttttttacgttttaggagttaagatgtagtgttgtgttttttttttatattttgggggttggagatggatgagtttgtgatttaataggagggagtatagtaagaaaaaacgggaagttttgggtattagggaatttgtagttgttgttagaatgtagttttatttgttgttaagtcgtaagaagtttgtaaattgaaatagtgggtgatttaatagttttttttggggttgagttttattgagtagatattaggttttaaggttttgggaaatgttttgttttgatggtggtattatttgaagagagaattttagggatatgtggtgtgttaatttagaaagagttagttgatgttggagggtagttaggtttggtgattaaagtttttgatagttttttgtttggtttggttttagttttggttttgtagttttagttttgatgttttgttgtagttttttggtttggtgaatttttagtttggttttagtttttttgagggggaggatgtttaggggttggatttagttttttttagattagagaaggggtatatttgttttgttgtgttttttatttaaaattttatagggaggttatttgttttgtgtttttattattttgttatgtgatttattttttttttgttgaagtggaaaattttaggtattttgggagggaagtagttttttcgggggtaaaaagtgtagattttttttgttttgggatattttcgtatttttttttttgggtttttaggtttggaagagagtgttttgattgtaaatttttttgaagttagtttgttgatgagaaaaatggttttgttggttttgaagaagttttatttggttttgtttttatggttggggaggtttttcggattgagttttagtgttttgttttttttttatttgtggggtaggttttttatggtggtggttattggttttgttttataattaggaaattttaatttgttagcgagtagtaatacgtttatttattattacgagttatttgagttatttttggtttttttaaagattttagttttttgagtttagtgttattagtagaaattaagtatgtaaagtattggttggttttttttattttttttttttaaaattaaggtattaagaatttatttgaaattattatatgtaatggttagattaggggattttattggtttggttatgacgttttttattttttttttttgtttttttggttagttatttgttaaaaggagagtgttttagtttttttgaattaagtttttttagtaagttgaatttatgaagagaggttattttagtttttatggtggaataatttttacgaaatgttttggatatgttgaggattttgattttgtaattttgagatattggggtttattatttttgaagatgggtatatttggattgattta

SEQ ID NO: 1023 - DNA, 6522 bp, Artificial Sequence
  chemically treated genomic DNA (Homo sapiens)
aagtatttagtttgtttaattttataattgcgatgttttattaaaaatgtggtaaaatatataaaatatgaaattttttattttagttttttatttatttatttaagataaggaaggtttttttttgttttttaggttggagtatagtggcgtcgttatagtttgttgtatttttaaattttttgttttaagttatttttttaagtagttgggattatagatgtgggttattatgttcggttaatttttaaattttttgtagagatagggttttgttatgttgattaggttagttttgaacgtttggttttaagtaattttttttatttgggtattttaattattttttaaatggtttagtggtattaagtatatgtatattattgtgaaattataattattatttatttttagaattttttttattttgtaaaaacggaagttttgtatttattaaataataatttttcgttttttttttattaatttttggtagttattattttgttttttatttttattaatttgattattttaggtattttatataaatgaaattatataatatttgtttttttgtgtttggtttattttatttagtataatgtttttaaggtttattatgttgtagtatatgttagaattttttttttttttaagattgagtaatattttattatatgtatatattatatttttttatttatttattttttgatggatttttgaattgtttttattttttggttattgtaaataatgttgttaaaaatacgggtgtataaatatttgtttgagtttttgtttttaatttttttgtgaatatatttagaagtggaattgtcggattatatgataattttatatttaattttaattgtgatgttatttatttatttatttatttatttatttatttatttattgagatagagttttgttttgttgtttaggttggagtgtagtggtataattttggtttattgtaattttcgttttttgggtttaagagatttttgtgttttagttttttaagtagttgggattataggaatgcgttattaggttaggttaatttttgtatttttagtaaagatggggttttattatgatggttaggttgattttaaatttttgattttagatgatttgttcgttttggttttttaaagtgttgggattataggtgtgaggtattgtgtttggttttatttttatttttatttttaaagacggggttttgttcggtggtttaggttggagtgttaaaggtgtaattataggttattgtagttttgattttttgggtttatgtagtttttttgttttaattttttaagtagttgagattataggtatgtgttattatgtttagttataattgtgatgttttttagtagttaaaaattataatattttttaaatattataagaaggggataaatttttatgaattttttttgagaatggtgttaaataaattttttttttgggtgtaaatttatttggtgaggtaatggggagttagattgttatgttgtcggagttagggatgttgtatttttttattgtgaaagcgagggtttttataggtaggttgaggtttttagtgggttttggttggggtttgattttgagggatgttattggttagatattgagttttgttattagatttttgtttgtttacgtaatttttttttaggttgatgagaaagtaggaggggaaggttttagagaataagaagtatttttttgtaattattgattaattaggggttggttttagggttagaggttagggaggggtttgtaggttagtttagttttattttattgtattttttagaataatcgttgtttttaaagatggatttatatggtgaatagagaataaagtgtatagttttaaatttttatagttgagaatggttttaatatattagtttagatttggaggttgggggtagggtgggaatttaaaaagattattttgagttagggtatttgggattttgattagttttgttattattgtttgtgttatttttattaagtaatttttttttttgaggtttagttttttatttaaaaagtgagggaggagaagtaatgatgattaagttttttttggttttaaaataattttatatatttattttgtgggttttttgtagatttttgttttaggtaaattttaagatgttttatcgttttaggtgaaaggtgagagaggatttgtttgttgggagttagtttagggtttttttttttataggagacggagggtttttgtaggaatatcggtgaaggagagggtgttttatatattaggttttgttttttgttttttttttatagattatagaatattaagtgtttgttgttatggtttgtagtgtttttggttttgggtgggtcgatcgagtttttgtttagtgagagttttgggttaggagttagattttattttggagttgttagttattagtagtgtagttttgaataagttattttatttttgttagttttagtttatttatttgaaaattgggggtaatgttttttagtatttagggttgagaattttagaggagattgtgtatgtaaagtaatttgtaagtagtatagttatttgagaagtgttttggtttagataattaaagtttttattgttttttttgttgtttgggtgagggtaggttaggttgaattgtgtaggtatgttttttttttttttttttttttttttttttttttttttttgagagggagtttcgttttttttgtttaggttggagtgtagtggtgttatttcggtttattgtaattttcgttttttgggtttaagtgatttttttgttttagttttttgagtagttgggattatcggtacgtattattatgttcggttaatttttgtatttttagtagagatgtggttttattatgttggttaggttggtttcgaatttttgattttatgatttgtttattttggttttttaaagtgttggaattataggtgtgaggtattacgttcggtttggttaggattaaatttttttatgtgaattataatattaaaattttgtatattgttgcgtttattttataaattaggaaataggggtttagagaagttaaatagtttgtttaagttatatagttagtaagtggtaaagttgggatttgtatgattatagagtatataggttttttattagtagattagagagggggaggtttgttttggtgtagagataggtgggatttgtgatgttcgtttttggttttaatatttttttaaatttttttatttgagtttaggattttttgtagtttttttgttttaggttggtagtttatagtttttttttggttatttttaggtttgtgtgtgttatagagaggaagggggtaattatagtgggaatcgttttttagttttgttgtaattttttttgaaatagtaggcgagagggttggtggtttttattgtgtttttttgtttttgtttgtgggtatggttaaagtaaataagtttatttatattagtttttatcgtgcggtggattagtgtatgtgtttggttttgtttggtattgttgatgggtggtttttatagaaagatttagatgtacggggtttgaggattgttttagaagttttgttcgtttatgtttggttttgtttatttgggagttttattaggttatgtttgttttagttgttttaggatttttgatttgggttaggattggtttgaaattaaaggtagaaaaatatattttaatgagtagttgttggtttagaagttttttagtttaaattttattttagtatttttttttttttttagatttagttatgaggttattttattagttttaggttttgtgggggtttttgagagagtttttttttaagggacggatagatggttttttttaaggtttttgtggttgtttaaaagttaggtgtttgtttttttttttttttttttttttttttttttttttttttttttattttttttttttttttttttttttttttttttttttttttttttttttttttttttttttttttttttttttagatagggttttattgttatttaggttggagtagtagtttttaattacggtttattgtattttggatttttcggatttaagtaatttttttattttagtttttttagtagttgggattataggtgtgtattattatatttagttaatttttaaatttttttatagaaatgggggttttattttgttatataggttggtttagaatttttggattgaagtaatttatttattcggtttttttaaagtgttggggttataggcgtgagttattgtttttggtgttagtgtttgtttgttaagttaggagggtagttatgaacgttttgatgtttattgagtacgtgtggtttagatcgtgtgttaggtgtttaggtgttatttatagaatttttttaataattttgggtagtataggtttttttatttttgatagatgaggaaatggagatttagattttgaatcgaagttatagatatagtagatggtaggtttaaatggggatttaggtttatttgattgtaaagtttaaatcgtttttttgtttttgttgtagtttgcgaggagtagttgggtagaaagattgtgtttttacggtggtgagtttttcgatgtttaagttttattttagatcgatgaaattagaatttttggagattcgatttagatattggtgggttttagggtttttggttgattttagtgggtaatcgggttattaagtattgttttattttaagggtaagaggaatatcgttttttcgagggttttttaggtgtgttttttatagcgtaatttcgtttacgaaattaaaaattaaaattaggttattgtttattggtggttgatacgttttttttttattaatagaatcgggaggaagggttttggtggggttggcggttttttgtttttttcgtttaggtgcggcgttgtggtaggaagttattttttcggtcggtcggtgcgcggggttgttgcgttattcgtttcggttttcgtaatcgtattttgggacggtttagagacgttttagcgcgagttttttaaatgtttttttgcgttgttaggatcgttcgtcgttttgagttatgtgcgagtgggaagtcgtattgatattgagtcgggttagagggagaggagtcgagcgcggcgcggggtcgagggattcgtagtgtgtgtagagagtcgggtttttgcggatgggggttgttttcggggtttgagttcgtttgttcgtttatcgtttcgtttcgtttttgttatttttgtcgttcggtttttattagtttgttcgtttttgcgggattatggagtggtagtcgaggaggaagtatgttggtcgtcggttgcgcgttgttggttgttttgttggtcgcgtcgggagcggcgttggttttaaggcgttgttttgcgtagggtaagggtttcgggcgtatttggagggttggggtagttagcggttgggggaaatcgttttggttatcgtagtttgtgggaggttggagggaggaaaggaggtgcgacggatttttttttttgtggttgttttgaggtttcgcgggtatttagttgtgtggtcgcgggtagtggtttttgcgttttttgttgcgtttgtttttttggttcggagcgtttttcggaatgttcggtgaagttgtgcgggaattttgcggtttgtgtataggattgtgtttttgtaaatttgattttcgagttttttttttagtgtttttaggagtttttatataatcgcgttttaggttattttaaggggagattgttcgagagggcgcgttttagcggggtgatgtattcgtttggggagttttttgtattagcgttttttttttttttttgtattgggggtttatttcgtttggttttttttttattttcgcgggtgtatgtgtggatgatagtgttttgattatgaagggattgatattacgggcgttgagttacggattttttcgttgtacggagttattttggtagttattaattttgggaagttaagtgttttagttttgggaattgagtcgggaggttggtaagggagtgagattttttggggttggtacgtgttggatttttttttagaaaagagaaggattcgtgagggagagggtagaggtatttattgttttcgttgattgtaatttgtttttggtaaattaggttttttttgggttttggtcgtatgtttagttgcgtgtttagttttttttttggaagagttgggtaattggttttttagaggtttattttagggttttagtgtttttttgaggatatagtagaaaattaaggggtagttgataggtttttggaatagttgataggttggggaggttgaaggttaagatttttaattattagattatattgaattttagttttaggtgaatattgatttt

SEQ ID NO: 1024 - DNA, 6522 bp, Artificial Sequence
  chemically treated genomic DNA (Homo sapiens)
gagattagtgtttatttaggattggaatttagtgtgatttagtggttgaaagttttagtttttagtttttttagtttgttagttgttttagaagtttgttagttgttttttagttttttgttgtgtttttaaagaagtattgggattttaaaataaatttttggagagttagttgtttaatttttttagaagagagattagatacgtagttgggtatgcggttagagtttaagaaaagtttggtttgttaggggtagattatagttaacgggagtagtaagtgtttttgtttttttttttacgggttttttttttttttagaggggagtttagtacgtgttagttttaggaggttttatttttttgttagtttttcgatttaatttttaggattggggtatttggttttttagagttggtggttgttaaagtgatttcgtgtagcgggaagattcgtgatttagcgttcgtgatgttagtttttttatagttagggtattgttatttatatatgtattcgcgggggtggggggaggattaggcgaggtggatttttaatgtagagggagaagaggggcgttggtataaaggattttttaggcgggtatattatttcgttggggcgcgttttttcgggtagtttttttttagagtaatttgggacgcggttgtgtaaaggtttttgggggtattgggaaggaagttcgagagttaggtttgtaaggatatagttttgtatatagatcgtagggttttcgtatagttttatcgggtatttcggggagcgtttcggattaagggagtaagcgtagtagggggcgtaagagttattattcgcgattatatagttaggtattcgcggggttttaaggtagttatagaaaaggggattcgtcgtatttttttttttttttttagttttttatagattgcggtgattaaggcggttttttttagtcgttagttgttttagttttttaggtgcgttcgaagtttttattttgcgtagggtagcgttttggggttagcgtcgttttcggcgcggttagtagggtagttagtagcgcgtagtcgacggttagtatgtttttttttcggttattattttatggtttcgtagaggcggataggttaatgggaatcgggcggtaggggtggtaggggcggggcggggcggtgggcgggtaggcgggtttaggtttcgggggtagtttttattcgtaggagttcggttttttatatatattgcgagtttttcggtttcgcgtcgcgttcggtttttttttttttggttcggtttagtgttagtgcgattttttattcgtatatgatttagagcggcggacggttttggtaacgtaggaaaatatttgaggaattcgcgttggagcgtttttgggtcgttttagggtgcggttacgaaagtcggagcggatggcgtaatagtttcgcgtatcggtcgatcgagggggtggttttttgttatagcgtcgtatttgagcggggagaataggggatcgttagttttattagagttttttttttcggttttgttgatgagaaaagggcgtattagttattagtgggtagtggtttagttttgatttttggtttcgtgaacgggattacgttgtgaaaggtatatttggagagttttcgaggaggcgatgttttttttatttttagggtaaaatagtgtttggtagttcggttgtttattggaattagttaggagttttaaaatttattaatgtttgggtcgggtttttagagattttgattttatcggtttggggtgaggtttgggtatcggaagatttattatcgtaaaggtatagtttttttgtttagttgtttttcgtaggttgtagtagaggtaaggaaacggtttggattttgtagttagatagatttgggtttttatttagatttattatttattgtgtttgtgatttcggtttagaatttgagtttttatttttttatttgttagagataagaaagtttatgttgtttagggttattaggaaggttttgtggatggtatttaaatatttgatatacggtttgggttatacgtgtttagtagatattagaacgtttatggttgtttttttgatttgatagatagatattaatattaggggtagtggtttacgtttgtaattttaatattttgggagagtcgggtgggtggattgttttagtttaggaattttagattagtttgtgtaataaagtgagatttttatttttataaaaaaatttaaaaattagttgggtgtggtggtatatatttatagttttagttattagggaagttgaggtgggaaaattgtttgagttcgggagatttagggtatagtgagtcgtgattgggggttgttattttagtttggatgatagtgagattttgtttggaaagaaaaaaaaaaaaagaaaagaaagaaagaaaaggaagggaggagggagggagggagggaaggagggatagaggggaaggaaggaaaggaaggagagaaaaaaagaaagaaataagtatttggtttttgagtaattataaggattttgaaggggattatttgttcgttttttggaggggaatttttttaaggatttttatagagtttaaagttgataggatggttttatagttgaatttggagggaaagaaaaatgttgaaataaagtttaggttgagaagtttttagattagtaattgtttattagaatgtgtttttttatttttggttttaggttaattttaatttagattaaagattttgggatagttggaataggtatggtttaatggaatttttaagtggatagggttaggtatggacggatagagtttttgaaatagtttttagatttcgtgtatttggatttttttgtaggaattatttattagtagtgttagatagaattaagtatatgtattgatttatcgtacgatgggagttggtgtgggtgagtttgtttgttttagttatgtttatagataggaatagaagagtatagtggaggttattagttttttcgtttgttattttaaaaggggttgtagtagggttggaaagcggtttttattgtggttgttttttttttttttgtggtatatatagatttgaaaataattagagagggattgtgagttgttagtttaaaataggaaggttgtagaaagttttaggtttagataggagagtttaaaagaatgttgaaattaagaacgggtattatagattttatttgtttttgtattaaagtagatttttttttttttaatttattggtggggagtttgtgtgttttgtagttatgtagattttagttttattatttgttggttgtgtgatttaagtaagttatttaatttttttgaatttttattttttgatttgtaagataagcgtagtaatatataaagttttagtgttgtggtttatatgaaaaaatttaattttggttaggtcggacgtggtgttttatatttgtaattttagtattttgggaggttaaggtgggtagattatgaggttaggagttcgagattagtttgattaatatggtaaaattatatttttattaaaaatataaaaattagtcgggtatggtggtgcgtatcggtagttttagttatttaggaggttgaggtaggagaattatttgaatttaggaggcggaggttgtagtgaatcgagatggtattattgtattttagtttgggtaagaagaacgaaatttttttttaaaaaaaagaaaagaaaaagaaaaaagaaagagaagaaagtatatttgtataatttagtttgatttgtttttatttagataatagaaggaataatgaagattttagttgtttgagttagaatattttttagataattgtgttgtttataaattgttttatatatataattttttttgaaatttttaattttgaatgttgggagatattgtttttaatttttagatgagtagattgaggttaatagaggtaaagtggtttgtttaaaattgtattattagtaattggtagttttagggtgaggtttggtttttggtttaggatttttattgagtaagggttcggtcggtttatttaggattaaagatattgtagattatggtagtaggtatttggtgttttgtagtttgtgaggggagagtagagagtagaatttggtgtgtgggatatttttttttttatcggtgtttttgtagggatttttcgttttttgtaaagggggaagttttaggttgatttttagtaagtaagtttttttttattttttatttgaagcgatgaagtattttaaagtttgtttaaagtagaagtttataggagatttatagaataaatatgtaaggttattttgaaattaaaagggatttggttattattgtttttttttttttattttttagataaggagttaggttttaagaagagaagttgtttggtaaagatggtataggtagtggtgatagagttggttaagattttagatattttgatttaaagtggtttttttaaatttttattttgtttttaatttttaggtttgggttgatgtgttggggttatttttaattgtgagagtttaaaattatgtattttattttttatttattatgtgaatttatttttagggataacgattattttgagaagtgtagtggggtagggttgaattgatttgtagatttttttttggtttttggttttggagttagtttttggttaattaataattataggaaggtgttttttattttttgaaattttttttttttgtttttttattagtttgggaggaggttacgtgggtagatagaggtttaataatagaatttagtgtttggttagtggtattttttagagttaggttttagttagggtttattgagggttttagtttgtttgtggagattttcgtttttatagtggaggaatgtagtatttttggtttcggtagtatgatagtttggttttttattgttttattaggtgagtttatatttagaaaagggatttgtttagtattatttttagaaagggtttataaaagtttattttttttttgtaatatttagagaatgttatgatttttaattgttaaaaagtattatagttatagttgggtatagtggtatatgtttgtagttttagttgtttgggagattgaggtaggagaattgtatgagtttaggaggttaaggttgtagtgatttatgattatatttttggtattttagtttgggttatcgagtaagatttcgtttttaaaaataaaaataaaaatagggttaggtataatgttttatatttgtaattttaatattttgggaggttaaggcgggtagattatttgaggttaggagtttgagattagtttggttattatggtgaaattttatttttattaaaaatataaaaattagtttggtttggtggcgtatttttgtaattttagttatttgggaggttgaggtataagaattttttgaatttaggaggcggaggttatagtgagttaagattgtgttattgtattttagtttgggtaatagagtaagattttgttttaataaataaataaataaataaataaataaataaataaatagtattataattaaaattaaatgtagaattgttatataattcggtagttttatttttggatatatttataaaaaaattgaaagtagggatttaaatagatatttgtatattcgtatttttagtagtattatttataatagttaaaaagtagaaataatttaaaagtttattaagagatgaatggataaaaaaatgtggtatgtatatataatgaaatattatttagttttaaaaaggaaggaaattttgatatatgttataatatgataaattttgaagatattatgttaagtgaaataaattagatataaaaggataaatattatatgattttatttatatgaggtatttagagtagttaaattaatagagataggaagtagagtggtagttgttaggggttagtaggaggagagcgggaagttattgtttaatgggtatagaattttcgtttttgtaagatgaaaagagttttggagatggatagtggttatagttttataataatgtgtatgtgtttaatgttattgaattatttaaaaaatggttaaaatgtttaaatgagggggattgtttgaggttaggcgtttaaggttagtttggttaatatagtaagattttatttttataaaaaatttaaaaattagtcggatatggtgatttatatttgtagttttagttatttggaaagatagtttgaggtaaggagtttgaggatgtagtaagttatgacggcgttattgtattttagtttgggggatagaaaaagattttttttattttaaataaataaataaaaagttaaaatgggaaattttatgttttgtatattttattatatttttaataaagtatcgtaattataaaattaaataagttagatgttt

SEQ ID NO: 1025 - DNA, 17131 bp, Artificial Sequence
  chemically treated genomic DNA (Homo sapiens)
  unsure 15321, 15407, 15441: n is a or g or c or t
tgatattagaatagtggttagttatgattttttaataattggatgggaggagggtttttttggggtattggttattttttgtttttttttttttttaagatagagttttattttgttattaggttggagtgtagtggcgtgattttagtttattgtaatttttgtttttcgggtttaagcgatttttatattttaatttttcgagtggttgagattataggcgtgtgttattacgtttggttaatttttgtatttttagtagagattgggttttattacgttggttaggatagttttaaatttttgattttgtgatttattcgttttagtttttggttttttaaagtgttgggattataggtatgagttatcgtatttagattattttttattttttttttttttttttttttttgagattaagttttgttttgttatttaggttggagtgtagtggtttattatataattttggtttattataattttggtttattataattttcgttttttaggtttaagttatttttttgttttagtttttttagtagttgggattataggaatgtattattaagtttagttaatttttgtatttttagtagagatgaggttttattacgttggttaggttggtttcgaatttttgatttcgtgatttgttcgttttggttttcggaagtgttgggattattggtgtgagttatcgtgttaggttttttgttttttgatatagatgataaatatgaatgtgtttattttgttaaaaatttttaggttgtatttttatggtatgttgatttttttgaatatatattttttaaaatattttttgaaatagtagttataatggttttgagttttgttgttatgaaatgaattttttttgttttttagtttggaaatttaagtttattttttatttttattttattttgttaagtgaattttaatgtagtttaatattttttatttttagatatttaattatttttaattttggtgaattaggtgttattaggttataaaggttttaatataggtagagaggttgtttttaatttattattgagttaatatttaatttttaaatattttaaagttatttagtgttaataatgaaaaatataaaattaggggattagatttaaagtagtattaagaatagaggaggagaaattaattttttaaaagtaaaggggtttttttttttttgagtggggaaaagagaaagaggataaatatttatttgttttttaagttggagaaaagttaaggatgtttataaatgatggttttgattttaagggagtaaaataaggttttgtattaagaataaatgttacggtggggttgatagtttaaggaaaaaggaaatagttaggaaatagtttgataaggtaaatatagttgaaggttaagggaattgaagagaatagtgtagttaaaatggttgataaaagggtttttggggggcgggtggtttatttttgtaattttattatttttaggagttgagattagtttggttaatttggtgaaatttcgtttgtattaaaagtataaaaaattagttaggtatggtggtgagtatttgtaattttagttatttgggaggttgaggtaggagaattatttgaattagggaggcggaggttgcggtgagttaagatcgtgttattgtattttagtttggataataatagtaaaatttcgttttaaaaaaaaaaagggggtttttattggtaagtaagataaaaaatgataggaaatagttgataaattatgagaagaaagattggttgttaggttgttatattgaggataaattatagatttaatgggaatgattatagaatagagatagatgggggtaggtggttgtaggtatagagagggaaatttataatttagtattttggaggggaagtaattttattgatgattaggttgaaggtgtggttttatttgtgggttgttgatatagagtgaagttgaagatgattggaaaagaaaacgatgagaaattgtgaggttagagtgttaatgagttatgaatatggatgttgaaattattaaggtgatatagaatatgaggataattttagggttgatatagaattttagaaatataattgggtatagataaggaagtaaagggatattttagttagtattagatttagggaattagaaatgtaggtaaagtttgtttttgatatttattatttttgttttatggtataattttttaagttttgtttatttatttttaagtaattgtaattttggtgttttgtatgttatttttttattgtatagtttttttaatttttttttttttttttttttttttttgagaaggagttttgttttgttatttaggttggagtgtagtggtaggattttagtttattgtaatttttgttttttgggtttaagtgattttcgtgttttagttttttaagtaattgggattataggtatttattattatgtttggttaatttttgtatttttaatagagttggggttttattaggttggttttgaatttttggttttaagtgattcgtttgttttagttttttaaaatgttgggattataggtgtgagttattgtattcggtttgtttttgatatatttaaaattttaaatggttataggatataaatggagagttttttattaatatattatttttttttatttatttttgtattttgataaggttttttagtaataaatttttaatttgaaattcgtaattttaaggttaatattttatagaggtatttgtaaagttatgtaattttagtatagtagaggtttttcgttttgttgttttgaaaaatatttttttaatattgatttatttttttggttttagattttaattatttttataaaatgtgagttttttgggagtaggatttgagttgagttaataaaaagatatttataaaagtattaatttagttatttgtttttttaatggtgttaaggtaggttggtgtgttgtgatatattaatttatttttgtgtatttgttttttttcgtttagtaaaatattattatttttaatatatgttgtgatattaaaatattttagaagtgttgatcgagtagatatttaataatgattatagttgatatttatagagtatttattatgtgttaaatattgtatgtattttaatttatttaatttttgtaataattttgttaggttggtattgttatttttattttgtagatgaagaaatttgaaaagatttgtttaaggttatagagatgagaaatagaggtattagtatttaaatttaggtaatttagaattagagggtatatttaattattatatattttttttaaatatatttttgtattatatttgttattttagtattttgggaggttattaaggtcggaggatcgtttgttgttagtagtttaagattagtcgggttagtatattaaaattttgtttttttaaaaattttaaaaattggttaggtattgtaggggtatttgtagtttgagatatttgggaggttgaggtgggaggatcgttagagtttaggaatttgaacgtgcggtgagtatgatttagttattgtattttagtttgggtgatagagtgagattgtgaataataataaaaaaattaagttttttggatttatataaaatttttaatttaataaatttttataaaaatttgttttaaaataaatatttttttaaatggtaaagttagaatagaatttggttataatttataggttagatataggatgatagggaggagtaagagttgaatatattagttgtagtattatttattttgtttgcgatttcgttagtaggtttattttgtttttttataaattatttgattaataattaagagattaaaattcgatttatgttttattttatttgaatttttaatataatgaagaattttataattgttaatttatggatataatttaagtttattaaattattattttttttttatatttttttatttttttataaaaatttttatttttgggtgtttatttttatagatatttacgtatatattttatacgtacgtacgtatatgttttattttttaatttaagatttttatttttttttggggagaaataaatattatgagttttgaggtttattttttgagggaaaggggggggcggaggcgggatgaataggtttttattcggtattttttattataaacggggaggtataaatcgtaaagaaatattagtcgtttggtgggttattatttttggggtttattgattaatcgtatttaaatttatttattaatttaaaaaagtattgtggtaaggttcgtttacgtaagttttggagagaagtcgtcgttataatttgtcgtagtttcgtgcggagttacggttatcgagttttttattttttttaagaggtttttacgttttttttatttttaagggagttaggcggtttttcgcggttttgagtttttcggggaaggtcgcgaagagaggtcgtaggcgttttggcgagaagggagggcgggggtagcgggcggcgggtagtattcgggttttagtttatgatttcgttattttatagaaaaatggaatatttcgtttttttcgtttatagaggggaggtggggggaatttttcgatttagtttgggagaggcgacgcggacgtagttatcggaattcgggacgcgaagagtcgcgttacgggaatcgttatttttcggagtttcgttttttcgtcgataggcggttattggattaatgtttgggcgtaaagggttttttaggggttaattagcgtttaggtttcggtagggggcggggcgtagcgttggtcggtcgggggcgtagttgggcgggattggggagcgtttcgtttcgtcgcgggattggggtggcgcgttatttttgcggagaaggatttgatagtgtttcggagtcggggcgagtagttaaaaggttcgcggagtcgcgttgggtcgtttcggcgtagttgaatcgggggtcgcgtttgttaggtcgacgggtttggtttagtttggcgttaaggggttcgtgcgttgtggagacgcggagggtcgaggcggcgcggtttgaggtgaggaggggtcgggtgttgggtcgcgtagttggagttagagtgtcggtggtttcggacgggttatttggtattcgaggagattttttttttttttgagagtagcgttcggaatttgttagtttagtttggaaatttttatatttttttttttttttgttttcggattttcgaattttatttttataattttgttatttcgattatcgtagttttgagtataaattttatttaggcgtacgtacgtattttttttaacgttcgtttcgtagaacgttttttaagaataaatttttttttttgttattagattttacgttttttttaattttttttttattttttttgaaattttattcgtttcgtatttgtttttattttcgaggtggattttttttttttaaagtcgtttttttattttgaaatcgtaacgttttagttttgttgaaagtttataatgtttataaatattattaacgttttttttttttttttgattttttttattaataattattatttttaacgaattttatattttattgtattttaaggagaataaattagtttttaaaattttatttttttcgatttaaatttttgaagatagtgtaggaagtaagggtttgttttttagtggatgaatagtattttattttataattcgaaattgaaaaaaaaaaaaaattataggttaaaaataagacgttattttttttttttttttttttttttgtttttagaaggaaacgtattttggtttagtttgtgaagtattttaataattatattgttttaaaataattagttattagaatgttagggtgaattttttgaaagattgtggtatttgtttttgatagtgttgtaaataaattttttaaattgtgtatgattgttagttttaagttggaataatttttaatttgaaattacggatttagattattagtttagttgtgtgttattatgttaattttttaaatttatgttaatttttatttggaagtatttttgaattatgaattgaaatattatatttatagaattaatttgttattaaattgtgttttttaattatttttttttagggataattttgaacgtttgtttttaattttgagtgaaagaaaaaaattataggaaggagaaagtgttaaaaaggatagattgtagtgggattttttttttattttaagtatgtattgataatattagtttaatttttttataggtaatttagattattataaatattgttgttatttaatttaatataatatagttttacgtaattaaaaatgttgtttttatttttatttgtgaattgtagtatttttaatttatttaaatttgtttttaaggttttgtattttagtttagtgttagggcgaaagttaaatatatgtgaagtaggtgttaaaatgttttttttatagagaaggaaataggagtttcgttgaaaattagatttgtgtgattttaaattttgtgttttgaattattttgttatgttgatacgttttttataaaaattttagtgttataatttggtttgggaatttaagggtaatttataaattttttatagtggtagggagggatttttcgttttttttttttagagttgtttattttaatgggagttagaattttttggttttaatatatttgtagtttggtttttagagaagtatggaatgtttttatagttttttcgtttttttgattgtaaaggtagaatgattagagttgaggtttttattgtgttttattattttatatagtaaatattaagtaattattatttgttgtacgaatttataaaggtgtaggagatgtaattaggatttttaaagagtttataataattggattgataaatttatacgaaaaaaattataaggatgtaaagtagttttaattaaatgtagagtgatgtagaaaattttgtagatattaaaattagggaatgatcgtttaaggattggagtgagtatttaaggattggaatgagtaaaggatttattagaagttggttttgaaatttgggtaggatttggataaagggaaaaatgaagatagtttattaataatagcgaatggaggataaaatgtagaatggagaatatagaatataatataggattagtttgtggaaaggattagtagtaattaaggtttattaattaaaataggtaatatatttagtgtttatgttgtgttagttgttgttttgagtattttgtttatattaaggtatttaatttttataatattatgaagtaggtttaataataataggataaaattttttttttatatatagggaaatttaggtataagaaggttaattaatttgtttagttaagtggtagatttaaaggttatatatagatagtttggttttagaatttgattttttaattatgatatattttgcgtttttatatagtacgtttgagcgatagcgagtagatagaaaataagattatattagaaagtttataaaaatttatttttaattgtttattaggtgttttaaattatggtagattttgaggatattaagatatgtgaaataattattgtgtagtgttttgagttttgttagggaatgatgtaagagtatattgatagtaaagatgtttgaagtggggggaaattttatataagagatgatattttaaaagtagtttgtagtgtatagtagagttaggaaagatattggaataatatatgtagaagtatagattgaaagaataaggtatgttagaggaagtttagtggtttgttgagtttatagggatggttagtagggagtgatgaaagataagatcgaattataaatggtatggtgtggttaagtaaaatgaggagtttaagtatttgttttgtagtttggaaattataagaataattttagtattattggagtaaaaaagttagattgtttgtaattgtaagtagttttttttagaagtatagtagtaaggtagtttgagggaggagtttgaggaaaggatttttttttttttttagaatagagaaatttgagtattggaaaagatagattggataggtatattaaagttaaaattttaggtttttaaatagttagaatatttggtattattatttattttttaaaaagttgttgaggagaagaatgataggtttaaagttgtgttgtagagagagtgatttattaataatgtttagaatgtttggtggggaggaaagagattggaagtaggaatatagttgaaattattgaggtgattaatgtttaaattaggttagtttgtggtagagagtaaaaagaagagatgggtgggaaagatattatgggagagaagataggataagatttgtaattgagaaaagttaaaatgtattgtatagatgagagaaacgatggattttattgatttaggtagttgaagaggatgagttgtttgtagatagggaaaaatggtaagtttttgtgattttttaaaaagtgtgtgggtatttattttattattgggtatatatttaaaggattataaattatgttgttataaagatatatatgtatacgtatgtttattgtagtattatttataatagtaaagatttggaattaatttaaatgtttattaatgatagattggattaagaaaatgtggtatatatatattatggaatattatgtagtcgtaaaaaaggatgagtttatgttttttgtagggatatggatgaagttagaaattattattttgagtaaattgttgtaaggatagaaaattaaatatcgtatgtttttatttataggtgagaattgaataatgagaacgtttggatatagggtggagaatattatatattagggtttgttatggggtagggggaggggggagggatagtattaggagatatatttaatgtaaatgattagttaacgggtgtagtatattaatatggtatatgtattatatgtaatttgtatgttgtgtatatgtattttagaatttaaagtataataaataaaaaaagtgggtgggtatttatgtgtatatgtgtttatgagtatgtatttatggtgtattgtttttagattttttaaattgataagatttagagatagaatatttaagaagatgaaatgtaattggaattaaaagaaagatttaagttaaaatttttgaaattattttgtttgaaggtagtagttgaagttatgtttttaaagaagttggtatttaaaaagaaaagtcgatgtttagtattttatttttgggtatttttatagtttggagataaaagttagtagagaatttagtaaaggagataagaaagaggataaaggaaagaatttaattatattatttggttatatagaaattaggatataggagaaatttaagaattagggatggttaataatgtgaaaggttttagaaatatttgtgatatatatagttaaaatggttatagtttttttttttttttttttttttaaattttgcggttatttagtgtattttagtaagatttaataagaaattagttgattgatcgtgaataagagagttatattggttgaaaaatggttatagtatatagatgattgttttaaagttgtgtgtatatatatttagagtaggagatttattttttttagtattgtaaatttgttgttttgttatatttggaatgttttgtttttaaagttttatttttttttaagtaattagttttattttttgttttaaggttgattgatttgtttagtttttttttgtttggatgttttgttttatgtattatttttaattttattttttagtgtaaagtgagttaattagagttatgttttagatagtatagttttggttagattggtatgttttgggattttgttattggtaatttttatttgataattagagttaaagatgatgtagagtttatatgtgtgttattttttttatttaggaatttttatttttattttaagattgggcgtttttggtttttgtttgaattgggtattttttgtgtttttgtggtattttgtgtatattttgtatttttaaattttggattttttaaaggtaagaattatttatatggttttaattatgtttgtaacggaataaaaattgaataaaagtttgagtttttattttttaagtaatggtgagaatatggatgtttattaaagtgttttgtaaatttttttatttggttaaaatagtttaattttaaaaggttttaaggttataagtatattttatgtgttttttaatatgtttataattttgtttttgtatttaggtttttaatttggagagagagtgtatgtttatatatgtatgtgtacgtgtatgagtgtgtgtttttttgtttgatgaaatggggttttttttttttttttttgtttatggagttagttgttttaatattatttattgaatagttttttatttttttagtaaatgagtaattttttaaaaaattagatattaaatttttatatatatttgagtgtgttttgttttgtattattgatttagttgtttatttatttgttaattagtgttatgtttattttatttttagattgttttttttttttttttttgcgagattttttttttttttgagatagagtttcgtattgttatttaggttggagtataatggtaagattttggttttttagtttgttgtagtttttataagtttaggtttaagtggttgttttattttagttttttgagtagttgggattataggtatggtttattatgttcggttgatttttttttttattttttttttattttttatagagatggggttttgttatgttgtttaggttggttttgaatttttgggtttaagtaatttatttatttcggttttttaaagtgttgggattatagtcgtgagttattgtatttagttttttgttatattttttaattagttattattggtatgtaggagagtttttttttttttttttggagatggagttttgtttttgttgtttgggttggagtgtagtggcgatatttcggtttattgtaattttcgtttattgggtttaagtgatttttttgttttagttttttaagtagttgagattataggtgtgcgttattattttcggttaattttgtattgttattagagatagggtttttttatgttggttaggttggtttcgaatttttaattttaggtgatttgtttatttcggttttttaaagtgttgggattataggcgtgagttatcgcgttagttggagagttattttttgatgatgttttgtttgattgttatgttaaattttaaatagttttattattttttgatgatgttttgtttgattattgtgttaaatttttaatagttttaatagtttgttatgtgatttttatttttttttgatagatgattatattatttataatttattttttatttttagattttatttattatatttttgtttaagttttttagagtagtggtgaataattgatgattttaagtattttgtttgaattttgatattaataggaacgtttttaatttttatttttaaatttatagatgtttattataggttttttttttttttttttttttttttttggaggtagagttttattttgtcgtttaggttggagtgtagtggtgtattttcggtttattgtaatttttgtttttcgggttcgagtaatttttttgttttagttttttaagtagttgggattataggtgtttattattacgattagttaatttttatatttttagtagagatagcgttttattatattggttaggttggttttaaatttttgattttgtgatttatttgtttcggttttttaaagtgttgggattataggcgtaagttattatgtttggttttgtaggttttttatagtagtatttgtggtagtaatagtaagagttgtattaataataatagttgttaattttttattgagtagttataatgagttaaatgattttaagtattttatgtataatgagttatttaattattataatatttttagatgggtaggtggtggtggtattttatgtttatagataaaggaagtaaaagtgaaggttatttaaaaatttgtttaagatgttaaaatatagggattgaaatttgaatataagtaatttggttttagagtttttgtattatttttgttattttttattaaggtaaggatggttttttttagttttagttttttgatattttgttgttatttttaagttttagatgaatagttgttgaatgttattagatgttttttaaatatttgttggaatgattttgttatttttttttggtttgttaatatagtaattagtagtatttttttttattttgaattgtgtttattttaggttaaatatttgttagtatttatattttggttttgtttttaaatttatttagatttttttttaattatattataaaaaaatgttaaaggtagttttttaggtttaaggaaaatgatattagatggaaatacggatttatataaaggaattaaaagttttagaaatggtaattatacgagtaaatatgtgttagttttattttgttatttaggttggaatgtagtagtgtaattataatttattgtagtttcgatttttaaggtttaagtagtttttttattttagttttttgagtagttgggataataggtatgtattattatagttgtttaattttttattttttgtagaggcgagagttttattatattgtttaatttgattttaaatttttgggtttaagtgatttttttgttttggttttttagagtgatgggattttaggtgggagttattaatgtgaagttttaatatatgtaaaagtaaaatatatgttaaaatagtataaaggtttggggggagaaatggaagtatattattatatattatgtttgaggtgatataatattatttgaagatagattgtgaaaagttaaagatgtatattataaatttaaagtaattaataagaaaataaagaattatagtttattagttaataaggaaaagagaataaaaaataattaagaaaaataaatgtagaaaagtaaataggaataaagaatagttaagaagaaaataaatatgaagttgatagttttaaatttaattatattataaattatattaaatgtaaatggtttgaatatttaatttggaaagtagagattattagattggatataattatatgttgtttattttttaaagatgttatttaaatatgaagaaatatatagattaaataaaaaagaatgggagaggatatgttatgataatattaattaaagtaagatagaattggttatagtaatattaaagtagattttagagaatgttattagtggtaaagaagggtattttttaatgataaaagggttaatgttattaaaaggatttattaaataatatagttttaataatatatagggtaaaaattgtaaggagaagtaaatttatagttatatttagggattttaatatttttttttgaataatgatagaagtagtagttagaaaattagtaaggatatggaagatttgaatattattaattagatttacgtaatgattatttatgtaatattttattagtagtagtagtgttttttaagtgtatatagaatattgattttaagatttataaggttaaagttattacgatagtgtggtggtagtatataaataagtaaattgattagtggaataaatagagtaggagttattttattttttgtttttataaagtattgttagaatatagttatttttgtttgtttatgtattttttatggttgtttttgtgtcgtaatagtagattggtagttttaatagagattttatggtttataaatttagaatatttattttttattttatatatgaaaagtttgtttattttggaattgagagtagttaaatagatttatatttgtgaataattgatttttaagaaagacgtaaaggtaatttatttgagaaaggataatttttttagtaaatagttttgaaataattattcgtatatataaaatgaatttaaattttagtttgatattatatataaatattaatttgaaataattgagatttaaatgattttaaaattataaaatttgtaggaaaaaatttttttgattttatttttattttttatatttttttttttttgagaaggagttttattttgttatttaggttggagtgtagtggtgttatttttgtttatttgtagttttttttgtttttcgggtttaagtagtttttttgttttagttttttgtgtagttgggattatagatgtgtattattatattcggttaatttttaaaatattttagtagagatagggttttattatatatttaggttggtttcgaatttttgaatttaggtgatttatttatttcggttttttaaagtgatgggattataagtgtgagttattgcgtcgggttttttatgattttagattaagtaaagattttttagatatattaaaaatataaattgatgaattgaattttattaaaattaaattttttattcgttaaaagatattgttaaaagaatgaaaagataagtatataagaaaataatgcgtaaatttattttttaataaaggttagaatatttttttagaatttttaaaatttaatgagaaaataggaaatttagttgattaatatgtttgaatagatatattattaaagaagatatagttaagtatatatttgtcgtagggtttagttattttattttttatttattttttattttggggatatatattatgtgttagttttttaggggttattgtaatagagtatttttttgttatagtattttttatttgaaatatttagtaatagaagtatattggattttggattttttttttttagtttgtgttgtatttgtattatatatttaaagttaagtattttaaattttaaaatttgaaatttaaaatgttagagtttaaaacgttttggaattagagtattttagtttttagatttgggatgtttaatttgtattataaattgggtggtttaaaataataaatttattntttttaagggttttggaggttagaagtttttttgagattttggatagaatttttttttgttttttttagtttttgggtggtagttnatcgtcgttgagattttttagtttatagttgtantattttaatttttgtttgtgtatttatatggtattttttttggttttgtttttttaaagatattagttatattgtattaaaggtttattatattttattataatatttaattaaatttgtttatagagtaatattttgtgttattggggttaagattttaatatattttttggggggaatagtttagtttataataaataaaaagaaaattaatttaattatattgtatttagaataggggttggtaaattatagtttataagttaaatttagtttgtagttatttttataaataaagttgtatgggaatatatttatgtttatttatttatatattgtgtatggttgtttttgtattttaataacggagttaattaattgtaagagagaatttaaagtttacgaaatttaaaatatttattatttggttttttatagaaaatgtttgttagtttattttagaaggtgttaagtgttgtagaaaaaaaaaaaattagtaaaggggtataagaaatatagggtggttagggaagatttttatgaggaggtgaatttgagtaaaggttataaggaattattttttatatattaatttatgaagatgtttattatgtagtgttaagtgaaaaaggttataaaatattttttatttatatgattttatttttgtaaaatagaaaagtgtgtatatttatataatgtaaagttatataatatatgtataaaaaattttgtaagaatatttattaaaatgtttatggtagttattttttggtgggattatagtgtatttttatatggtatttttttagtttttttttattagatatttaaaaaatatttttataaatttaattttttatgtgttattaagttatattaaaggtttaatgtgtatgaaataataatggaagatttaattttttgtttaagtttgaagttatttgttgtattttaaagaggagtattagtatttaagttagaatttaagtgaataaattttaaaatggatttttatttttggttatatagaatagttgttagtaggtttaatttagtgttagtagaagaagaaatatgtgattgttaaagaatttcgtttgttataaatgtttttgttatgtttttgtgatattatatagacgttagggaagtttgtattaggtgtgggtgagttaataatgtttgtaagcgtatattaaattatagtattagggttgggcgcggtggtttatgtttgtaattttaatattttgggagtttgaggtgggtagatttttttgagtttagtttgggtaatatggtaaaatattatttgtattaaaaataaaaaaattagttaggtatgatggtgttatttttagttttagttattcgggaggttgaggtgggagaattatttgagtttgggaagtttaagttgtagtgagttgtaattgtgttattgtattgtagtttggtgatgggagtgagatattgttttaaaaaaaaaaaaaaaaagtattagaatatttgaatatttttatataagtgtttatgggtttattttattttgaagtttagaatatatttaaagtaggatattttttgtaaatttaaaagtttaagagtagatggggatttttaaagtatatatataataaaattattaaagttagttttttgaataagatttttttttttttatagt

SEQ ID NO: 1026 - DNA, 17131 bp, Artificial Sequence
  chemically treated genomic DNA (Homo sapiens)
  unsure 1691, 1725, 1811: n is a or g or c or t
attgtaaagagaggagagttttgtttagaaggttggttttgataattttattatatgtgtattttaaaaatttttatttgtttttaggtttttgggtttgtagaaagtattttattttagatatgttttgagttttagaataaaataaatttataaatatttgtataagagtatttaaatattttagtgttttttttttttttttttgagataatgttttatttttattattaggttgtagtgtagtagtataattatagtttattgtagtttgaattttttaggtttaggtaatttttttattttagtttttcgagtagttgggattagagatggtattattatgtttagttaatttttttatttttagtatagatagtgttttgttatgttgtttaggttgagtttaaagggatttgtttattttagatttttaaagtgttgggattataggtatgagttatcgcgtttagttttagtgttatgatttgatatacgtttgtaaatattattggtttatttatatttaatgtaaatttttttgacgtttatgtaatgttatagaaatatgataggaatatttatgatagacggagttttttaataattatatatttttttttttattagtattaaattaagtttgttaataattattttatgtaattagagataaaaatttattttaagatttgtttatttaaattttagtttaagtattagtgtttttttttgaaatataataagtaattttaaatttaggtaaggagttgaattttttattattgttttatatatattaagtttttgatataatttaataatatataaggaattaaatttataaaaatattttttaaatgtttaatgaaaagaaattgaaaaaatgttatgtgaaagtgtattataattttattaagagataattattatgaatattttggtggatatttttgtaaaattttttatatatgtattatataattttatattgtataaatatatatatttttttattttataaagatgggattatgtaagtgagaaatgttttataattttttttatttaatattatatagtggatatttttataagttaatatatagagagtaattttttgtagtttttgtttaaatttatttttttatagagattttttttaattattttgtgttttttatatttttttattgattttttttttttttataatatttaatattttttaaaataggttagtaaatattttttgtaaagggttagataataaatattttagatttcgtgggttttaagtttttttttgtaattagttaatttcgttattaaagtgtaaaagtagttatatataatatgtaaataagtgggtataggtatatttttatgtaattttatttataaaaatggttgtaagttggatttggtttatgggttatagtttgttaatttttgttttaaatataatataattaaattaattttttttttgtttgttatgggttgaattgttttttttaaaaaatatgttgaagttttaattttagtagtataaaatgttattttatgggtagatttaattggatgttatagtggagtataataggtttttagtataatatgattggtgtttttaaagagatagagttaggaagaatattatgtgaatatataggtagagattggagtantgtagttgtaagttaaggaattttaacgacgatnggttattatttagaagttaggagaggtaaaggaagattttatttaaagttttaaaaggatttttagtttttaaaatttttgagagnaataaatttgttgttttgagttatttaatttgtggtataggttgaatattttaaatttaaaaattgaaatgttttaattttaaaacgttttgagttttggtattttggattttagattttaggatttgggatgtttaattttaagtatataatgtaaatataatataaattgaaaaaaaaaaatttaaaatttaatatatttttgttattaagtattttaggtaagggatattgtaataaagggatgttttattatagtagtttttaggaaattaatatatagtgtgtgtttttaaaatagaaggtaagtgaagagtggaatggttaggttttacggtaggtgtgtgtttggttatattttttttgatgatgtgtttgtttaaatatattgattaattgggttttttgtttttttattaagttttgaaagttttaagaagatattttggtttttattagaaaatggatttacgtattatttttttgtatgtttgtttttttatttttttaatagtattttttgacgaataggaggtttaattttaataaagtttaatttattaatttgtgtttttgatgtatttaagaagtttttgtttaatttaaaattataaagggttcgacgtagtagtttatatttgtaattttattattttgggaggtcgaagtgggtagattatttgagtttagaagttcgagattagtttgggtatatggtgaaattttgtttttattaaaatattttaaaaattagtcgggtgtggtggtgtatatttgtaattttagttatataggaagttgaggtaagagaattgtttgaattcgggaggtagaggaggttgtaagtgagtagagatagtattattgtattttagtttgggtgataaaatgagatttttttttaaaaaaaaaaaaatataaaaaataaaaataaagttaaaaaggtttttttttataagttttatagttttagggttatttaggttttagttattttaagttaatatttatgtgtggtgttaagttgaaatttgagtttattttgtatatacggataattgttttaaaattatttgttgaaaaaattatttttttttaagtgaattgtttttgcgttttttttaaaaattagttgtttataggtgtgggtttatttggttatttttaattttagggtgggtaagttttttatgtatgaggtaggaggtaaatattttaggtttgtgagttataaggtttttattggagttattaatttattgttacgatataaaagtaattatagaaaatatataaataaataggggtggttgtgttttaatagtattttatgaaaatagaaggtaggatgatttttattttatttgttttattgattaatttgtttatttatatgttattattatattgtcgtgatgattttagttttataaattttgaaattaatattttgtgtgtatttaaaaagtattgttgttgttggtagagtgttatataaatggttattacgtgaatttggttgatagtgtttaaattttttatatttttattgattttttgattattatttttattattgtttaaaaagggatattgaaatttttgaatataattgtggatttatttttttttgtagtttttattttgtgtgttgttgaaattatgttatttggtagatttttttgataatattgatttttttattattaggaaatgtttttttttattattggtaatattttttgaaatttattttgatattattatagttaattttgttttattttgattagtgttattatgatatatttttttttatttttttttgtttaatttgtatgtttttttatatttaagtggtatttttagggggtaggtagtatgtggttgtatttaatttgataatttttgttttttaagttgggtgtttagattatttatatttaatataatttgtgatatgattaggtttaaagttattagttttatatttgttttttttttgattgttttttgtttttgtttatttttttgtatttattttttttaattattttttatttttttttttttgttagttaataagttataattttttgtttttttattggttgttttaggtttatagtgtatatttttaattttttataatttatttttaagtaatattatgttattttaggtatagtatataatagtatatttttatttttttttttagatttttgtgttattttagtatatattttatttttgtatatattaaaattttatattggtagtttttatttgaaattttattattttgggaggttaaggtaggaggattatttaagtttagaagtttaagattaggttgggtaatatagtaagattttcgtttttataaaaaataaaaagttagatagttgtggtggtgtatgtttgttgttttagttatttaggaggttgaggtgagaggattgtttgagttttggaggtcgaggttgtagtgagttgtggttgtattattgtattttagtttgggtgatagagtgagattggtatatatttattcgtgtggttattatttttagagtttttaatttttttgtatagattcgtatttttatttggtattattttttttgggtttgaaaaattgtttttaatatttttttgtagtatggttagagaaaagtttaaatagatttgaaaataaaattaaagtgtgaatgttaataagtatttagtttaaaataagtatagtttaaaatgagaaaagatattgttaattattatattaatagattaaaggaaaatgatagggttattttaatagatgtttgaaaagtatttgataatatttaataattgtttatttaaaatttaaaaataataataaagtgttagaaaattaagattgaaagagattatttttattttggtgaaggataataaagatgatatagggattttagaattagattgtttgtgtttaaattttagtttttatattttaatattttaggtaagtttttaaatagtttttatttttattttttttatttgtaaatatggggtattattattatttatttatttaggaatgttatgatgattaaataatttattatatataaagtgtttagaattatttggtttattgtaattatttaataaaaggttaatagttgttattattagtgtagtttttgttgttgttgttataggtattattataagaaatttataaggttaggtatggtggtttacgtttgtaattttagtattttgggaggtcgaggtaggtggattataaggttaggagtttgagattagtttggttaatatggtgaaacgttgtttttattaaaaatatgaaaattagttggtcgtggtggtgggtatttatagttttagttatttgggaggttgaggtagaagaattgttcgaattcgggaggtagaggttgtagtgagtcgagaatgtattattgtattttagtttgggcgatagagtgaggttttgtttttaaaaaaaaaaaaaaaaggaagaaagaaatttataataagtatttataggtttaaaggtaaaaattagaagcgtttttattaatgttaagatttagataagatgtttgaagttattagttatttattattgttttaaagggtttaagtaaaaatataataaataagatttaaaaatggaaaataaattgtgaatgatatgattatttattaagaaagagtgagaattatatgataaattattaggattattgagaatttaatatagtagttaaataaaatattattaaaaaataataggattatttagagtttaatataatagttaaataaaatattattaaaaaatagttttttagttggcgcggtggtttacgtttataattttagtattttgggaggtcgagataggtagattatttgaggttgggagttcgagattagtttgattaatatagagaaattttgtttttaataataatataaaattagtcgggagtggtggcgtatatttgtaattttagttatttgggaggttgaggtaggagaattatttgaatttagtaggcggaggttgtagtgagtcgggatgtcgttattgtattttagtttaggtaataagagtaaaattttatttttaaaaaaaaaaaaaaaagtttttttatatattagtaataattaattagaaaatgtaatagaaggttgggtgtagtggtttacggttgtaattttagtattttgggaggtcgaggtaggtagattgtttgagtttaggagtttaagattagtttaagtaatatggtaaaattttatttttataaaaaataaaaaaaaaataaaaaaaaaaattagtcgggtatggtggattatgtttgtaattttagttatttaggaagttgaggtgggataattatttgagtttgggtttatagaggttgtagtaagttaagaagttaagattttgttattgtattttagtttgggtaatagtgcgaggttttgttttaaaaaaaaaaaaagtttcgtagaaaaaaaaaaaaagggtagtttaaaggtaaagtaaatatagtattgattggtaaatgaatagataattaaattaatggtataaaataaaatatatttaagtgtatataagaatttagtatttgattttttaaaaggttgtttatttgttgggaaaataaaggattatttaataaatagtattgggataattggttttataagtaaaaaagaaaaaaaagaattttattttattagataaaaagatatatatttatgtacgtgtatatgtatgtataagtatatattttttttttagattaaggatttaaatgtaaaagtaaaattataagtatattgaaaaatatatagaatatgtttatgattttagggttttttaaaattagattattttagttaaatgaaaaggtttatagagtattttgatgaatatttatgtttttattattgtttaagaaataaaagtttaagtttttatttaatttttatttcgttataaatataattgaagttatataaatagtttttgtttttaagaagtttaaagtttagagatgtagaatatgtataaagtgttataggagtatagaaaatatttaatttagataggggttaggagcgtttagttttaaaataagggtaggggtttttagatagagaaaatagtatatatatgaattttatattatttttgattttaattgttaagtgaagattattaatgataaaattttagagtatgttagtttaattagagttatgttatttgaaatatagttttgattaatttattttgtattagggggtggggttgggggtaatatataaaatagaatatttaaataaaaaaagattgagtagattaattaattttagagtaaagggtgaagttgattgtttaaaagaaaatgaaattttggaggtagaatattttaaatgtaatagggtaatagatttatagtgttgaaaggaatgaattttttgttttggatatgtatatatatagttttaaaataattatttatatattatagttattttttagttaatgtagtttttttatttacgattaattagttaattttttattaaattttattaagatatattagatagtcgtaaagtttaaaaaaaaaagaagaagaagagattgtagttattttgattatatatattataagtgtttttgaagttttttatattgttgattatttttggtttttgaattttttttatattttggtttttatgtaattagataatgtagttgaatttttttttttatttttttttttgttttttttattgaattttttgttagtttttatttttaggttatgaaggtatttaaagataaagtattgggtatcgatttttttttttaaatattaatttttttgaagatatgattttaattattatttttaaataaaataattttaagaattttggtttggattttttttttaattttagttatattttatttttttagatattttgtttttgagttttattaatttaagaggtttaaaaataatatattataggtatatgtttatgaatatatatatatataaatgtttatttattttttttgtttattatattttaagttttagggtatatgtgtataatatgtaggttatatatgatatatgtgttatgttggtgtgttgtattcgttaattagttatttatattaggtatattttttaatgttattttttttttttttttttattttatgataggttttggtgtgtgatgttttttattttgtgtttaagcgtttttattgtttaatttttatttatgagtgagaatatgcggtgtttggttttttgtttttgtaatagtttgtttagaatgatggtttttagttttatttatgtttttataaaggatatgaatttatttttttttacggttgtatagtattttatggtgtatatgtgttatatttttttaatttagtttattattgatggatatttgaattggttttaagtttttgttattgtgaatagtgttgtaataaatatacgtgtgtatgtatgtttttatagtagtatgatttataattttttgggtatatgtttagtaatgggatgaatgtttatatattttttaaaaagttataaggatttattatttttttttatttataaataatttattttttttaattgtttaagttaatggagtttatcgttttttttatttatgtagtatattttagttttttttagttataaattttattttgtttttttttttataatattttttttatttattttttttttttattttttattataaattaatttaatttggatattgattattttaataattttaattgtgtttttgtttttagttttttttttttttattaagtattttgaatattgttggtggattattttttttataatataattttaaatttgttatttttttttttaatagttttttaaagggtgaataataatgttaaatattttaattatttaagaatttaaaattttggttttgatgtgtttatttaatttattttttttaatatttaagtttttttattttaaaaaaaaaaaaaaattttttttttagattttttttttaagttattttattattatatttttagagagaattgtttgtaattgtaagtaatttggtttttttattttaataatgttgaaattatttttgtagtttttaaattgtaaagtaaatatttaagttttttattttgtttgattatattatgttatttataattcggttttattttttattattttttattaattatttttgtagatttagtaaattattagattttttttaatatattttgtttttttagtttgtgtttttatatatattattttaatgttttttttgattttgttgtgtattataaattgtttttgaagtattattttttatatggaatttttttttattttaaatatttttgttgttagtgtatttttatattattttttaataggatttagaatattgtatagtaattgttttatatattttgatatttttagaatttattatagtttgaggtatttggtggataattaagggtgggtttttatagattttttggtatgattttattttttatttattcgttgtcgtttaagcgtattgtatggagacgtaggatgtattatggttaagaggttagattttgaagttaggttgtttatgtatgatttttagatttattatttagttgggtaaattaattaatttttttgtgtttgggtttttttatgtgtaaaaagaggattttattttattattattagatttattttataatattatgaagattaaatgttttaatatgggtaaagtgtttaaaatagtaattggtataatataagtattaaatatattgtttgttttaattaatagattttagttattgttgattttttttataagttagttttatattatgttttatattttttattttatattttgttttttattcgttattattaatgggttgtttttatttttttttttatttaaattttatttaggttttaaggttaatttttggtaaattttttgtttattttaatttttaaatgtttattttaatttttaaacgattattttttaattttaatatttataggattttttgtattattttgtatttaattaaaattgttttgtatttttgtagtttttttcgtataagtttgttaatttaattattataaattttttgaaggttttgattatattttttgtatttttgtgagttcgtatagtaggtagtaattgtttagtatttgttgtgtaaaataataaagtataataggaattttaattttgattattttgtttttgtaattaaagaaacggagaagttgtgagaatattttatgtttttttaggagttaagttgtaaatgtattagggttagagaattttgatttttattaaaatgagtagttttgaaaggagggagcggggaatttttttttgttattgtagaggatttatgggttgtttttaagtttttaaattaaattgtggtattggggtttttatgagaaacgtgttaatatgataaaatgatttagagtataggatttggagttatatagatttagtttttagcgagatttttgtttttttttttataaaggggatattttaatatttattttatatgtatttaattttcgttttaatattgaattgaagtgtaaagttttggaaataaatttaaataaattgaaaatattgtaatttataaataagagtgagaataatatttttagttacgtaagattatattatattaaattaggtggtagtagtatttataataatttaaattgtttgtgagaaaattaaattggtattgttaatatatatttaaaataagaaaaaaattttattatagtttgttttttttgatatttttttttttttgtaattttttttttttatttaagattaaaaataaacgtttaagattatttttaaagagaaatagttggaaagtataatttaatagtaagttggttttataaatgtaatattttagtttatagtttaaaaatatttttaaataggaattaatatgaatttaagaaattaatataatggtatatagttaaattgatgatttgagttcgtaattttaaattaagagttgttttaatttgaagttggtagttatatatagtttaaagggtttgtttatagtattgttaaaagtaaatattataattttttagaaaatttattttggtattttaataattagttattttaaggtagtataattgttgaaatattttataaattaagttaaaatgcgtttttttttgaaggtaaaaaaaaaaaaaaaaaaaaaaggtgacgttttatttttaatttgtgatttttttttttttttagtttcggattatgaaataaaatgttgtttatttattgaagaatagatttttgttttttgtattatttttaaaagtttaggtcggaggaggtaaaattttaaaaattgatttgttttttttgggatatagtgagatgtggaattcgttaggaatgataattattaatagaaaagattaaaagaaggaaagaaacgttaatagtgtttataagtattgtgaatttttaataaagttgaaacgttacgattttaagatgaaaaaacggttttggggaagggaaatttatttcgagaatgaagataagtgcggagcgaatagaattttaggggagatgaaaaggggattgggaaaaacgtgggatttggtaataaaaaggggggtttgtttttgaagggcgttttgcggggcgggcgttaagaggggtgcgtgcgtgcgtttgggtgaagtttgtatttagggttgcgataatcgaggtgataaagttgtggaagtagaattcggaggttcgggagtaggaaggggaaggaatgtggggatttttaggttgggttgataagtttcgggcgttgtttttagggggaagggaggttttttcgagtgttagatagttcgttcgaaattatcgatattttaattttagttacgcgatttagtattcggtttttttttattttaggtcgcgtcgtttcgatttttcgcgtttttatagcgtacgaattttttggcgttaggttgggttagattcgtcggtttggtaggcgcggttttcggtttagttgcgtcggggcggtttagcgcgatttcgcgggttttttggttgttcgtttcggtttcggaatattgttagattttttttcgtagaggtagcgcgttattttagtttcgcggcggggcggggcgttttttaatttcgtttagttgcgttttcggtcggttaacgttgcgtttcgttttttatcgggatttaggcgttgattggtttttgagagattttttgcgtttaggtattggtttagtggtcgtttgtcgacgagggggcgggatttcgaggggtagcgattttcgtaacgcggtttttcgcgtttcggatttcggtggttgcgttcgcgtcgttttttttagattagatcgaagggttttttttattttttttttgtgggcggaaagagcggaatgttttatttttttgtggaataacggggttatgaattggagttcgggtgttgttcgtcgttcgttgttttcgtttttttttttcgttagggcgtttgcggttttttttcgcggtttttttcgagggatttagagtcgcgagggatcgtttagtttttttggggatggggaaggcgtgggagttttttggggaaagtgaagagttcggtggtcgtgatttcgtacgagattgcggtagattgtggcggcggtttttttttaagatttacgtaaacgagttttgttatagtatttttttaaattagtaaatgagtttgggtgcgattgattagtgagttttagaggtggtggtttattaagcgattagtgtttttttgcggtttgtattttttcgtttatgataaaaaatatcgggtaaaaatttatttatttcgttttcgttttttttttttttttagaaaatggattttaaggtttatgatgtttgtttttttttaaaggaagatgagaattttgagttaaaagataaggtatgtgcgtgcgtgcgtgtggggtgtgtgcgtgggtgtttgtaaaagtaaatatttaaaggtagaggtttttgtggaagaatgagaggatataggaaggaaataatggtttaatgaatttaaattatatttataaattaataattataaagttttttattatattgaggatttagatagagtaaaatatagatcgaattttaattttttagttgttgattagataatttataaaagggtaaagtgggtttgttaacggagtcgtaggtaaagtagatggtgttgtagttgatgtgtttagtttttgtttttttttgttattttatatttaatttatagattgtgattagattttgttttagttttgttatttagaggggtgtttattttaaaataaatttttataaaaatttgttaaattgaaaattttgtatagatttaggaaatttgatttttttgttgttgtttatagttttattttgttatttaggttggagtgtagtggttggattatgtttatcgtacgtttaaatttttgggttttagcgatttttttattttaattttttaagtattttagattataggtgtttttataatatttggttaatttttaaaatttttggagagataagattttggtatgttgattcggttggttttgaattgttggtaataaacgatttttcggttttagtggttttttaaagtgttgagataataggtgtgatgtaaagatgtatttaggggagatgtatagtggttaaatgtattttttggttttagattgtttaggtttaaatgttgatgtttttattttttatttttgtgattttgggtaagtttttttaaatttttttatttgtaaaatgagaataataatattaatttaataggattgttgtaaggattaaatgagttaaaatatatatagtgtttggtatatagtaggtgttttgtaagtattagttataattattattgaatgtttattcggttaatatttttgaaatattttagtattataatatatattaaaaatgatgatattttgttggacggggaagggtaggtatatagaagtggattgatatgttataatatattagtttgttttggtattattaggaaaataaatgattgagttagtgtttttatgggtgtttttttattggtttagtttaggttttgtttttaagaaatttatattttatgggagtagttaaagtttgaggttaaaaggatgaattaatattggagaagtattttttagagtaataggacggaagatttttgttgtgttggaattatatgattttgtagatatttttgtagagtattggttttgaaattacgaattttagattaaggatttgttattagaaagttttgttaaaatgtaaaggtaagtaggggaaagtagtatattaatggagaattttttatttgtgttttgtgattatttgagattttagatatgttaagagtaggtcgggtgtagtggtttatatttgtaattttagtattttgggaggttgaggtaggcggattatttgaggttaggaatttaagattagtttggtgaaattttaattttattaaaaatataaagattagttaggtatggtggtgggtgtttgtaattttagttatttgggaggttgaggtacgagaattatttgaatttaggaggtagaggttgtagtgagttgagattttgttattgtattttagtttgggtgatagagtaaaatttttttttaaaaaaaaaaaaaaaaaaaaaaagagattgaggaaattgtatagtgagaaagtaatatgtaaggtattaaaattataattatttgggagtaagtgagtaaagtttaggaaattgtgttatggaataaaggtgataaatgttaaagataaattttgtttgtatttttaattttttaaatttggtgttgattaggatatttttttatttttttgtttgtgtttagttatgtttttgaaattttgtgttagttttggaattatttttatgttttgtattattttaatgattttagtatttatgtttatgatttattagtattttgattttataattttttatcgtttttttttttaattatttttaattttattttgtattagtaatttatagatggagttatatttttaatttagttattaatgaaattattttttttttaaaatgttggattgtgagtttttttttttgtatttatagttatttatttttatttatttttattttgtggttatttttattgaatttgtaatttgtttttaatgtgatagtttgatagttagtttttttttttatagtttattagttgttttttattattttttattttatttattagtaagaattttttttttttttttgagacggagttttgttgttgttgtttaggttggggtgtaatggtacgattttggtttatcgtaattttcgtttttttggtttaagtgatttttttgttttagttttttaagtagttgagattataggtgtttattattatgtttggttaattttttgtatttttagtatagacggggttttattaagttggttaggttgattttaatttttaaaagtgatgggattataggggtgagttattcgttttttaagaatttttttattaattattttaattgtattattttttttagtttttttgatttttagttatgtttattttattaggttattttttaattattttttttttttttgagttattagttttatcgtaatatttatttttagtatagaattttgttttatttttttaaaattaagattattatttgtgagtatttttgatttttttttaatttaggaagtaaatagatatttatttttttttttttttttttatttagaggaagaaaggtttttttatttttaaaaggttaatttttttttttttgtttttggtattattttaagtttagttttttagttttatattttttattattaatattaaatgattttgaaatgtttaaaaattagatattaatttagtggtgagttgaggatagtttttttgtttgtgttaaaatttttgtaatttgatagtatttaatttattaaaattaaaaataattaaatgtttaaaaatgaagaatgttaagttatattgaaatttatttaataaaatgaggtgagaatgaaaaatgaatttaaatttttaaattagaagataagagaaatttattttatagtaataaaatttaaaattattatgattgttattttaaaaaatgttttgaagaatgtatatttagaaaaattaatatattataagagtatagtttgaaaatttttgataaaatgaatatatttatgtttattatttatattaagaaatagaaggtttggtacggtggtttatattagtaattttagtattttcggaggttaaggcgggtagattacgaggttaggagttcgagattagtttggttaacgtggtgaaattttatttttattaaaaatataaaaattagttgggtttggtggtgtatttttgtaattttagttattggggaggttgaggtaggagaatggtttgaatttaggaggcggaggttgtagtgagttaagattgtagtgagttaaggttgtatagtgagttattatattttagtttgggtgatagagtaagatttggttttaaaaagaaaaaaaaaagaaagaaatagaaaatagtttgggtgcggtggtttatatttgtaattttagtattttgggaggttagaggttaaagcgggtaggttataaggttaaaagtttgagattattttggttaacgtggtgaaatttagtttttattaaaaatataaaaattagttaggcgtggtggtatacgtttgtagttttagttattcgggaggttgagatatgagaatcgtttgaattcgggaggtagaggttgtagtgagttgagattacgttattgtattttagtttggtgataaagtgagattttgttttaaaaaaaaaaagaaatagaaaatgattagtattttaaaagggttttttttttatttagttattggaaggttataattgattattattttaatgtta

SEQ ID NO: 1027 - DNA, 6294 bp, Artificial Sequence
  chemically treated genomic DNA (Homo sapiens)
atagttcgggtagtttttttaagaggtattttaggagaaggtattgttattataggaaatgatagttttatgtatgttattgtttttgaatattttttagtgggataagatgtggagatggaagatagtgatgatgattttgatttcgtgtaggtttaagttaatatgtgtgtttgtgttttagtttttaataaaaaagtttaaaaagtaagaaaaaagtatatagaataaggatataaagaaagaaaatatttttaatagttgtataatgtgtttgtgttttaagttaaatgttatgataagagttaaaaagttggaaaaaaataaaagtttataaagtaaaaatagttagagttagtaaaggttaatttattatttttcggaatatattgttaaatgatgtaagattgtatataaaagaaagttttgattgttaataatgtaatattagtatataaagggattggataatgtaaatttatgtaaaagttatagcggttttttttgaaaggcgatttgggaaatattagattttttttttagataagttaatatttaatttagaattagatgagtgtcgatgggaatattttagtaaggaatataaatttagattttagatagagagtggattttgattgtttagaattatagaattttgggattgaaattaaagaggagggagaaatggagagaaaataagaaaagaaattaatagagtattttgggttttttggttttatgtttttttcgttttgtagaatttaattttatttattaatatataaatatgtttaagtgtttttaataattgaaaataaaaatttttatgttttttaaattattattttattttttttattattattaaatattttgtaaaagttatatttttttattttatttttttttttttttaatttttgtaagttagtatattatttgtatttatattgttttttttaaattgttgttatgaggattatggataatttttgttttgttaaatttaatagatatattttttagtttttattttatttaatttttttgtgatatttggaaatattggttatttattttattttgaaattttatttttcgttgttttttgagatattgatttttgatttttttattttgttgtttattatgtattcgtttgttttgttgatgggtatttttttttttagttattttttagggttgtttatgttttaagatttttgttagtattagtttttttttttgttttttaatatgtaggttgagtaattgtatttatttttatggttttggttattattgatatgttaatatatttatttttagtaaagttttgatagttttgatatggttattttgatttagtttttaaaataaatttttttttatttttttatttgtaatgtttaaaattgatagtttcgttttatttttgggttttatttacggaattaagtaagttttattgttgaattttagtaagtttgttagaaataaatagtttatatgtttaatagttgatagttttagaaaataatagaatttttaatttattttatgaaattagtataattggttaaaattagtttagtattagttgtagatataattaaatataaatataatttaattatgattatagttgtaaaattataggttaaatattattaatgtgaacgttgtattatgttaaatttatggttgatttaggaatttagtaaaaaaattatgattatgtaaatagacgtttattagttatttggtaaaatttaaattttattaaataataggttatttttttatagttgtttgtgtattggatagataaattaatttttattgatttttatttaattatgaaaatgggtttatattattttaaatttttgatttaaataatatattatgttttttttttaatgatattttttatttttgaaattagatatttaatatttgttttttttattaaattgaaattattttaaagatatatattgttatttataatgtgtaatttaatatgtgtgagtgtgtatgattattatagaattttgaaatttagtgtaaaatgaaaataagagtttttttatttaaaaatgaggaattttaatatagtgatagtagagtattaaatgaagtataaggttttgtgttaattatatagattatatatttataatgttggttgtgtggcgttgtgtgtgtgttttaaatatgttgaatgttattattggaaagttaaataaaaagaattttatattatttatagatagaatgatagatagaatttatattatagattataaaaagtagttatattaagttgggtaaaaatagtttagatattaattaaaaaatattttttggtttataataattgattattttgattgaagattgtagaatattaaaagatattggttaatgtttaataattttttttttaaattgatattatataattttatttgaattttttttaatatattatattgattattttgagaatgttgtttttttttttaaaatttatttattataatttataaaatgtatttattatttttttttttaaaggtttttttgtttagtttattgagtttatgagtaaatataatagtaattattttatttttttaattataaaatattagtattttaaaaatttataaatattttatttttgtttatttattttataaaaaataatatttagtttattaaaatattaaaagttaatttaagattttattttggatttttttttaaatggtattaattattttatagatagaaaaaaaaaattattatttgatgttgttagaatgtgtttattttatataattttaataatttttaaagttttatgaatattttttttagaaagattttttatagttgggggtagaatttagtgtaatatttatattgttttttttgtagttttgaataatttttttttatgttttttaaaagtttagatatgtataatttttattttatttggatttatggtgattgtgataaaaggaagacggatttttttttgtgtaaagtattgatggatgtttttttattttgtttttggaaagttaaaaaaagaaaaaggtgtaggttatgaatagttatatattttaatgttgttgttagggatttaaaataaataaataaataaataaataaataaataaataaataaatttttaatttaggcgtgttttattatagaaattatttttaaaatttattttagtgttatgtttgtttttttttttattttttattttaggttttagttaaatggaaatatgtggttttttttattttattttgttttttttttttatttgtttatttttttcgttttttttttttattttatttttttttgtttttatgaatttttttttttatatatatttattgatgtatttttatttatttgtttttttttattttgttattttttagtatttattgaatgttagttatgggttaaagattatagtaagtggacgttgggtaggaagagaaaggttattgtggttggaggatagtgatgtggtattacgaaacgttagagagggtagtggggtttagattattagggtattgagggtttggtatttagtgggaagtgattagaaggtggggtataaaatagaattagatattttgttgttttgagaagaatgaaggggttgtgggtaaaagtgaaagttggaagattttttagatagtttttatagttattttagggttaattttggaggtggggtagataggatttgtttatggatttgatgtgggaaatgagattaaaaaaggaattagagatttaagttttaggtttgagtaattttgttttttttagtttattgttattttttttttttttttttttttttttttttttttttgtttacgttatagtagaatgtgatatattttttattagttttaagtttatttttttttaagtgttagtttagaagttatagattttaggaaatttttttgaagtttttatattggggtaaagttatatacgtattgttatttttttttcggtattagtgtgtatattattattttatttataggagttttaagtaggagtttttatagtttaaatgtagtaagtttgtgtttaagtttagttagttaagtgaaatttggaaagttatttaaggaagttttagtttttatatttgtaaagtgtagataagaaaatggtttattttatataaagttttgtatgagatgatatatataaaatgtttagtataaaattggtagagagtaaatgttagataaatgatagtcgttattattatcgttgttgttattggtttatattatttatttttatttaagtagggtttttgtagaatagtagaaattaaattaatgtagtaaataagttatataatttaagtttaggaaaaagttaatattttagtggtatgtatttaagacgaatagtttgatttattagttaatttagataaatgtgtacgtggaagttatagttaaatattatcgttagtttttacgttttgcgtttaatttggggtttgattttttaaatataatatttattagattaggtggatttataggattatttttttttgaggttttatttgagtaggtgtatgtatagtagacggagtagaaagagattgattagagaggttggagtggtagagggcgtgatttttttaattattttttatttttttttttaaaagacgatttggtatcgtttattatattcgcggtaacgtttttttggtgtcgttcgtttttaataatttagtttgcgttttgtatatttgtggttttcgtgtatatattaataatttatggttttagtttttagtcgttaagcgttgttaaggcgttgagagattatttgggaagttttttatttagaattgttttgatttaggttagttggttttttttgcggtgattcggaaattcgcgaatttttttggtttttatttaggtgcgcgggaagtaggtgtttaggagagaggggataatgaagattttatgttgatgattttaaagattgaatttgtagattaagcgtaaagtagaaattgaaagtatattgttggcggattttacggaagttatggaaaaggtaaagcgtagagttacgtcgtagtgtgtgtcgttttttttgggatggatgaaattgtagtcgcggcgtgggtaagaggaattagttgtagagattattttgtttaatatagattcggtaatttcgcggaagattagggttttgggagtgattatgggcggtgagagtttgtttttgttttagttgcggttattatgattacgttcgtttttcgtagattatgttttatggtaagcgttttttttttttgcgtataagttcgcgcgttcgacgcgtcggggtaattttagacgcgttgggggtttttgtttttaggtaagttcgggaatagttcggttttgtattttggatttgcggagagtattggtttttttatgggtagttaatagtcgcgtttgagtattttggtatatagttatttgaatttggggcggttgttgtttttggtaggttgcgagtaatagtttttaacgtttgttttttgttttgagagggaacgttgtagttttcgcgtcgtttagcggtggtagtttatagtcggttttagaagtagttaaaggttttttgtttggcgtttttttcgtgtttttggtcgttttaagttatttacgtaggcggttcgggttcggcgagtagttgggtttttgtagtttagaattttttagagaagtgaaagcgaagtttttacgggacgcgtttttaaattttaggggaataggttttcggaaaattttattttttttttttgagtaagattgggagttttcggtaagggttgtattttgcgtttattgttgggaaattagttttggggttggcgttgaggaaggttagtttttggttttttttgtttttgtttttgttgttgttgttatttttttttagttagagtaattaggtaagagaaagaaataaaagatgtttaagttagaaaagaagaagttaattgtttttttttgtagatgatatgattatatatagaaaaatttaaatattttattaggaaatttttagaattgataaatgaatttagtaaagttgttagatataaaattaatatacgagaattagtagtatttttttatattataatgaattagttgaaggagaaattaagaaagtaatttgat

SEQ ID NO: 1028 - DNA, 6294 bp, Artificial Sequence
  chemically treated genomic DNA (Homo sapiens)
attagattgtttttttgattttttttttagttagtttattatgatataaaaaaatgttattgattttcgtatgttaattttgtatttggtaattttattgaatttatttattagttttaagagttttttggtggagtatttagatttttttatgtataattatgttatttgtaaagagggataattgatttttttttttttaatttggatattttttattttttttttttgtttaattgttttggttagggaaaaataataataataataaaaataaaaataaaaaaaattagaagttggttttttttagcgttagttttaggattggttttttagtaataggcgtaaggtatagtttttgtcggaaatttttagttttatttaggggggaaaaatggggtttttcggagatttgtttttttagggtttaaaagcgcgtttcgtgggagtttcgtttttatttttttagggagttttgagttgtaagagtttagttattcgtcgaattcgggtcgtttgcgtgagtaatttggggcggttaggagtacgggaagggcgttagatagagagtttttggttgtttttgagatcggttgtgggttgttatcgttgagcggcgcggaggttgtagcgtttttttttaggatagaaagtaggcgttggggattgttattcgtagtttgttaggggtagtagtcgttttaggtttaagtggttatgtgttaggatatttaggcgcggttgttggttgtttatgggagagttagtgtttttcgtaggtttaaagtgtaaggtcgggttattttcggatttgtttaggagtaggggtttttagcgcgtttgggattgtttcggcgcgtcgggcgcgcgaatttgtgcgtaagggagaagagcgtttattatggaatatggtttgcgggaggcgggcgtagttatgatgatcgtaattggagtaggagtaagtttttatcgtttatagttatttttaggattttggtttttcgcggagttgtcgagtttgtgttgggtagggtgatttttgtagttggttttttttatttacgtcgcgattgtagttttatttattttaaggggggcggtatatattacggcgtggttttgcgttttgttttttttataattttcgtaggattcgttagtagtgtatttttagtttttattttgcgtttggtttgtaggtttaatttttgggattattagtatggaatttttattatttttttttttttgggtatttgtttttcgcgtatttggatgaggattagaggaattcgcgaattttcgaattatcgtaggaaaaattagttggtttgaattaaagtaattttgggtaaaagattttttagatgattttttaacgttttggtaacgtttggcgattgggagttagaattatgagttgttaatgtgtgtacggaagttataagtgtgtaggacgtaagttgggttattggaagcggacgatattaaggaggcgttgtcgcggatgtggtggacgatgttaagtcgttttttaaaaaaggaagtgaagaatgattaagagggttacgttttttattattttaatttttttaattagtttttttttgtttcgtttgttgtatatgtatttgtttaggtgagattttaaggaaaaataattttgtgggtttatttaatttggtaagtgttgtatttggaaaattaaattttaaattaaacgtaggacgtggaaattgacgataatatttaattatgatttttacgtgtatatttatttgaattggttaataaattaaattattcgttttgaatgtatgttattgaaatgttaatttttttttgggtttgaattatgtagtttatttgttatattagtttggtttttgttattttgtagaaattttgtttagatgaaggtggataatgtaaattagtaataatagcgataataataacgattattatttatttagtatttgttttttgttagttttgtgttaagtattttatgtatattattttatgtaaaattttgtgtgaggtagattatttttttatttgtattttatagatgtggggattgagatttttttaagtaattttttaaattttatttagttaattgagtttagatatagatttgttgtatttgggttgtagaaatttttgtttggaatttttgtgaataaagtaataatgtgtatattgatgtcgggagggagatgatagtacgtgtgtggttttgttttagtgtggggattttaggaaagttttttggagtttgtgatttttaaattgatatttgaagaggaatgaatttggggttggtaaggagtatgttatattttgttatagcgtgaataaggaagaggagggaaggagaaaggaaaaaaaaggatggtaatgaattagggagaatagagttgtttaagtttgaaatttgggtttttgattttttttttggttttattttttatattaaatttatagataagttttgtttgttttatttttaaaattaattttaaggtgattatagagattgtttaagggattttttagtttttatttttgtttataatttttttattttttttagagtagtaggatatttgattttattttgtgttttattttttggttattttttattgggtattaggtttttagtgttttggtgatttgggttttattgttttttttgacgtttcgtggtattatattattattttttagttataatggtttttttttttttgtttagcgtttatttattatggtttttagtttatggttggtatttagtaagtattggggggtgatagagtaagagagaataggtgagtgggaatgtattagtgaatatgtgtgaaagagaaagtttatgaaagtagaaggaaatagaatgaaaggaggaagcgaagggggtaagtaaatggaaaagagagatagaatggagtgagaaaagttatatatttttatttgattggaatttagagtgggaggtggggaggaggatagatatgatattggagtgagttttaaaaatgatttttataatgaaatacgtttaggttggggatttatttatttatttatttatttatttatttatttatttattttaaatttttgatagtagtattgaagtatgtaattgtttatagtttgtatttttttttttttttaattttttaggaataaagtaaaagagtatttattaatattttgtataaaaggaaattcgttttttttttattataattattataaatttaggtagaataagggttgtatatatttgaatttttgggaagtatgaaaggaagttatttagagttgtaggaaaggtaatgtaaatgttatattggattttgtttttaattataaagaatttttttgaagagaatatttataaagttttgggaattgttagggttatatgaaatgggtatattttaataatattaagtaatgattttttttttttgtttgtgagataattaatattatttagaaaaaaatttaaaatgaagttttaaattagtttttgatattttgataaattgaatattattttttataagatagatggataagaataaaatgtttataaatttttaaaatgttaatgttttatgattaaagaaatggaatggttattattatgtttgtttatagatttaatgaattggatagaaaagtttttaagggagaaaatagtaaatatattttatgaattatggtaaataaattttaaaagagaagataatatttttagaatgattaatataatgtattagaagaagtttaaataaaattatatgatgttaatttaaagagaaaattattgaatattaattaatattttttaatgttttatagtttttagttagaatagttaattattgtaaattagaaaatattttttgattaatatttgaattatttttatttaatttaatatgattattttttgtagtttgtgatatgaattttatttattattttatttatgggtagtatgaagttttttttatttaattttttagtaataatatttaatatatttaaaatatatatatagcgttatatagttaatattatggatatatgatttgtgtaattggtatagggttttgtattttatttgatgttttgttgttattgtattgaaattttttatttttagataaagggatttttatttttattttgtattgggttttaaaattttataatggttatgtatatttatatatgttaagttatatattgtggatagtagtgtatgtttttgaggtgattttagtttggtgggaaaaatagatgttaaatatttaattttaaagatgaaaaatattattaaaagagaaatatgatatattatttgaattagaagtttaaagtagtataggtttatttttatagttaaatgaggattaataaaggttaatttatttgtttaatatataagtagttatgagaggatgatttgttatttgataaaatttaaattttattaaatgattaatgagcgtttatttatatggttatggtttttttgttgaatttttagattaattataagtttaatataatgtaacgtttatattggtaatatttaatttataattttatagttatagttataattgggttatgtttatgtttaattatatttgtaattgatattgggttagttttgattagttatgttagttttataaaataaattggaaattttattgttttttaaaattgttaattgttaaatatgtgaattatttgtttttggtagatttattagagtttaataataaaatttatttgatttcgtggatgaagtttaggaataggacgagattgttagttttgagtattataagtgagaaaatgaagaagggtttattttgaaggttgaattaaaatagttatgttagaattgttagaattttgttggagatgggtatgttagtatattagtgatggttagagttatggaaatgaatgtaattatttaatttgtatgttagaagatagaagagagaattaatgttagtaggaattttgaggtatgagtaattttaaaaagtagttggagaaaggggtgtttattaataaaatagacgaatatatagtaggtagtaaagtgggaaagttagaagttagtgttttagaaggtaacggaaaatagaattttaagatagagtaagtagttagtatttttaaatgttataaagaggttgaataagatagagattgaaaagtgtgtttattaaatttggtagagtagagattgtttatgatttttatggtaatagtttgagaagagtagtgtagatgtaaataatatattagtttgtaggggttgagagaagaaagaaataaagtaagagaatataatttttataaaatgtttggtaataataaaagggatagggtaatgatttgaaaggtatggaagtttttatttttaattattagaaatatttgagtatatttatatattaatggataaaattaggttttgtagaacggggaaagtatggaattaagaaatttaagatattttgttgatttttttttttattttttttttattttttttttttttttaattttagttttaaaattttataattttaaataattagaatttattttttatttggggtttaaatttatgttttttattgaaatgtttttatcggtatttatttaattttggattgagtattggtttgtttaagaaagaagtttaatattttttaaatcgttttttagagagggtcgttgtagtttttatatagatttgtattatttaatttttttatatgttaatgttgtattgttggtaattagggtttttttttatatatagttttgtattatttaataatatatttcgagaaatgataaattaatttttgttaattttaattatttttattttataaatttttatttttttttaattttttgatttttgttataatatttagtttaaaatataaatatattgtatagttgttgaaaatattttttttttttatatttttattttatatgttttttttttattttttaaatttttttgttagaaattaagatataaatatatatattagtttaggtttatacggggttaggattattattattgttttttatttttatattttgttttattggaaggtgtttagggataataatatgtatggagttgttattttttatgatagtaatgtttttttttggaatattttttgaaggagttgttcgggttgt

SEQ ID NO: 1029 - DNA, 8634 bp, Artificial Sequence
  chemically treated genomic DNA (Homo sapiens)
ttgttttggtagtatagtttaattaatatatataataaaaaaaaaattttttattaaattttaaagttttttaagatcgatgataaagtgaaagtaaaagttggtagtatattattatttttttggaaagtttttggaaagaatgattgtattttaattatttagtttaggggtatgtagtgtgattaaagatagagtttttgtttttgtttttttaggaatatttgttgattttttgtgataattttatgagtagtataattgagggtcgtttttaaggttgattttattttttttttttttgagatagggttttatttcgttatttaggttggagtgtagtggtgttatttttgtttattgtagttttaattttttaggtttaggtgatttttttattttagttttttgagtagtttataggtgtatattattatatttgattaattttttgtatttttggtagagatagggttttattatattgtttaggttgggattttgtatattaagtttgggaaattttaggttagtagagttgtttttggggattttatttgtatagaggattgggttttaagagagtagaggaagttttagagtagaattgaggatttttgttagtttttttagtggtttagatttggaaacgatttgtagggtgtggttattaattgtggttttttaggaattattttgtaggaatggagtttattttgaggtaagtattgtgtgtaggggtacgggttagaatttagaatggggttgtttgatttagattttttttagaaatatattggggtattgtgttcgatagtggagtgggtagtcggagttgttgtgaattgtttgttcgttgggaaggttagagagggagatattgagttgtagggatattatattggttttcgttgtttaaaggggtattgtgatttagtttttgttagaaggtatattatttttattattttttttaggggttagtttttttgtttattgttttattaaaatgtgggtatgtattgaaattgaaatattatttattttttggtagaaatgtcgttagtaaagagtgaaatgttggtatttaaagtttttatttttattgtatttagagatagaggttaaaattttataaaggtgaaaatagtatgatattttaaattttgtttagaaagaagataaatggtagtaagatatgaggttgaagacgtgggggaaggaggaaagggaaatgaaagaagagttataataaggaaaatgttatgtttttggaaatgaaattttaagatgttgggatttttttttagaatcgtagggattgatttagtatatgtttattaaatgttagagattatttatttaggattagagtggtattagtttttttatagttatttttatttgtttgatatttttggatgttgggtttttttgtttgtttgtttgtttgtttgttgttttttttttttatagtttttgtggtttttagttttttttttgagtagggttggttttttttttttaataagatagttggtgtttaagattgttttttattttaaggataaaatttgttaagaaaggtaagttgatagtaggtgggggtaggttatatagattttatgatatatagaatgtgtttttagtattttttaaatattagattttatttaggatattattgttgtaatatttattgtttgttattattgttgttttatttattgttttttaatatatatgtttttttattgcgtaatttcggtttattgtagttttgagtagttaagattataggcgggttttattatatttgattaagttttttattttttgtagagatagagttttattatgtttattagggttggttttgaatttttgagtttaagtgatttgtttattttagttttttaaggtgttgggattataggtatgagttattgtatttagttggtttttttttttaatgatttattatattatataaatttattaaattgaaggaagataaagtataaaagagagtacgagtaaaatgtagttatgaaaggaagtgatgggtgaagaggaggagatagaaatatggttaagttagttgttacgttaaattgtttgtttttattatagtttaatgttttttttttgattttatatttggagatttgagtgtttttaaatagtgttttttattttttttttttttttttgtgtttgttttataaaagtaatgataaagtaatatagtaaatgtttgttatttgggggatagggtgaattaggtggtttttttttagtttttttaagtttttaaaggattaataagatttgagtgaggaaagagagaaggtattgttgtttttttataatttttagaaggattggtgacgtatgttatttttttttgagttttttatattttaggtttttttttgaggtttttttagtattttttgttttatttaagagtaagtatttttgtggaaatttttagaataaattagtatatgttgtattaaaatattgtgttttggttttgtttttttatatttttataattaaaggaaagagatataattaaaatgatagtttatttaaatgataaataagagaatttaaagagatataatttagttatttatttatgaagtgataatttgttagtagtttaggagatttgtattggtagatagatataatttgggatttttttttgaatattagtttaatttatgggaatttgtaattatagtttttttgaaagggtatttagtttagtgtataaaatatattaatttttgtgaattaggtttataattttttaattaagtttttaaaataagattagaaatgagggtataaattattatcgatgtataaaattgttattttttatttggtttggaagggttttgaaatgtttagagaaggttttgataaatggagaagatggaatatgttttttttagttggatttttgtttcgaagtattttttgagtttatattttaaagtgtggtattataattggtgtagacggagtttgttttaaaattgaaaaggaggatttagagattggtataaatgttttattttttttttttgttatttcgttattgttaaataattgtaatgatgggataagttaaattatgagttttttaaagttttttcgatttgttttatatttggggggttgttgtttgtttttgttaattttagttattttataggtttatgggagtaattttatttaatgatagtgaatttaatagaagtttataatttattgattatttagtttttttgtattttttattttataattgtagttttgtggtatttttttaaaagagagttattgtgaattaagtatagagttttatggtttgaatttaggttagattattttttttaagaaaaagaaaaaaaaatttaatagttattaagaagtagttaggttttataaatattattattttaattatgaggttatattaggaaggtttttgattggtatttaggtttgggggagtttgaattttttatgttatggttttagatttttgttttatatatttaggtattaatttagtttatatgtattatgtgtatttgaaaagttgtgtggtaattaaatttttataaatagaattttgttttaaatatattaagaaagtatttattttattttttaaataagaggttagtagattttttttataaagggttagatagtaaagattttatattttttgtataatataatttttattttatttatttagttttgttattgttgtataaaagtagttgtagatgatatataaatgggtgaggttgtattttaatgaaacgttatttgtaaaaataggtggtagattaaatttggttttaaggtttatttgggaaaaaaaaagattttttgaaaaagaaaaaataaatgaataattttttaaaaaattgttttttaggttatagtttgttagtttttgttttaaataaataatttttgaatgtttattgtggtgtgtaagatatgagtaaatattagggatatatagagaataaaagagaaaaattgttatttttgtgaaatttggaagttggaggtaagttatttaaaataaatttataataaagtattttatatagtgtagattgtttttttaaattaaaatttattttaaataattaattgatttattttgtaagtttgaatttttgtttttagatttttttaaagtgggtttttagttaggagcggtggtttatgtttgtagttttagtattttgggaggttgaggtaggtagattatttgaggttaggagttcgagataagtttggttaatatggcgaaatttcgtttttattgaaaatataaaaattaggttggtatagtggtatttgtttgtagttttagttatttaggaggttgaggtaggagaattgtttgaatttgggaggtggaaattgtagtgagtcgagattatgttattgtattttagtttgggtaataaagtaagattttgttttaaaaaaataaaaattaaaaaaataaagtagtttttagtttaagatagtttgagtttaggtgtgaatttattgttttattttgatgtaagtatagtaagtgtgggggttgtagggaatatttaggaggaataataattttagaggttttgtttttttatgtttttgatttttgtttatagtagtaatatttttatttagattttttgtttttggaatttgtttttttttttgttgtgtttatattttttttgtttgtggttagataagtataaagttttagatttaagtttttttgttttttttttttttttttttttttttatttttatttattttatatatattggtttatatatttattttttttttttattttttttagaatgataattttaggtataatttttggtatggttttttttttattttaagtcgtttttggagaaagtggttatgtttaaaatggtgagttatttttaagtttttttatggattttggattatttgtagtatggttttaggttatttagttttttaatagatttgagttaggtattgggtttgaatgtagtttgagaattttttatatatttagttattttttttaatgtttaattattatgatagggggtaggggattaatattatgggtggtttataagattttagtatttttaagaaggaatgtattttatttttaagtgtagattttaaatgttgaatgattattttgtttttataaaaagaatgtttatgtagatgttatgattgtatttgtaggaaaatgtttaaagtaattttattttgttaggagattaaattggatttattttgtttgattttttaagaaattttgaaagtataatttttaggataaggtaatgtatagaagtaatagttttgtttttagtgattagtgttatatttttagtatttaaattagtggttagaatatagtagatatttaataatttttgaaagtgtttttaaaatattttagttttgagagatttatgtgagattttaagtaaataattgattagagaaagatttaaatgagtttatttattgaaatatattgaattgtttttatattaataaattggttatatgtaataattttttttgggatttaaaaaatttagtatcgagaagttaattttgtttatatataaatatattgtaattataataaaattaggtagaagtttttaatagtagtaggaggtatgtgggaatttagattattaatttgtttttgtaaattaagttttttttttttaagagttaaaaattatttggttatagataatattaaatatattagtttaatgatttagtttatgtattttgagttatgtaattacgaaggatggaaatttttagaatttttttattaagggaattgttagagagtttgatattttttatagtatatgatttattttatgggggatgattattattttatgttaaattttgttttggatttttataaagattgatgggaggtaggaaatataaattttatttttttttatgttatttatatttattagtttattttggtgattatattatttttaaaatatataagaatgttagttgaaagttgggtttttattttaattttttaagttttagattttttagaagatgtataattattttatttatatgattacgttaaaatattttttagtttggggtataggaatttatatttagttgttgtttgttgaaagttgttaattttttgattattataaggatgattaagagaagaaagggatattttttaaaaatttaaattatttatattattaattaattaattttatttagtaggaagaagatttttagatatattggtttgtttatgatatatattttatataatttaaatttttatggataaatatgtttagatatttatttaaatatgaataatattaattattgagtatttaaagaataatagattaatttattatttaaaagttttatgtaattttaaaattatagtaattataatatcgttaattgatataaattttttaaagagaagtttaaatgttttatgtatatttttagaattagaatttttattttatttttttattatttattttttagaaaatattatatttatagttaatttttattaaatttttattgtgttttaagttatttttttgtaaatatttatttagtgattgtttatagtacgagtttatatattagaatatatgttttagagaagttgtttatttgatagaggattataggtagagtatttagaatttaaacgtatatttgtttagttttaatattataggttttaattattgtgtatattaattatttttagttaagaattttttagtttacgttatgtagaatattttttttgtaaaatgttattatattttataagttattgaagggaattttttttggttataaagtaattttgttttataatatttattgaaaagttagtgagttgttttttaaaatatagttattttaggtgtaggaaatagtgtataaatggtttattgtatattgtatgttttgttagattgagtggtagtgggagttttttgttatgtgggtgttgatatttgttagagtgtgttgtttttattgaagaatcgtgaagataaagtcgatttataggatgtttgaatttaaataataatatatgttttgtgtatagaattggtggaagagaaaatgttaggatagtgtgaggattgttatgtaaggttagaattattgtatttagaaagttattattgtatagggaagaaatttaagtttataaaattagtgggttgttttttattatttcgtgttgttattagaaggagggttatattttgttgaaattatataaagagtttttgttggtggtagaattgtgaattggatggattttgggaatggttagaaaaataaatgtttgtggttgtgagtagtgtttatatttatggtttagttagggttgtttgagatttgttgttttgattgaattaatttgttatttaattggttggtttatttatagttagttttattaatttttttattttttttattgagttatttaagtaaagaaagtgttattcggatagtttttggtttttgggataattaattgggatttgattttagtatattttgtttttagtgtaaagtttttttggaagtatatttaattttattagatattgatgaattaaaaatatatggaagtagtttaggtttatatttgagtattttgagaatggttttgtttattttagatttttttaggttttagtgggtgtatattttttgatatatttattttagttttattttttattatgtaaaatatatatataaaatgtagattttattatagggtttataaaatagtttaagaaattaaatattatgtgtgatagattatattttttaaaagtaatagtaaaaaaaaaaaaaatttggttcgataatggaaataattagtgttatttttaattgggatgtttttttaggtaagggaaagtgattttttaaaaaagtaaaattttgattgtaagatagttattattgttttttatttaagataaaaaaaatattagggagggaataaattatgatttgtaataaagtgaaaagtgagattaggtagtatggggataatggaaataaagtgttttttttttgaaataatatgaataattaatgtaataaatgtagtagaaaaaattttagtttaaatatagaaaagaatgtgtttaatgtttttggttttttaatttagaaatatttggaggttatttatttattatgatggattttttttttttattggaaaattttgttagtattgagcgtttttgttttttgttttttgttggttggttggttttgaagtattttttttgtttttgtttttgggttttttttttttgaatattatataatttattattattttatgtttgttatagagtttgttattttattaaggttatgttatattttaaaaggatgtatttatttgttttattaatagttgtatgtttgtttttttttagg

SEQ ID NO: 1030 - DNA, 8634 bp, Artificial Sequence
  chemically treated genomic DNA (Homo sapiens)
tttggggaggaataaatatgtagttgttaatgaaataaataaatgtatttttttgaaatatggtatgattttaataaaatagtagattttgtggtagatatgaaatagtaatggattatgtagtatttaaggaagaaaagtttaagggtaaagataagaaaaatgttttaaaattaattaattaataaaaaataaaaaataaaaacgtttaatgttaatagagttttttaatagaaaaaaaaaatttattataatgagtaagtaatttttaaatatttttgagttaaagaattagaggtattgaatatatttttttttgtatttaaattggagttttttttgttatatttgttatattgattgtttatattattttaaagaagagatattttatttttattatttttatgttatttaattttattttttattttattataaattataatttattttttttttagtattttttttgttttaaatgaaggataatgatagttattttgtagttagaattttgtttttttaagaggttatttttttttgtttaaaaaggtattttaattaaaagtggtattgattatttttattgtcgaattagattttttttttttttgttattatttttggaaagtgtgatttgttatatatagtatttggttttttaagttgttttgtagattttataatgaaatttatattttgtatgtatgttttatatgatagaaagtgaggttggaataaatatgttagaaaatatatatttattgggatttgagaaaatttggagtaagtaaagttatttttagagtgtttaagtgtgagtttagattgtttttatgtatttttggtttattagtatttagtaaaattagatgtgtttttaagggggttttatattggagatagaatatattaaaattaaattttagttgattgttttagagattaagggttgttcgaatagtattttttttatttaaataatttagtagggaaaatgggaaagttaataaagttgattgtgaatggattaattagttgaatgataggttggtttagttaaagtaataaattttaaatagttttagttagattatgggtgtgggtattgtttataattataggtatttgtttttttggttatttttagaatttatttagtttatagttttgttattagtaaaagttttttatgtagttttagtagggtatggttttttttttgatgatagtacgaaataatgagagatagtttattaattttgtagatttagattttttttttgtgtagtggtagttttttaaatgtagtggttttgattttatatggtagtttttatattgttttgatatttttttttttattaattttatatatagaatatgtattattatttggatttagatattttgtgggtcggttttgtttttacgattttttaatagagatagtatattttagtagatgttagtatttatataataaaggatttttattgttatttagtttggtaaagtatataatatataatgagttatttatatattgttttttgtatttaaaatggttgtgttttaggaagtagtttattggttttttagtagatattatggggtagagttgttttgtaattaagaaaaattttttttaatgatttataaaatgtgatggtattttataaaaagaatattttatatgacgtgagttgaaaaatttttggttaagagtagttaatgtatatagtggttaagatttgtggtgttagagttggatagatgtgcgtttaaattttggatattttatttgtggttttttgttaggtaggtaatttttttaagatatgtgttttaatatgtaaattcgtgttatgagtaattattgaatggatatttataaagaggtagtttagaatatagtaaggatttaatagggattagttatgagtataatattttttgagaaataagtaatgaaaaggtaaaataagaattttaattttgaaaatatatatgaaatatttgagtttttttttaaaaagtttatgttaattgacggtgttataattattatggttttgaaattatatagagtttttgaataatgagttaatttattattttttaaatgtttaataattaatattatttatatttaaataggtatttagatatatttatttataaaaatttaaattgtgtggaatatgtattataggtaagttagtgtatttagaagttttttttttattgaatggagttagttgattaatagtgtaaatgatttggatttttaaaaagtatttttttttttttttgattatttttgtgatgattagaaaattgataatttttaataagtagtaattgaatgtgaatttttatattttaaattgggaagtattttgacgtaattatgtgaatagggtaattatatattttttaaaaaatttgaaatttaaaaagttggagtgaaaatttagtttttaattagtatttttatatattttaaaaatagtatgattattagggtgaattagtgagtatagatgatatgaaagagagtaagatttatgttttttgttttttattagtttttgtggaaatttaaggtaaagtttagtatagaataataattattttttataaagtgagttatatattgtaaaaaatgttaaattttttgataatttttttaatgagaaaattttagggatttttatttttcgtaattatatgatttaaaatgtataagttgagttattaggttgatgtgtttgatattgtttatagttaaatagtttttaatttttaaagagaaagggtttaatttgtaggagtaagttgatggtttaaatttttatatgttttttgttgttgttagaagtttttgtttagttttgttataattataatgtgtttatgtatgggtagggttggtttttcggtattaagttttttagattttaaaaagaattattatatatggttaatttgttggtgtggaggtaatttagtgtattttaatgagtaaatttatttagatttttttttagttagttatttatttaaaattttatataaattttttaaaattaaagtattttgaaaatatttttaaaagttattggatgtttattatattttagttattgatttaggtgttgaggatatagtattggttattgaagataaagttattgtttttgtatattattttattttgaaagttatgtttttaggattttttaaaaagttaaataaaatgaatttagtttgattttttgataaggtaaaattattttggatatttttttataagtatagttatagtatttatatgagtattttttttgtaagagtagagtaattatttaatatttaagatttatatttgggagtgaaatgtatttttttttgagaatattgaggttttataaattatttatagtattgattttttgttttttgttatggtggttaaatattaaaaaaaatgattgaatatgtgggaaatttttaaattgtatttaaatttagtgtttgatttaggtttgttagggaattgaataatttgaaattatattatagataatttaaaatttataagaaaatttagaaatgatttattattttgagtatagttattttttttagaaacgatttgaagtaaagaaaaaattatgttaaaagttgtatttagaattgttattttgagagagatagagagagagagtagatgtgtgagttagtgtgtatgaaatgaatgagagtaagaggaagggagggagggaggaagatagagaagtttagatttagggttttatatttatttaattatagataagggaagtataaatatagtaaaaaagaaggtaagttttagaaataggaagtttgagtaaaagtattgttgttgtaagtagaggttaaggatatgaagagatagagtttttgaaattattgttttttttggatattttttgtagtttttatatttattgtgtttatattagagtaaggtagtagatttatatttaggtttaagttattttaggttagaggttattttatttttttaatttttatttttttgagatagagttttgttttgttgtttaggttggagtataatagtatgatttcggtttattgtaatttttattttttaggtttaagtaatttttttgttttagttttttgagtagttaggattataggtaaatgttattatgttagtttaatttttgtgtttttagtggagacggggtttcgttatgttggttaggtttgtttcgaatttttgattttaagtgatttgtttgttttagttttttaaagtgttaggattataggtatgagttatcgtttttgattaagggtttattttaaaagaatttgaagataaaaatttaaatttataaagtgaattaattggttgtttggagtgagttttgatttaaagaaatagtttgtattatgtgaagtattttattgtgggtttattttaaatagtttatttttaatttttaagttttataagaatagtagttttttttttttgttttttgtgtatttttggtatttatttatattttatatattatagtaggtatttaagaattatttgtttagggtaggggttggtaaattatgatttagggaataattttttaaaaaattatttatttatttttttttttttaaaagattttttttttttttaagtaagttttgggattaaatttaatttattatttgtttttgtaaataacgttttattggaatatagttttatttatttgtgtattatttatagttgtttttatgtaataatggtagagttaagtagatgagatagagattgtattgtataaaaggtgtaaaatttttattatttgattttttgtagaaaaagtttgttgattttttgtttaaaggataaagtaggtatttttttagtgtatttaaaataggattttatttgtgaaaatttgattgttatataattttttaggtatatatagtatatatgaattaaattagtgtttaggtatatggggtagaaatttgagattatggtatagaaaatttagatttttttaaatttgaatgttagttaaaagtttttttaatatggttttatggttaaagtggtgatatttgtaaagtttgattgttttttggtaattgttagattttttttttttttttttgaaaaaaataatttaatttggatttaggttataaaattttatgtttgatttatagtggtttttttttggaaaaatgttataagattgtagttataaggtgaggagtgtagagaaattaagtgattagtgagttatgaatttttgttggatttattgttattaggtagaattgtttttatgggtttgtgaaatggttaaaattagtagagataagtaataattttttaggtgtaaagtaaatcgaagagattttaaaagatttatgatttagtttgttttattattataattatttgataataacgaagtaataaaaaaaggaggtgggatatttgtattagtttttggatttttttttttagttttaagatagatttcgtttgtattagttataatgttatattttggagtataggtttaaggaatatttcggagtaagaatttaattgaaggggatatattttattttttttatttgttagggttttttttgggtattttaaaatttttttaagttaaataaagagtgataattttgtgtatcgataataatttatgtttttatttttaattttgttttgaaagtttggttagaaaattgtaagtttgatttataaaaattggtatgttttgtatattgagttaaatatttttttaagaaagttataattatagatttttatgaattaagttaatgtttaaggagaaattttaaattatatttatttattaatgtaaattttttaaattgttaatagattgttattttatgggtgagtaattgggttatgtttttttaaatttttttgtttattatttaagtggattattattttgattgtattttttttttttagttgtgaagatgtaaaagaataaagttaagatataatattttggtatagtatgtgttggtttgttttggggatttttataggggtgtttatttttgggtggggtaggagatgttgaaaagattttagagagaagtttaaagtgtggggagtttaaagaaaaatgatatgcgttattagtttttttagagattgtgggggaataatagtgttttttttttttttttatttaggttttgttagttttttggagatttagaaaagttgaggaagaattatttagtttattttattttttaggtaataaatatttattatattattttgttattatttttgtgagataagtatagaaagaagaaaagaggatgaggaatattatttggggatatttaagtttttaaatgtgaaattaggagggaagtattggattgtggtagaagtaagtagtttggcgtggtaattgatttggttatatttttatttttttttttttatttattatttttttttatggttatattttattcgtatttttttttgtattttgtttttttttagtttgatgagtttgtatgatgtagtgaattattaaaaaggaaagttagttgggtgtagtggtttatgtttgtaattttaatattttgggaagttgaggtgggtagattatttgagtttaggagtttaagattagttttagtaaatatagtgagattttgtttttgtagaaaatagaaaatttagttaggtgtggtggggttcgtttgtagttttggttatttagggttgtagtgaatcgagattgcgtagtgaagggatatatatattgaaggataataagtgaaatagtaataataataggtagtaaatgttgtaatagtaatattttgggtaaaatttgatgtttgaaaaatattgaaaatatattttatgtgttataaaatttgtatgatttgtttttatttattgttaatttattttttttaataggttttatttttaaggtggaaaataattttgggtattagttattttattaaaaaaaaaaagttagttttgtttaagagagaggttggggattataagagttgtggaaaaaaaaaataataaataaataaataaataaataaaaaaatttaatatttaagggtgttaagtaggtgaggatggttgtaggaaagttaatgttattttggttttaaatgaatagtttttagtatttgataaatatgtgttgagttagtttttacgattttgagggggagttttagtattttgaagttttatttttaggagtatgatattttttttgttgtggttttttttttatttttttttttttttttttttacgtttttagttttatgttttgttgttatttgttttttttttgggtagagtttgaaatgttatattatttttatttttatgagattttagtttttgtttttggatgtaataaaaatggaaattttgagtattaatattttattttttgttgacgatatttttgttagaaagtgagtggtattttaattttagtatatgtttatattttgataaaatagtgaataagagggttgatttttgggaagagtggtgagagtggtatgttttttggtaaaggttgagttatagtgtttttttgggtagcgggagttagtgtggtgtttttgtagtttagtgtttttttttttggtttttttagcggataaatagtttatagtagtttcggttgtttattttattgtcggatatagtgttttagtgtgtttttgagaaaagtttggattaagtaattttattttgggttttggttcgtgtttttgtatatagtatttgttttagggtaagttttatttttgtagagtggtttttgagggattatagttggtggttatattttgtaggtcgtttttaaatttggattattgggagaattggtaagagtttttaattttattttgaagttttttttgtttttttagaatttagttttttgtgtaaatggagtttttaagaataattttgttagtttaaaattttttaagtttaatatgtaaagttttagtttgggtaatatggtgaaattttgtttttattaaaaatataaaaaattaattaggtgtgatggtgtgtatttgtaagttatttaggaggttgaggtgggaggattatttgagtttgggaggttgaggttgtagtgagtagagatggtattattgtattttagtttgggtgacggagtgagattttgttttaagaaaaaaaaaagtaaagttaattttaaaagcgatttttagttatattgtttatggaattgttatagagaattagtaggtgtttttaaaaaagtaggaataagggttttgtttttggttatattgtatatttttgggttaagtgattaagatataattattttttttagaggttttttaagaaaatggtaatgtattgttaatttttgtttttattttattatcggttttaggaaattttggaatttaataaaggattttttttttgttatatgtgttagttgagttatgttgttaaaatag

SEQ ID NO: 1031 - DNA, 5958 bp, Artificial Sequence
  chemically treated genomic DNA (Homo sapiens)
ttttgttttattttttttttttttttttgcgataggttttttgttatttaggttggagtatagtggtatgataatagttttttgtagtttcgatttttttggtttaagtgatttttttattttagttttttgagtagttgggattataggtatgtattattacgttcggttaatatttgtatatttttgtagagatagagttttattatgttgtttaggttagttttgaatttttgggtttaagtgttttatttgaattggttttttaaattataggtatagttattatagtgagtttttttttttttttaataaatttaataaagaaaagaaatagttataagtaaatatttattttttttttttatattgaagattggttgattttagtttttttaagtttttaataaatgtttgtttatataattggtgtttttttttaaatttaaattttaaattttaaattttaaattttatcgatttggatagtattagaaatggtatttatattaatggttatagtatatttttttatatgtgaatgtaaatggaattgttaggtattaaaaaagaaagtttatatagtggaagaaaataaagtatttagatataagttttaagagatttattgtgttaatatagttttattttttgagtggtaagtttttaaaaagaaatgtggtgttttaattttaggaaaagataagggtgattgaagtgatagtttagaggaaaaagatgtagatatttattgagtatttttaatgtgttaggtgttattttgggtatttttattatgtttttttatttaatttttatggtgattttttggaattgtgttatttttatttttatagatgaggtaattgagagatagttagattaaagaattgtttatgattgtttggttaataataagtggaggggtgaggtttgaaggtaggtttgttttattttaatatttatatatatttttaaatttaagttattttgatttgtgttgtttaaatttaatgtgtttagttgtttgtttttttaattattaagatttttttttaaaaggtaggatatttttggtaatacgaattaattttgtttagtattgttataaattgttaattggagatatttgaatttggagatggaattgaaatggttttgcggtattagagaagattaagttattatataaataaagtatagagttgagaatatattttaaatttttttattaattttgatttttattgattaaaattttagtgggtagtatgtttatgtttatgatttttaatattaataatatcgtaagttaaatttattaatatatgttaagtattttgtttatgatttttttaatttagaggattgttgagttgggattaatttttttaaatgggaaaaaaatttaggtgagagttgagattgtttttgagattgagaaaggtagttttgacgggattttagattttagtagtaggagttgaataatgggtatagaattagtttgtttaagattttttgattaataaattatggaataagatttaaatttaagtttattttattttaaagtttatattatattttgtttattatattttgttttgttatatgattataatttagtttaggtttataaaaaagttttaattttaaaatttttatggcgtgggtgggaggggatttagatgattttgtataggtaagaaatatttagttttatggagtttgatggaagagttatgtattaatatgggaaaagtagaggttatttttgtttttgtttttttttttttagacgggagtttcgtttttttatttaggttggagtgtagtggcgttatttcggtttattgtaagtttcgttttttgggtttacgttatttttttgttttagttttttgagtagttgggattataggcgttcgttatcgttttcggttaattttttatatttttagtagagacggggttttatcgtgttagttaagatggtttggattttttgaattcgtgattcgttcgtttcggatttttaaagtgttgggattataggtttgagttatcgcgttcggtcgtttttgtttttttttgaattttttttttttttgggtgatagatttcgttaacgtttaatgaggatatttaggtgttagtttttgtttattaaatgatttttatggtttaggagtcgaatgggacgtaaataaatagttaagttttatgaatttattttgtatttatttttagaagatgataaaatatttgtatttatgtgtagcgtggtattttagttaaattttgtattttattttgttttattttaaagtagaatatttttaaaaaggatatttagttttgttttttttttttcgtttaagtttatttagtttttttatttattatgtaaggatttaaatggttatttttatagaagtgagataagatagaattaatgtttttgtagttattttatttttgtttatttttatttttgatggagagggttttaggatataatgtattgaaggttatattgtgagagatgaataatatttgtaaaagaggtttttttgttttggaaaggttttatttttaaaaaaaaatgtgagtattaaggttaagtagattttattagtttaaattttaaggatgatattaggataaagttgggtttatgagaagagaatgagagggagatatagtgatatgaaaataaggaggaaaacgaggtgtttatgtaagttgggtttattataaatataaaggtaatcgttagggaaaagtaaagaagtttttgtatatttttagaattttgaatgttttagtgatgttgtatgagtgagttttaatgatagtgaattgaattagttaagttaggttgtgtttatatgagaatgtgtttttgttaaatatgttaatattattgaagtaaagaaatttggagttttttttaagatataggttttttttatttattcggtttaagttttttttttttgttattttatgtattgtgtttcgtatgttaaatagtttgagaaatttaaatgggttatgttcgtttatattttattgttttgtattttttgttttgtattagtaaagtagttttattggttttttttttttttattaataataaaggtaatatttttgatgttgtttttttagaaaatttttatttattaaaattgttttaaagattatgtttgtttgattttagaattttttgtaattatttgttattgtaatatttattattgtattttatttatttgtgtaattaattttttatattttgtattagataataaagttttttaagttaggtattatatttatttatatagtatttatattttttataataagggatattagtagataaataatatatattaaatgaataatgaagtttttgaaatattatagttgaaaattataggagttatattatatagaataaatatttattttgttatagaatttagtgtaatttaggtattattttatttttaagttttaggttggttggagaaagataataaaaagaaatatgattgtgtagaaatagataaatttttttggaaagtatttgaaaatggtattttttttttatagtgtgtttatagtgtgggtaaatttattgttttgtcgtattttttgaaaatgaagaattgttatattaaggtgaattatttataaattatgtatttgtttagaagcgaatagatttttattattataagaatttttttttggtgttttttatttatagaatttaagattttttaagaaaggttttggatttttttttttaggatattaggatataaagttatttttttatgatttgttgaaattttttattttattttttttgttagtgattatgggtttttagaggttagatttggtgtttttggataaagagtatgaagtaatagtggttgaattagagttggaatttagatgttttttttattaagtatataattttttattagataatattttttttttattttaattaagtagttttagtgtattattttttggagtataaatatattttaattttataatttgagtggttttgaatattgtttttatttggaatgtgttgtttttttttatttttttttattgaagtttttttattttttaatgttttgttttaattgtttttggaagattttgtttttatgtttttattggaattaatgttttagtattatttgtttattttgttatatagttagtttttatattgttttttttttttgatagattaaattttttaaggataagtatttagttttatttatttttagattttttatattatttagaaagttattttataaatgtttgtggaattgatttttatgtgaagtatatgtgtttttttattttgttaatatgtattagaaaattaaattttttgaaaagttgtagtatgttttttaagagtagtaatagtttttagaaattttttaaaatgtttagaaaaagatttattttaaattatttttttaataaaatgattggttggtttatttttattattatgatagtatttgtaattaattgaaaaaaaataattatgttattaaaagaaaattatttatgattttgttttaatatttgttattttagtattatatttgttatatggtattatgataaagttatttagaaataaaaaagtatataattgataatttattaaattgtggagttttagtattttaaatgtatattaaaattaaattattttaaagattaaagaaaattttcgttatatttcgtatttgataaggaataaataggaagtgtgatgatttaggtttgttttgaggggatgggttattagttgtaaatcgtggaattttttttgatataatgaaaagatgagggtgtataagttttttagtagggtgatgatataaaaagttatcggagtattttataaggtataaatttttagagatagtagagtatataagtttttaggataagagttaggaagaaattatcggaaggaattattttattgtgtgtaaatatgatttttaagttggtcgtggtttttttggtagtttttttgatttttgtagttttgtgtgaaggtaagtatatttttttgatttatagcgtttttttatgtttaaatgtgatttttagatagtaaagttatttttgatgttttggtaataaatattttttttatttagaaatagaatataattttagtagttaattaatgttaaattgaagatttagaaaaaattatatataatatttaggaaagtataaagtttgattaatatagatattttgtttttataatttatattatgtagtatgtatatatttaacgtaaataagtaatttatagtatgttttattgagaattacggttatttatattatgtattaatattgagttgagtaaggtaatttagataattttattttttgtagtattttattgataagttttagatttgttattaatttttgtttggtttaaagatattttgattatagattaggtatgtataatttatttatatatttttgttaattttttttgaaggtaatttttatgttggagagttttagtttgtttattataaataatattgtggtattatagaggattatgtaatattgattagataaaaatattatgaagatgttgatattgtataaaaagaattttaattttttatataggaagtcgtttaatgttgttagttatgattgttttttaaaataaagaattaattgaggttaagggttaggagaatatttaggaatgagtttattagaaatatgatgttttttatagtttttaaataattatattggaattagaaaggaagtagttggtagagttgtgtttgttgataaaattaatttttaattatttttttttttaatagg

SEQ ID NO: 1032 - DNA, 5958 bp, Artificial Sequence
  chemically treated genomic DNA (Homo sapiens)
tttgttgggggaaaaagtgattaaggattgattttattaataggtatagttttgttagttattttttttttaattttaatatgattatttggagattatggaaggtattatgtttttagtgaatttatttttgaatatttttttagtttttgattttagttagttttttgttttaaaaaatagttataattgataatattgaacgattttttatataaagagttagagttttttttgtataatattaatatttttatggtatttttatttggttaatattgtataattttttgtgatattatagtgttatttatagtaggtaagttaagattttttagtatagaaattgtttttagaaagaattaatagaaatatataaataagttatatatgtttggtttataattagggtatttttaaattagataggaattaatgataaatttgaggtttgttaatgaaatattataaggagtggaattgtttgagttattttgtttaatttaatattaatatataatataggtaatcgtggtttttaataggatatattataaattatttatttacgttaaatatatgtatgttatatggtataaattataaaagtagaatatttatattgattaaattttatatttttttaagtgttatatatagttttttttaaatttttaatttaatattaattgattgttaagattatattttgtttttgaataaaaaggatgtttgttattaaagtattaagaatagttttgttatttaaggattatatttagatataggaaaacgttgtaggttagaaagatgtgtttatttttatatagagttgtagaaattaggaaggttgttaagagagttacggttagtttggaagttatgtttatatatagtgagatggtttttttcggtggtttttttttggtttttgttttagaagtttgtgtgttttgttgtttttgaaagtttgtgttttatggagtgtttcggtggttttttatattattattttattagagaatttatgtatttttatttttttattatgttagaggaaattttacgatttgtaattgatggtttatttttttagggtaaatttgagttattatattttttatttgttttttattaaatacggagtatgacgaaagttttttttgatttttaaaataatttaattttaatatatatttaaaatattgaagttttataatttggtgaattattaattgtatgtttttttatttttagataattttattatagtattatgtgatagatatagtattagagtggtaggtgttagaataagattatggatgatttttttttaatggtataattatttttttttagttaattatagatgttattatgatggtgaagataagttagttaattattttattggggaggtaatttaaaataaatttttttttaagtattttagagagtttttaggaattgttattgtttttagggggtatattataattttttaaaagatttagttttttaatgtatgttaatagagtgaaggggtatatgtgttttatatagaaattagttttataaatatttatggagtaattttttgagtaatgtgggggatttagaaatagataagattaggtatttgtttttaaagagtttggtttattagaagaagaaagtaatgtaaggattgattatatagtagaatagataagtggtattaagatattaattttagtggaggtataagagtagaattttttaaaggtagttggagtaaggtattgaggaataggagggttttaatagaggaagatgaaagagaatagtatattttagataggaatagtatttaaggttatttaagttgtaaagttaaggtatgtttatgttttagaaagtggtgtattggagttgtttggttggggtgggagggaggtgttatttaatggaaagttgtatgtttagtggaaagagtatttgggttttaattttggtttagttattgttgttttatgttttttatttaaggatattaagtttgatttttgaggatttatgattattagtaaaagggatggagtgagaaattttaataaattataaaaaggtggttttatgttttagtgttttgaagaaaagaatttaagattttttttgaaaggttttggattttgtagataaagagtattaaggaagggtttttatgatagtaaaagtttgttcgtttttgggtaagtatataatttataaataatttattttggtgtaatagttttttatttttagaaagtacgatagagtagtgaatttgtttatattgtgaatatattgtggagggggaatgttatttttaaatgttttttaaaaaggtttgtttgtttttgtataattatgtttttttttgttatttttttttaattaatttaagatttgaggataaaataatgtttgggttatattgaattttatagtaaagtaaatgtttattttatataatgtagtttttatagtttttaattgtagtattttagaaattttattatttatttaatatgtgttgtttatttgttaatgttttttattgtaggagatgtgaatgttatgtaaatagatatagtatttgatttaaaggattttgttgtttagtgtagaatatggaaaattagttatataagtaagtaaaatatagtgatgagtgttataataataggtaattataggaagttttggaattaaataaatatgatttttgaggtagttttgatgaatgaaggttttttgaagaaataatattaaaagtgttatttttattgttaatgaggagaagaaagattaatgggattgttttgttagtataggataggaagtataggataatgaaatgtaggcgaatatggtttatttgggttttttaaattatttagtatacggaatatagtgtatggagtgataagaagagaaagtttgggtcggataggtaaaaaagatttatattttaaagaaaattttaagtttttttgttttagtgatgttggtatgtttagtaaagatatatttttatatggatataatttggtttgattgatttagtttattattattaagatttatttatatagtattattaagatatttagagttttgaggatgtgtaaagatttttttgtttttttttaacggttgtttttgtatttatggtgagtttaatttatatagatatttcgtttttttttttatttttatgttattatattttttttttattttttttttatgggtttaattttattttgatattatttttaaagtttgagttaatgaggtttatttaattttgatgtttatatttttttttaagaatgaagtttttttaaggtaaaaagattttttttgtaaatgttgtttattttttataatgtaatttttagtgtattatgttttagaattttttttattagaagtgggaatggataaagatgaagtgattataagagtattgattttattttgttttatttttgtaaagataattatttgagtttttgtataatgagtagaaggattaaatgggtttaggcggaaaaaaaaaagtaggattaagtattttttttaaggatattttgttttaaaatagagtaaagtggggtataaagtttaattaaagtgttacgttatatataaatataaatgttttgttattttttagagatgaatgtaaagtgagtttatgagatttaattgtttatttacgttttattcggtttttgagttataagaattatttgatgagtagagattagtatttagatatttttattagacgttgacgaagtttattatttaagaaaaggaagagtttaagaaagaataaagacggtcgggcgcggtggtttaagtttgtaattttagtattttgggagttcgaggcgggcggattacgagtttaggagatttaaattattttagttaatacggtgaaatttcgtttttattgaaaatataaaaaattagtcgggagcggtggcgggcgtttgtagttttagttatttaggaggttgaggtaggagaatggcgtgaatttaggaggcggagtttgtagtgagtcgagatagcgttattgtattttagtttgggtgaaagagcgagattttcgtttaaaaaagaaagaataaagataaagatggtttttattttttttatattagtatataatttttttattaaattttatgaaattgggtgttttttgtttatgtaaaattatttaaatttttttttatttacgttataggaattttagaattaggatttttttgtaagtttgaattaagttgtagttatataataaagtaaaatatggtgggtaaaatgtggtatgagttttgaaatgaaatgaatttgggtttaaattttgttttatggtttattaattaggagattttgggtaagttgattttatgtttattgtttaatttttgttgttaaaatttgagatttcgttagagttgttttttttagttttaggagtagttttagtttttatttgggttttttttttatttgaggaaattagttttagtttaataattttttaggttaaaagaattataaatagaatgtttaatatatattagtgagtttgatttacgatgttgttaatgttaagagttataaatataaatatattgtttattaaaattttagttaataaaagttagagttagtggaaagatttaaaatatgtttttagttttgtattttgtttatgtgataatttgattttttttagtatcgtaagattattttagttttatttttaaatttaaatgtttttagttaatagtttataataatattgagtaaagttggttcgtgttgttaaaagtgttttattttttaaagaaaaattttggtaattggagaagtaaatagttgaatatattggatttgagtaatataagttagaataatttaaatttaagggtatgtatgggtgttggaataagataaatttgtttttaagttttatttttttatttattattagttaaataattataggtagttttttaatttgattgttttttagttattttatttgtaaaaatgagaataatatagttttaaaggattattatgagaattaaatgaggaaatataatgaaaatgtttagaatggtatttggtatattggaggtatttagtaaatgtttgtattttttttttttagattattattttagttatttttatttttttttggagttagagtattatatttttttttaaaagtttattatttaaaaagtaaagttgtattaatataatagattttttaaagtttatgtttagatgttttatttttttttattatataagtttttttttttaatgtttaataattttatttgtatttatatgtaaaaaaatgtattataattattaatatgaatgttatttttaatattatttaaatcggtggagtttggagtttgaagtttgaagtttaggtttaggggaagatattagttgtgtaaataggtatttattaaggatttagaaaggttaagattagttaatttttaatatgaaaaaaaaaagtaaatatttatttgtagttattttttttttttgttaaatttattaaaaaaaaaaaagggtttattgtggtggttatgtttgtaatttggaaggttaatttaggtggagtatttgagtttaggagtttaagattagtttgggtaatatgatgaaattttgtttttataaaaatatataaatattagtcgggcgtggtggtgtatgtttgtagttttagttatttaggaggttgaggtgggaagattatttgagttagggaggtcgaggttgtagggagttgttattatgttattgtattttagtttgggtgatagagagtttgtcgtaagaaaaaaaaaaaaaagtaaaataaaa

SEQ ID NO: 1033 - DNA, 6731 bp, Artificial Sequence
  chemically treated genomic DNA (Homo sapiens)
aataaataaataaataaataaataaataaataaagtgattataagagtttgggtaatatagtaagatttttatttttataaaagtgttttaattatttggttgtggtggtatatatttatagttttagttatatgggaggttgaggtaagaggatcgtttgagtttaggagtttaaggttgtagtgagttatgattattttattgtattttagtttgggagatagagtgatgttttgttttgaaagaaagaaaaataaaggaaagtgggtatttgagtatttatttgaaggaaatttttcggaatcgatttagaaatttttatgaagtatttagaattttttgttttggagttagttagattaggatgaattaaaagtgattgaatatttattatttgttaattattttatatatattaattaattgattttgatgttaattttataaattaggttttatttttattatttttttgtaggtgagaaaattgaggtatagagtgagtatttaagttgtttaagggtatatatttagttagggatagagttgggatttgtattagttggtttggagtttaagttttttattattataatagtttggagaggtaagtattattattttcgtttttatagataaggatattttgataaatgttaagagatgttataatttgttagttgattggtatttaggttgtatttgttacggtttttttcgtggtattgggtgttttgtatagaatagaaaaatgtttttttattattatttaagattataaattagtaaagaagagttagtatttttattttggtttgtttgattttaaagtaaggaattttgggttttttatgcggattttttgaatttatttcggagcgttttttttagatgagtgtttagacgtttattttttttttttaattttttttttttttaggatagtatattattttgttttttaggttggagtgtagtggagtgatcgtagtttattgtagtttcgaatttttgggtttaagcgatttttttgttttagttttttatgtagttgggattataggtgtgtgttagtatatttagataattaaaatatttttgtagagatgggtgttattacgttgtttaggtttattttatttatttatttagagataggattttattttattatttaggttggagtgtagtggtgtgattatagtttattgtagttttgatttttttggtttaagtgatttttttgttttattttttttaatagttgggattataggtatatattattatgtttagttaatttttatttttattttttatttttagagagataggttttgttatgttgtttaggtttgttttgaatttttgaatttaagtaatttttttatattggttttttaaagtgttgggattataggtataagttattatgtttggtttatttatttatttgttaatttttttaaaaaaaattgagattgtaggaaataatttttaaatttaattttagttttaaaacggagattgtaggaaataaatatgtttattttttaaggtttttttttggttttttttggagattggagattagggttgggaggtttgtatttggttaggttacgtgtttgttaatgtttttgtatttttattattgtagttttgatttagtgttttattgatattattttttgttttttttattttagattatatttggtttttagaatttttatagttgggtatgttttggttgttggtaatagaaaagttaatttaaattggttttaataataaagataatttattggtttatggaatcgaagaaagtatagagagaagatggtttttgggtatggtttgtttaggatttttggtttgtttttttgatttttttaattttgtttttttttgtgtgttggttttttttttggattgtttttgttatttatggtagtaaaatggttgttgattgtaataagattatatatttgtttttttatatttattgagtaaatatttgaattttgttttgattggattattttgggttatagatttattttttgagtttgttgttgtggttacgaggacgttattggggagagaggagaaatttttttttattttttttttttattttgattttagatttaagtggatttttttggaggaatgagaagagatgttgaagttggtataaggttgatgtagggataaaatagatgtttttatagttatattgtgttgtttatatggtttgtgtagaagttattatgtttaaaatagagtggtaagaagatgttatttaaagagatattatattttgttagttgattggtattcgggttgtatttgttatagttttttttgtggtattaggagttttatatggaatggaaaaatgttttttagtaggaatattttaggttattttaagagggtatagttataagtgggaagtgaggtatagaagataggttgggtgggttgatttgttggaatattttgaagtgggtaaaattttattttaaatttatttatatgtgtttttttttttttttagtgaaatgttcgttttattgcgaagtgaaaggttttttttatttttgttttttagatgtaattttttttggagattttagtattgttgttgtttttattatatttatgtagtagggttgtttttttttatttttcgggttttaggagattagttttttttttaattttttagtgattttttgaaatagattggaatagtgaatcgatttattgagggtttaggaaaagtagaagggaattatatattaagaagaatttaatatacggtgttaaatatatttgtttttggttttggttttttttaagggggtgttttataggggattttttgtttagtaattgttgtttttttgtggtaaaaattatttttttttcggttttagggttttttttgagtataggtaggtgttttgtagtttaggttttcgtttttttttttttgtgtttttagtgattattttttgtttttggggttgattttttttagatgattaatagagggagttttttattttttgggattattttatttttgatttttttttagtttaggcgttagagtataatagtttaatattagtaaaagtaaagtatgagtggttattgtttttttatattttttgttattatttatgaatgataaaagagtttaggaggaaagtataatttagtttaaaaaataggtttgtcggttgggtatggtggtttatgtttgtaattttagtgttttgggaggtaaaggtaggaggattattagaggttaggagtttaagataagtttgggtagtatattaggattttttttttataaataaataaataattaaataaaaaataaaaataaaaatataatataaaaaaagaaagttagatgtagtggtttttgtttgtagttttagttatttaggaggttgaggtgggaggattgtttgagtttaggtatttgaggttatattgagttatgattatattattgtattttagttttggtaatatagtgagagtttgttttttaaaaaaagaaaaaaattttttttagtgtagaattgtaggaatttatggtatggtaaatttggtatttgtggtagggtaggatttatatttgtatagattggtattagttttaaatattagaggaaggttggaaagaagtaatgttaggtagattaattgggttgtgtggaagtgaagttattaggtatattagtgattttagtgtgtagttaaaagtaatagatattgaatcgtggtggtgatttatggtttatgaattataggagaaatgtttttttttatttattttataattattgattgagtatttattatattttttgaaagagaatataaatatgaattgaagaaggtttttgttgttttatggtttttaagttagaagagggttgatttgtaaatgttttatagtagggtttatgttatatggagaagtgacgaaggtgttagaagatttaagttaggggatagttattagttgttggaggtagttaaggtgggtttttagagaagttatttttcgttattgagatgggggttgtagtgattttgattatagtttttttatttatggattgttttagttttgtggtttttttgttaattagttagattttgggagtggtttatgtcgttagttttagggttatttaaattaattggttattggtagtgattgtgcgaaagagtggttggcggtaaaggagggtttgtgttttatttaaatatttttaaaaagtttgaaaaataagtagagattgaggttaggttttggagttgtggaaggtggagaatattgggaagttaatttttaaagaagattaggttggaggtaaaggaggaaggggagttttcgttggtaaattaatagggaagttaaggatattttagtaattgtttttatatttttgatgagaatgttttgaattcgagttaggttattttaaagaagtttgtaaaataagtagagattgagtgtttgttgtttaaatataatttaagcgtagtttttttttttttttttattggattgtttttaagttttttttatgggggattttttttgaagtttttgttgtaagttaaatttttcgttttttatatttggttaggaagttgtaagtttttataggtgatatattagggaatttaggaataaataaatggaaataaatttaagaaaaggaaaataataaaaatgattatttatagagtggagaatttagataatggatttttaattttagttttatatttgggatttttatttggttatatggattttggtagtttttaattataagtttgtgattttttgatttaaattgtttttttttaaatgtagatatgggtggggtttagaagggaggtgttatttgatgtggtttttttattttcgtttatttattaagtgttttttagttgttaagttattttgatttttgattgtagtttttattgttggatatatttggtcggtgttttaggtaggaagttatttttgtttgttaggattttttgtggggtagggttgtttggtttgattttattttggaaaatgtatttatttttgtgggagttgaggatttttgttgttcgtttttttttttgtgattattatttatatatggagttagtaggtgaagaggatagtttttttattttttttttttatattttgtttttttgtgggaagaggttgattattttttaatttgatgtttattgttttattttaagattttgtttttagtgaaaatgtaaatattggtagggagggaatatattaaaatgtgtggatttgagtggatttattatatatttttaggtttggtagtaaatgagaggtggatgattttgtttttttcgatttgtagatgagaagattgaaatttataggggtacgagattttatttaaggttatgagatttatttatttatttatttatttattttgagatggagttttattttgtcgtttaggttgtagtattgtggtacgatttcggtttattgtaatttttatttttcgggtttaagtgatttttttgttttagttttttgagtagttgggattataggtgtacgttattatatttagttaatttttttgtatttttagtagagacggggttttattattttggttaggttggtttcgaatttttgattttatgatttgtttgttttggttttttaaagggttgggattatatacgaaatttattaatggtagaattaggatggaatgaagattggatgttaggtgtttttataattaatttcggtgattttttaaaggtttttagatttttttggagagttttggagttttgaggggttttttaggggttatttgggttcggagattagtatattttgttttatagtggtttagtttttatttgttttatatattgggtttttgggaagattttattttagtaaattattttataataggaaatatatttgaaaatttttgaatgattttgtggatttttttaggggtggagggttttagggattaagatggagattttatttttttaaatatttaaaatttttttagatagaggaataaaatatgtgttttttatttaaagaaggtttaaaatatatagtttaatgtaatgtgttgttattattttttttttttagtagattttaaggagggtaaataagaattagggagaatataggaatagaaatagtagaaggggatatttgggaataggtttgtttttttgtattttgtttaatgttggtttttttttgaatgtttaagattaatttggtttttatatttaaatgtatagatatagttgaggatggagaaggttaaagagggatagaggtagagatataggttgagaggaggtagttgtaggttgagttagggttaaggtgttttttttatattttattttattttatatttaggttaggttttagagttgtggaaggtggagaatattgggaagttaattttcgaagaagattaggttggagttaaaggaggaaggagagtttttattgttaaattaatagggaagttaaggatattttagtaattgtttttatattattgatgagaatgttttgaattcgagttattaaattatatttttttttttttaattttttagt

SEQ ID NO: 1034 - DNA, 6731 bp, Artificial Sequence
  chemically treated genomic DNA (Homo sapiens)
attggaaggttagaaggaaggaaatgtgatttagtagttcggatttaaggtatttttattaatgatgtgagagtagttattgggatatttttggtttttttgttggtttggtaatgagagttttttttttttttttgattttaatttggtttttttcggaggttggttttttagtgttttttattttttataattttaaggtttggtttgagtgtggggtaagatggaatatggggaaaatattttagttttagtttaatttataattgtttttttttagtttatgtttttatttttgtttttttttagttttttttatttttagttgtgtttgtgtatttggatgtggggattaggttggttttagatatttagggaagggttagtattaagtaaaatgtaagaaggtaaatttgtttttaggtgtttttttttattatttttatttttatgttttttttgatttttgtttattttttttaaaatttattgggggaaggaagtgataataatatattgtattaaattgtatattttaagttttttttaaatgaggagtatatattttgtttttttgtttaaaggagttttaagtatttgagaagataaagtttttattttggtttttgaaattttttatttttgaaaaaatttatagaattatttaagagtttttaaatatattttttattgtgaaatagtttattgaaataagatttttttagaagtttagtatgtgaagtagataaaagttgagttattgtggggtagagtgtgttaattttcgaatttagatggtttttaaagagttttttaaagttttaggattttttagagaagtttgaaagtttttggaaagttatcgaggttggttgtaaagatatttagtatttagtttttattttattttgattttattattaataagtttcgtgtgtaattttagttttttgggaggttaaggtaggtagattatgaagttaggagttcgagattagtttgattaaaatgatgaaatttcgtttttattaaaaatataaaaaaattagttgggtgtggtggcgtgtatttgtaattttaattatttaggaggttgaggtaggagaattatttgaattcgggaaatggaggttgtagtgagtcgagatcgtgttatagtattatagtttaggcgatagagtgagattttattttaaaataaataaataaataaataaataagttttatgattttgagtggggtttcgtatttttatagattttagtttttttatttgtaaatcgaggaagatagaattatttattttttatttgttgttaggtttgagggtgtatgatgagtttatttagatttatatattttagtgtgttttttttttattagtatttgtatttttattgaagataaagttttaaggtgaagtaataaatattaaattggggaatggttagtttttttttataaaagggtaaggtataaaaagaggggatgaggaggttgttttttttatttgttaattttatgtatgagtggtggttataagagaggaagcgggtagtagaaatttttagtttttatagaaatgaatatattttttaaaataaagttaagttaagtagttttattttatagaaagttttagtaaatagaggtggttttttatttgaagtatcggttaggtgtgtttaatagtaggagttgtagttagagattagagtgatttaatagttagagggtatttgatgaataaacggaaataaggaaattatattagatgatattttttttttgagttttatttatgtttatatttggggaagaatagtttaagttaagggattatagatttgtgattagagattgttagggtttatatgattaagtgggggttttaggtgtgaagttggggttgagggtttattatttgaattttttattttatggatgattatttttattatttttttttttttgaatttatttttatttgtttatttttaaattttttagtatattatttgtggaagtttgtaattttttgattaagtataaagggcgaaggatttgatttatagtagagattttagaaggagttttttataggagggatttgggggtaatttagtgggaaagaggaggaggattgcgtttgagttgtgtttgaatagtaggtatttaatttttatttattttgtaggtttttttgaggtggtttagttcggatttaaggtatttttattaaggatgtgagagtagttattgggatatttttggtttttttgttggtttgttaacgagagttttttttttttttttgtttttaatttggttttttttggaggttggttttttagtgttttttattttttataattttaaggtttggttttaatttttatttattttttaggttttttgagggtatttgaatggaatataaatttttttttgtcgttagttattttttcgtataattattgttaatgattagttggtttaaatggttttgaggttgacggtataggttatttttagagtttggttggttagtagagagattatagagttggggtagtttatgaatggaagagttgtggttaaggttattgtagtttttattttagtaacggagaatggtttttttgggaatttattttagttgtttttagtagttaatggttgttttttagtttgagttttttggtattttcgttatttttttatataatatgaattttgttgtgaggtatttataagttagtttttttttagtttgggagttatgagatagtaagaattttttttaatttatgtttatgtttttttttagggaatatagtaggtgtttaattaatggttgtggaataaatgaagggagatattttttttgtgatttatggattataagttattattacgatttagtgtttattgtttttggttatatattaaagttattggtatgtttgatagttttatttttatatagtttagttggtttgtttggtattgtttttttttaatttttttttaatgtttggagttaatgttagtttgtgtaagtataaattttgttttattataaatgttaaatttattatgttatggatttttatagttttgtattggaaagaatttttttttttttttaagagataggtttttattgtgttgttaaggttagaatgtagtggtgtgattatagtttagtgtaattttaaatgtttgggtttaagtaatttttttattttaattttttgaatagttgggattataggtaagagttattatatttggttttttttttttatattatatttttatttttattttttatttagttatttatttatttgtagagaaagggttttgatatattgtttaggtttattttgaatttttagtttttagtgatttttttgtttttgttttttaaagtattgggattataggtataagttattatgtttagtcggtaagtttattttttaagttaagttgtgttttttttttgggtttttttattatttatagatggtaataggaagtgtaaggggataatagttatttatgttttgtttttattgatgttggattattgtgttttaacgtttagattagaaaggagttaaagatggggtagttttaggaggtgggagattttttttattaattatttagggaaaattagttttaagggtagaaaatagttattggggatataggagaaaaaagacgggggtttagattgtaaaatatttgtttatatttaagaaagattttgaggtcgggagaaggatagtttttgttataagggggtagtagttgttagatagggaattttttgtgagatatttttttgagaaagattagggttaagagtaggtatatttaatatcgtatgttaagttttttttggtgtatagtttttttttgttttttttaaatttttagtaagtcggtttattattttagtttattttaaggaattattgaggggttagggaagaggttggttttttggagttcgaggagtgaaggggagtagttttgttgtatgagtgtggtgagggtaatagtaatgttggggtttttaggagaagttgtatttggaggataagggtggaaagaattttttatttcgtagtaggacgagtattttattgaaggagggagaaagtatatatagatgagtttagaataaaattttatttattttaaaatgttttagtaagttagtttatttaatttattttttatattttattttttatttataattgtgtttttttaaaatggtttagaatgtttttgttgagaagtatttttttattttatgtagagtttttaatgttataaagaaagttgtgataggtgtagttcgaatgttagttaattggtaaaatgtagtatttttttgggtgatatttttttattattttgttttaaatatgatgatttttgtatagattatgtgaatagtataatgtggttgtaagaatatttattttgtttttgtattagttttatgttagttttagtatttttttttatttttttagaagaatttatttggatttgggattaaagtagaggaaaggggtagagggaggttttttttttttttttagtgacgttttcgtaattatagtaataggtttagggagtgagtttgtgatttaagatgatttagttagagtaaagtttagatgtttgtttaatgaatgtggaaaagtaagtatatagttttgttgtagttagtagttattttgttattataaatggtaaaaatagtttaaggaaaaaattaatatatagaagaaggtagagttgagagaattagagaaatagattaagagttttgaataaattatgtttagaggttattttttttttgtatttttttcggttttatgagttaataaattgtttttattgttaagattagtttaagttgatttttttgttattagtaattaaaatatgtttaattgtgagagttttggaaattaaatgtggtttaggatgagaggagtagggagtagtgttagtgagatattgggttaaggttgtagtggtaaagatataggggtattgatagatacgtgatttagttaggtgtagattttttagttttgatttttagtttttagaggaagttagagaaggattttgaaaagtgagtatatttgttttttgtaattttcgttttaaaattaaaattaaatttaaaaattattttttgtaattttaattttttttaaaaaaattaataaataaataaataggttaggtatggtggtttatgtttgtaattttaatattttgagaggttaatgtgggaggattgtttgagtttaggagtttaagataagtttgggtaatatagtaagatttatttttttaaaaataaaaagtaaaagtaaaaattagttgggtatggtggtgtgtgtttgtagttttagttattagggagggtgaggtaggaggattatttaagttagaaaggttaaggttataatgagttatgattatattattgtattttagtttgggtgatgaagtgagattttgtttttaaataaataaataaagtgagtttgggtaacgtagtgatatttatttttataaaaatgttttaattatttggatgtattagtatatatttatagttttagttatatggaaagttgaggtaagagggtcgtttgagtttaggagttcgaggttgtagtgagttacgattattttattgtattttagtttggaagatagagtgatgtattgttttgaaagaaagaaaaattaaaaaaggaaagtgagcgtttgagtatttatttgaaggaaacgtttcggaatggatttagaaaattcgtatgaaggatttagaattttttgttttgaagttagatagattaggatggaaatattggtttttttttattagtttgtgattttgggtggtgataggaaagtatttttttattttatgtaaaatatttagtgttacgaagaaagtcgtgataggtgtagtttgaatgttagttaattggtaaattgtggtattttttaatatttattaaaatatttttatttataaaaacggggataataatatttatttttttaagttgttgtgatgatggaaggtttgagttttaaattagttggtataaattttaattttgtttttggttagatgtgtgtttttgggtagtttagatgtttattttgtgttttagtttttttatttgtaaaaggataataaaagtaggatttagtttataggattggtattaggattaattagttaatatatgtaaagtggttggtagataataagtgtttagttatttttagtttattttggtttggttggttttaaagtagggaattttgggtattttatgaggatttttgaatcgatttcggaggattttttttaaatgagtgtttagatgtttatttttttttattttttttttttttaggataggatattattttgttttttaggttggagtgtagtggagtgattatagtttattgtagttttgaatttttgggtttaagcgatttttttgttttagttttttatgtagttgggattataggtgtgtgttattataattagataattaaaatatttttgtagagatgagggttttgttatgttgtttaggtttttatgattattttatttatttatttatttatttatttatttatt

SEQ ID NO: 1035 - DNA, 6080 bp, Artificial Sequence
  chemically treated genomic DNA (Homo sapiens)
agagttttattatgttggttagggtggttttgaatttttgattttaagtgatttattaatttcggttttttaatgtgttaggattataagtatgagttattgtttttagttttttttttgtttttatttttgaaaattttttttttttttaatgtagagatggggttgggtgtagtagtttatgtttgtaattttagtattttgggaagttaaggtgggtggataatttgaggttaggagtttgagattagtttggttaatatggtaaaatttagtttttattaaaaatataataattagttgattatggtggtgtacgtttgtaattttagtgatttgggaggttaaggtagaattgtttaaattcgggaattggaggttgtagtaagttgagattgttattattgtattttagttgggattatagaacgagattttattttaaaaataaataaatagatagatagataaaaaatatagagatggggttttattatgttgtttagattggttttgaatttttgggtttaagtaatttttttgttttagttttttaaagtgtaggattataggtatgagttagtatgtttggttaagataatattttttaggaagttttggttggatggggtattcgtttaagaggtaataattataattattattgtttttgaagttttaattttatgttaggtattgaagtaattttttgatgttgaattaatttcgaattagtttttttttaaattaaattttaggaggtttgggtttgatttaaagattgtgtttgttattatgattttattcgttttttattgtgtttggggtttttggggtaagaaacgttttagcggaatgagatttttaaaagcgttttaagtaattttaggttttttggagttgggagttagaaaattagtaattattttcgttttgttatttggtagtgttgttagtttaagtaagttattaaaattgatttgtttcgaaaaaaagttagtttaggttttgttattaatattcgttattattatagtgatttttaataatttaaagttttaattaattttttggttttgtttttgtttttttgagatagggtttttgttgtttaggttagagagtagtggtttaattttagtttattgtagttttaattttttgggtttaaatgatttttttattttagttttttgagtagttgggattataggtgtgttttattatgttttggtattttaattaattttattttagtgtatgttttaattattttattaaatttttttttaatttttagttttatttgtgagatagatttgaggtataggaaatgaaattaaaaagtttggtgtagaataatttattaatttatgtgaaaaataagaatatgattatgtatttttgaaaataaaattttattgtagttatataaaaaattgtataatggttggtcgcggtggtttacgtatataattttagtattttgggaggtcgaggcgggtggattacgaggttaggagatcgagattattttgatttattcggtgaaatttagtttttattaaaaatataaaatattagtcgggcgtggtggtgggcgtttgtagttttagttattcgggaggttgaggtaggagaatggcgtgaatttaggaggcggacgttgtagtgagttaagatcgtgttattgtattttagtttgggagatagagtaagatttcgttttaaaaataaaaaataataaataaaattgtataatggtttttaagagggagggaattggatgtttgaggaagattttgtgtttttatgtttttggtatttttttttttttttgagatggagttttattttgtcgtttagattggagtgtaatggtacgattttagtttattgtaatttttgtttttcgagtttatgttatttttttgttttagtttttcgagtcgttgagattatagatgtttattattacgttcggttaatttttttttgtatttttagtagagacggggttttattgtgttagttaggatggttttgattttttgatttcgtgattcgtttattttagttttttaaagtgttggaattataggcgtgagttatcgcgttcggcgtttttggtatatttgacgtattatgtgattatgttatttattaaaaatttatagtaaaatgtaaataaaatagaaaagtagagggtatagtatgtatttattttttttttgagacggtttagttgtgttatttaggttgaaaagtgtagtgattttattacggtttattgtagtttggatttttatagtttaagtgatttttttatttattttttttaagtagatggaattatggatataggttattacgtttagttaatttttgtagagattgggttttgttatgttgtttaagttggttttaaatttttgggtttaagggattttttagtttcggttttttaaagtgtggggattataggcgtgagttattatgttcggttaggtatttatttttgtaattgttgtaggaaataaaggattagagagattgatacgggaaataggaggatttatttagatgtatatcggtttagtggatttgtatttgaaaagttgattattgaataaagattgagtgtggtttttataggtaaatttatagaagtaaaataaaagtagttaatgatatagttataggttatgtaatttatagtataattgttgatttagtataatttgtggttttgtatagttgttggttttgtagttgtgttaaaagaaaaatagagtttataaattttattaaatataattattggtaaatagttatatttaatggtttagaaaaggagagatagtaaaggaatttttttttttaattttgtttcggaggaggttgtttggagtttatttttttggtttcgattttttagtgttataattgtttttgaagtaagttggttaagtagaggaaaatttgtttttgttttttttttaatttttattttttgttatataattatatttttatattttttttttttttttttttttttttttaagatgggaagtcggagtttcgttttgtcgtttaggttggagtgtagtggtgttatttcggtttattgtaatttttgttttttaggtttaagtgatttaagttatttttgtgtttttgttttttgagtagttgggattataggcgtatattattatatttggcgaatttttttttttttttttttttgaggttgagttttattttatcgtttaggttggagtgtaatggagtaatttcggtttattgtaattttcgttttttgggtttaagcgatttttttgttttagttttttgattagttgggattataggcgttttttattatatttagttaatttttttatttttagtggagacggtgttttattatgttggttaggttggttttaaatttttgattttaagtgattcgtttattttagttttttaaagtgttgggattataagcgtgagttattacgtttagttaggaaatttatttttaatatttttttgtttttttttttttttgagatagagtttcgttttgtcgtttagattggagtgtagtggcgtaatttcggtttattgtaattttcgtttgttaggttaaataatttttttgttttagttttttaagtaggtgggattataggtatgtgttattatattcggttaatttttttttgtatttttagtagagacggggttttattatgttggttaggttggtttcgaatttttgatttcgtgattcgttcgtttcggttttttaaagtgttgggattataaacgtgagttatcgcgtttggttttttttgttttttttgttttaaattttgggaacgtttgaattaataggcggatatttgttaaatttttttagtaattacgtttgcggatggttaatttgattttggaagatagtggggtttagttaagtatagattgtatatcgggggttttataaggcgtttggaagtatttaagaatattacgtttgtaaggataaagtattcggttacgggcgtttttatttcggagtttcgcgttgttgttggacgagcgttcgttgagttttagttttaatttttttaggaaatggcggtgagttttttagtgagatattttttggtttgggttttagtttttttatttgttaatgggggaaggggaaggcgggttagaggatttcgattaggtcggttgtagttttcggaagttacggtttagggacgttatattaaggtaggtttgcgggacgaaagaatttaagaattcgggcgcgtattggcgtcggtttcgggtttaaggggtagtaacgaggagacgttggatttggtcgtttttcgtatatatttttaattttttgtgttttttaagggagatggggtgagtatagttatttttattggagttcgaaaattttcggtcgagatatcgttattaaaaaggtatatatgcgttaaagtttttcggagttattttcgttaacgtatttagggcgacgggcgtaagatggcggtcgcgtaggcgtaaaatgtcgtagtcgtagggaggtttcgtttttgacgtttgttttgtattacgtggtaatggtcgtttaaaaaacgttttagcgaaaattagagcgtgttttcgttacgtgatggaggatttttagtacggtaaagggaaggcgttaaaagttgttagatggcgaaggaaatcgcgaaattcgttattgttatatgatggagtaatttatcgaaagcggagggaaaggtgtcgaagttacgtgattacgtacgtaaatattttcgtttgtattacgtgtaatttacgtttatttttttagttttttttttattttttttcgttttttttttttatttgggttgggtttgcgtcgaggcgtaacgcggcgttaaagggggcggggttttagtcggttacgtgttttcgtattttttcggcgcgcgtttgttcgttcgttcgttcgttttcggttcggatttttttttttttttttttcgttattgtagttggatttagtagttcggcgcgtatcgcgtggtttttgggggtagatttcggcgggttgtggtaggagggcggcggcggcggttgcggtcgaagaaggggacgtcgataaggtaagcgttaatgtggcggcggcgggttcgttttcgtttttgttttttttttcgttcgtttttagtgagatttttattgagggttcgcggtgataaggttggagggattttacgttcgtcgtacgcgcgggggggtgcgcgcgtatcgggttttcggttgtcgttttttcgcggttgggtttttgtttgttgcgggggttttggggacgcgcgtacgtgtttggagtatatattttttcgggtttcgagtttcgcggcggggcgattttttttttttattttttttttattttttttttttttttgtttcggtttcgttttcgattttaggagagttttaggttttcgaggcgggaaaagtcgttttttttgtttttataggtcgcggagaggcggattttttttttggaagtttttttttacgcggattgttgaggaagtttttgtgggttcgtcgggtttttaaatttttggttagttaggttttttttagattagggttaaaatttgagagggttttagttttttttttagttagtttgtttttattgttgaatgtttttttagattgttagtatttgttttttttagatcggtaatttatttgggtgtaagtttgggtttcgaaacgtggatgtttaaaatttatttttatttttatttttttaagtagttgaacgattgagattttcgaggttatttatgaggttttgttttagttaatttatcgtttggatgaattatttggggtgtacggcggtttgtatgttttttttttagtttagtggttaaatttgaggagaatgagggattttttttttatatttttaatattgtttgttagttgttgtttaggtgatatggattagtaacgaagcgtcggttttagtggtttttttt

SEQ ID NO: 1036 - DNA, 6080 bp, Artificial Sequence
  chemically treated genomic DNA (Homo sapiens)
aaaagaaattattgaaatcgacgtttcgttgttgatttatgttatttaagtagtaattggtaaataatgttggaaatgtggagaagagattttttattttttttaaatttggttattgaattgggggaggagtatgtagatcgtcgtatattttaaataatttatttaggcggtgaattaattggggtagaattttatgagtaatttcgagaattttaatcgtttaattatttgagaaaataaaggtagaaatgggttttaagtatttacgtttcggggtttaggtttgtatttaagtagattgtcggtttagagaaggtaaatattaataatttggaaaaatatttaataatgaaaataaattaattaaagaaaaagttgaaatttttttaagttttgattttgatttgagagaggtttggttgattagagatttggaaattcgacgaatttataaaggtttttttagtaattcgcgtgggaaggggtttttaaggagggggttcgttttttcgcgatttgtgaggataaaggaggcgatttttttcgtttcgggaatttgggatttttttggaatcgggggcgggatcgggataaagaggaggagggggtagggaaggagtgaggaaggggggtcgtttcgtcgcggaattcgggattcgagggggtgtgtgttttaagtacgtgcgcgcgtttttaggattttcgtaatagataaaagtttagtcgcggggaggcggtagtcgggggttcggtgcgcgcgtattttttcgcgcgtgcggcgagcgtgggatttttttagttttgttatcgcgaatttttagtggggattttattgagggcgggcggggggaggggtagaggcgggagcgggttcgtcgtcgttatattgacgtttattttgtcggcgttttttttttcgatcgtagtcgtcgtcgtcgtttttttgttatagttcgtcggggtttgtttttaaaagttacgcggtgcgcgtcgggttgttgggtttaattgtaatggcgagaagaggaggaggaggagttcggatcgggggcgagcgggcgggcgggtaggcgcgcgtcggggaggtgcgggaatacgtgatcggttgaagtttcgttttttttgacgtcgcgttgcgtttcgacgtaggtttaatttaaatgggagggaggggcgaaaagagataaggggggggttgagggggtgggcgtgagttgtacgtggtgtaagcgggagtgtttgcgtgcgtagttacgtgatttcggtattttttttttcgttttcgataggttgttttattatgtgataatggcgaatttcgcggtttttttcgttatttgataatttttggcgttttttttttgtcgtattgggagttttttattacgtgacgagggtacgttttggttttcgttaaggcgttttttgagcggttattattacgtgatgtaaggtaagcgttagaggcggagtttttttacggttgcgatattttgcgtttgcgcggtcgttattttacgttcgtcgttttgagtacgttagcggaaatggtttcgagaggttttgacgtatgtgtatttttttagtggcggtatttcggtcggggattttcgggttttagtggaggtggttatgtttattttattttttttgagaggtatagaaggttagagatgtgtgcgaggaacggttaggtttagcgttttttcgttgttgttttttgagttcgggatcggcgttaatgcgcgttcgggtttttgggttttttcgtttcgtagatttgttttggtgtggcgtttttgggtcgtagttttcgaaggttgtagtcgatttggtcggggttttttagttcgtttttttttttttttattgatagatggagaaattgaggtttaggttaaaaaatattttattagagggtttatcgttattttttggaaaaattggggttgggatttaacggacgttcgtttagtagtagcgcggagtttcgaagtaaaggcgttcgtgatcgagtgttttgtttttataagcgtggtgtttttgaatgtttttaggcgttttatgaggttttcgatgtataatttgtgtttaattaaattttattgttttttagggttaggttggttattcgtaggcgtagttgttaggaaggtttgatagatgttcgtttgttgatttagacgtttttaggatttggagtaagaagagtaaggaaggttaggcgcggtggtttacgtttgtaattttagtattttgggaggtcgaggcgggcggattacgaggttaggagttcgagattagtttggttagtatggtgaaatttcgtttttattaaaaatataaaagaaaattagtcgggtgtggtggtatatgtttgtagttttatttatttgggaggttgaggtaggagaattgtttgatttggtaggcggaggttgtagtgagtcgagattgcgttattgtattttagtttgggcgatagagcgagattttgttttagaaaaaaaaaagagtaaggaggtgttgaaaatgggttttttggttgggcgtggtggtttacgtttgtaattttagtattttgggaagttgaggtgggcggattatttgaggttaggagtttgagattagtttggttaatatggtgaaatatcgtttttattaaaaatagaaaaattaattgggtgtggtggagggcgtttgtaattttagttaattaggaagttgagataggaggatcgtttgaatttaggaggcggaggttgtagtgagtcgagattgttttattgtattttagtttgggcgatagagtgagatttagttttaaaaaaaaaaaaaaaaaaaaattcgttaggtgtggtggtgtgcgtttataattttagttatttaggaggtagaggtataagaatggtttgaattatttgaatttgggaggtagaggttataatgagtcgagatggtattattgtattttagtttgggcgatagagcgagatttcgattttttattttaaaaaaaaaaaaaaaaaaaaaaaagaagtgtaaagatgtgattatgtggtagggggtaagggttaaaaagaaaataagaataagtttttttttgtttagttagtttattttaaggatagttataatattgaaaagtcgaggttaaaggaatgggttttagatagtttttttcggagtaaagttgaaaagaaaaatttttttattgtttttttttttttgaattattaaatatgattgtttgttaatggttgtatttagtaagatttgtagattttgttttttttttgatatagttgtaaggttaatagttgtgtaaagttataagttatgttaagttagtagttatgttatagattatatgatttgtgattgtattattaattgtttttgttttgtttttgtaagtttgtttataaaaattatatttagtttttgtttaatggttagttttttagatataaatttattgagtcggtgtatatttaaataaatttttttgtttttcgtgttagtttttttggttttttgttttttgtaataattatagaaatgagtgtttagtcgggtatggtggtttacgtttgtaatttttatattttgggaggtcgaggttggaggattttttaagtttaggagtttgaggttagtttgagtaatatggtaaaatttagtttttataaaaattagttgagcgtgatggtttgtgtttatagttttatttatttgggaggagtaggtgggaggattatttgagttgtggaggtttaggttgtagtgagtcgtgatggagttattgtattttttagtttggatggtatagttagatcgttttaaaaaagaaatgagtgtatgttgtattttttgtttttttattttatttatattttattgtggatttttaataggtagtatagttatatgatacgttaaatgtgttaaagacgtcgggcgcggtggtttacgtttgtaattttagtattttgggaggttgaagtgggcggattacgaggttaggagattaagattattttggttaatatagtgaaatttcgtttttattaaaaatataaaaaaaaattagtcgggcgtggtggtgggtatttgtagttttagcgattcgggaggttgaggtaggaggatggtatgaattcgggaggtagaggttgtagtgagttgagatcgtgttattgtattttagtttgggcgatagagtgagattttattttaaaaaaaaaaaaaagtgttaaagatatgagagtataaagttttttttagatatttagtttttttttttttagaagttattgtatagttttgtttgttgttttttgtttttgaaacggagttttgttttgttttttaggttggagtgtagtggtacgattttggtttattgtaacgttcgttttttgggtttacgttatttttttgttttagtttttcgagtagttgagattataggcgtttattattacgttcggttaatgttttgtatttttagtagagattgggttttatcgggtgagttaggatggtttcgattttttgatttcgtgatttattcgtttcggttttttaaagtgttaggattatatgcgtgagttatcgcgattagttattgtatagttttttgtgtaattatagtagagttttatttttagaggtgtataattatatttttgttttttatataaattgataagttattttgtattaggttttttaattttattttttgtgttttagatttgttttataaatagagttggaaattgaagaaaggtttggtaagatgattggggtatgtattaagataaaattggttaaaatgttagggtatggtggaatatatttgtagttttagttatttaggaggttgaggtgggaggattatttgagtttaggaggttgaggttgtagtgaattgagattgggttattgttttttagtttaggtaatagaagttttgttttaaaaaaataaaaataaaattaaaaaattggttaaagttttaaattgttgaaggttattgtgataataacgaatgttaataataaagtttagattggttttttttcggaataggttagttttagtgatttgtttgagttaatagtattgttaaatggtagaacgaggatggttattagttttttgatttttaattttagagagtttaaggttatttaaaacgtttttgaagattttatttcgttaaggcgttttttgttttagggattttaaatatagtaaagggcggatagggttatgatgataagtatagtttttggattaaatttaaattttttagggtttgatttggaggaggattgattcggagttaatttaatattaaggggttgttttagtatttggtatggagttaaagttttaaaaatagtaatggttatgattgttattttttgaacgggtgttttatttaattagaattttttgaaaaatgttgttttggttaggtatgttggtttatgtttgtaattttatattttgggaggttgaggtagggggattgtttgagtttagaagtttaagattagtttgggtaatatagtgagattttatttttatgttttttatttatttatttatttatttatttttgagatggagtttcgttttgtagttttagttagggtgtagtgataataattttagtttattgtaatttttaattttcgagtttaagtaattttgttttagttttttaagttattgggattgtaggcgtatattattatggttagttaattgttgtatttttagtagagattgggttttgttatgttggttaggttggttttaaatttttgattttaagttatttatttattttggttttttaaagtgttgggattataggtatgagttattgtatttagttttatttttatattaaaaaaaaaaaaagtttttaagaataaaaataaaaagaaggttgggggtagtggtttatatttgtaattttagtatattgggaggtcgagattggtggattatttgaggttaggagtttaagattattttggttaatatggtgaaatttt

SEQ ID NO: 1037 - DNA, 6074 bp, Artificial Sequence
  chemically treated genomic DNA (Homo sapiens)
ggataataggtatgcgttattatattcggttaattttgtatttttagtagagatggggtttttttatgttggttaggttggttttaaatgtttaattttaggtgattcgtttatttcggttttttaaagtgttgggattataggtttgagttatcgtgtttggttgatttgtttttttttttttttttttttttttttgggcggggggacggaggtttattttgttatttaggttggagtatagtggtatgatttttatttattgtaatttttgttttttaggtttaagtaatttttttgttttagttttttgagtagttgggattataggtgattgttataatgtttagttaatttttgtattttgggtagagatttttgtatttttgtatttggtttcgttatgttggttaggttggttttgaatttttgattttttgggttgtatttttagttttattattttattagttggggaatattttggttaagttatttgatttttttatgtttaaatttatgttgaaaatggcgataatggtagtatttatttcgtggtattattgtgaggattaagtgaattaatatgagtaaggtttttataagaatgtttgatatatggtaagttttattattatttttgttatattatgtatatttaaatgattttataaagtagttgtaagggtatggatggaatttggagtatattttatttttttaatagatgtattaaggaggatagattttatatagtaaaatttgtttaaaaatatggatagggatggggtgatttaagttatttttttttaaaaaaataagaatgagaggtataaagtagattgattaattagttgagtttatattaattattttttatagttacgattttataagatagaataacgatttagagatagaatggttatgttaatttttaaaaaagtttttttttagtttttaagagatgattttatgatatatttttttaagaataataattttatgatatatatttttatattttggaaagttgttggttttataagggtatgttaaagttttaattaatatatgtaattttaatttgttatattaaatatgagattttattagatatttttggatattttatttttgaatagttgttatggtgtatttatatttgattatttaaattaaagtttatttaaataattattataattaagaacgtttttttatgtggaatttgaattattttttagtgaagagagtggttatttaaaaagaagttatttttaaagattaagtgtagttggtaagatgtttataatttttggggaaggaatttttatggtttttttttattgtataaatatagaataaggaagtatttattgtttattgggaaggatgattagattattttgtggttttatagggttatttttttttagaatttttttgtgtatatttagttgtttggggaggtgttaggggtattggattttattttttttttattttgaggtttagcgtaattataattttttttatagatgggagttagttgataggaaaggatattaaaggtttttaagagggaattttttttagggaaggttggaagagtgaggagttggatattatgttaggaagtagagtttgtgttgttgttttttgttttcgataattatttgggtatagtagatatttttaggtttgggaataatggttgtatatgggattgtagttttaaaaaatgtttttttgggaatttaagggttatgtattttgtattgaggtttttgtagttatgtgaattatttttatagtattagagaaaagattttttggatttgtgagattagtttttagttttattataatcgagtttgaatattaagatttttttgtgtatcggtagatttttattttattttcggtaaggtatttggaagtagaacggtttttttggattgaaaaatattgagtgagttatttgagaattaatgtgaagtagttgttgaggtgaggttttttggaaaaattggattttttgtttatttgatataggaagtttgtaaggtttttatttgaagggatatttgatatttagtttattttattttaaattgtttatgttgattttagtagtttttttaagttattgaaattatatttatttatataaatttagatgatcgatgatttttttgttaaaattttggaaatattagttggttacgaatgagtatttgttagtatgcggttggtaatatttttattttaagaagattggtaatgaagaatcgaaaaattagttttagaagttttttttttttttttaagaaaataaagtattatttgatagatatttaaatcggatatttaaggtattattttttttggattaaagatgtttattggtttttgtgaggtgtgagaattgagtttagtttaaattatttatttttaagatattttatttgaaatatattggtgatattttgttttttgattaaataaatagaaatagtaattttttaagtaaagagttaaataattaatttatttttttggtttagttgtagttaggatattttatatttgtgtaatgttttttgtattatgatggtgtatgtattacgatgtcgtttttttttttttttttttttttttttttttttgagatggagttttatttttgttatttaggttggagtgtaatggtgttatttcggtttattttaatttttattttcggggtttaaacgatttttttgttttagtttttttcgtagttgggattataggtatttattattatgtttggttaatttttgtatttttagtagagatagagttttattatgttgattaggttggttttgaatttttgattttaggtgatttgtttgttttggttttttaaagtgatgggattataggtatgagttattgtatttggttaatttttttaagaagaagaaatattttaagattataattagtttttgtattttatataatgtgattttattgtgttatatatttttagtgtgtaaatttttgtagggttaaagaaaaaattttttttttgttttttgaaggtttggtgaaaattaattgataaaaggtagataaatagaagaaaaggattttatttgattatagttttatgtgatttgggagtttttagaatgaagatttaaaggtataaggggatagtttattttatgtttagttttaatagtatatggatagttgtgtagaatatggttggataaagagggtataatttaatgttattagattggggaaatttagtaagatttgtttgtttagattttttttggtttttttttataggattttttttggaatgggggttttatgatttaaatttagatagggtgagttatataatttttttgtggttagattttatatagaaatatagggagaatgttagagtaatatttatttatttatttatttatttatttatttatttatttatttatatttttttttttatatatatatatattttttttgagacggaggttttttttgtcgtttaggttggagtgtagtggcgcgatttttatttattggaagttttattttttaggtttatgttatttttttgttttagtttttcgagtagttgggattgtaggtgttagttattatattcggttaatttttttgtgtttttaatagaaacggggttttatcgtgttagttaggacggtttcgattttttgatttcgtgattcgtttgttttggttttttaaagtggtgggattataggcgtgagttattttgtttggtttagagtagtatttttatgttttatggttggttttataaaaaaggggttttgatttttgggatttgatttgggaaagaggaattttagtttttatgattagtttggggaagaatgtgggattagagataggagattaaaaggagttagaggaaaatttttttttttaaggttgtttttgaggtttttattgtggggtattattttttgaattttaaaattttgaatttagtgtgttttattttttgtttttgttgtgtgatttgaggataaattatttaattattttgagttttagtttttttatttgtttgataaagttaattatattttttttaagaaattgttaaaattttaaggaaaataatgtatataaaaatatatttcggttaggcgtggtggtttatgtttgtaatttttgggaggtcgaggtaggcggattatttgagtttaggagtttgagattagtttgagtaatatggtgaaatttcgtttttataagatataaaaattagtcgggcgttgtggtaggcgtttgtaattttagttatttaggaggttgaggtatgagaatcgtttgaatttaagaggcggacgttgtagtgagtcgagatcgcgttattgtattttagttcgggcgataaaagtgaaatttcgttttaaaaaaataaaataataaaattttatataattgtttgaagtatagtaagtttttaataaatagtatgtaagtaaattattaagaattgggtagttggttttggttattagtttatttttttttaatttagtataggtttattagttttaggttagtatttaaaagttgtataatcggaattatatttgtaatttgggttttgttaaaatagtattatagaataaatgggagaaagaagaaagtaagttaaatgggaaatcgtgaatgaatggaggacgaaagaagaaaaaggtaaagtaaagagagaagtaatgtttaaaaattgagagatgaaaagataagtaggagaaaagaattagaagttagaatgaagaggtagtattttatgttttagcgcgggttaggattcggttcggtttggtagaggttcgtagggcgtagttcggggcggggtttagtaaagtaattacgtttttttaggaatggagtttttaagggcggaattttttgttgcgagtagtttttttattttcggaagagacgagtgcggtaatatcgtttatagagttagtcggacgtttttcgatttaaggtgagatcgttattttttttatcgtatttttcgggtttagcgggcgttgtgggtttttagggaggttttttttttttttaggagcgggcgcgagcgtcgtgcgcggtcggcgtttagggtggaggtagtttttgggtgatttttgtttgttgcgttattcggagttgttttgggcgatcgggaatagtttcggtattggagtagcggttcgtttacgcgattttatttaatttttgtggcggtttttgtggaataattgtttttttttatgtttttaatttcgaaaagtttttagaaatttggtgtatttttaggtttaggtagttattttaagtgatggggtagcgtttaggttttgtgttgttcgtagtcgcggtgttgggataggtggtaaaaaggaaggtggtttggtttttacgttggaaggttgtgattaggatagaaatagtaggaaatagtttaggtgtttatggttttgggaaaatgaaagtgagtaaattacggattttgtttattaataaatgtattgtgatttatatatatataattatttatatattatatataattatatataaaaatatatattaaatgtatttatatattttatatatagtatataaatatatttatgtatagtatatatatttatatatagtatataaatatatttttgtatatttatatatagtatataaatatatttacgtatatatatttatatatagtatagaaatatatttacgtatatatatttatatatagtatagttatatatttaggtatatatatttatatatagtatagaaatatatttaggtatatatatttatatatagtatttttatatatttaggtatatatatttatatatagtatataaatatatttatatatatatttatatatagtatataaatatattatatgtatagtatataaatatattatgtatagtatatatattatatatattatatatagtatttaaatatattta

SEQ ID NO: 1038 - DNA, 6074 bp, Artificial Sequence
  chemically treated genomic DNA (Homo sapiens)
taagtatatttagatattatatatagtatatatagtatatatattatatatagtatatttatgtattatatatatagtatatttatatattatatgtaagtatatatgtaagtatatttatgtattatatataagtatatatatttaagtatatggaggtattatatataagtatgtatatttaagtatatttttgtattatatataagtatatatatttaagtatatggttgtattatatataagtatatatacgtaagtatatttttgtattatatataagtatatatacgtaagtatatttatgtattatatataagtatatagaagtatatttatgtattatatataagtatatatattatatataagtatatttatgtattatatataaagtatataagtatatttgatatatatttttatatatagttatatataatatatgaatagttatatatatataaattatagtatatttattgatgggtagggttcgtagtttatttatttttatttttttaaagttataaatatttgaattgttttttgttgtttttgttttggttatagttttttagcgtaggagttaggttatttttttttttgttatttgttttagtatcgcgattgcgggtagtataggatttgggcgttgttttattatttagagtgattatttgggtttggggatgtattaagtttttaggagtttttcggagttggggatataaaaaggggtaattattttatagaagtcgttatagaggttaagtgaggtcgcgtgagcgaatcgttattttaatgtcggaattgttttcggtcgtttagggtagtttcggataacgtagtaggtaggggttatttagaggttgtttttattttaggcgtcgatcgcgtacggcgttcgcgttcgtttttgaggagggaaggggtttttttggaaatttatagcgttcgttgaattcggagggtgcggtgaggaaaataacggttttattttgagtcggaggacgttcggttagttttgtgaacggtgttatcgtattcgtttttttcggaggtagaggggttattcgtaataggaagtttcgtttttaaaaattttatttttgagggggcgtggttgttttgttgggtttcgtttcgagttgcgttttgcgagtttttgttaggtcgggtcgggttttgattcgcgttggagtatgggatattgtttttttattttagtttttggttttttttttttgtttgtttttttattttttagtttttaaatattatttttttttttattttgttttttttttttttcgttttttatttatttacggttttttatttagtttgttttttttttttttttatttattttatagtattattttgataaaatttagattgtagatatgatttcgattgtgtagtttttaggtgttaatttaaagttggtaaatttatattagattaaaaaaaaataaattgataattagaattaattgtttaatttttgataatttatttatatattatttattgaggatttattatgttttaagtaattgtgtggggttttattgttttgtttttttgagacggaattttatttttgtcgttcgggttgaagtgtaatggcgcgatttcggtttattgtaacgttcgttttttggatttaagcgatttttatgttttagttttttgagtagttgggattatagacgtttgttataacgttcggttaatttttgtattttgtagagacggggttttattatgttgtttaggttggttttaaatttttggatttaagtgattcgtttatttcggttttttaaagattataggtatgagttattacgtttggtcgaaatgtgtttttatatgtattattttttttaaagttttaatagttttttgaaaaaggtatgattagttttgttagatagatgaggaaattgaggtttagagtagttaagtgatttgtttttaggttatatagtaagagtagagagtgaaatatattgagtttaaagttttggggtttagaaaatgatattttataatgaaggttttagaagtagttttagaaggaaaaatttttttttgattttttttggttttttgtttttggttttatatttttttttagattagttatagaagttagaattttttttttttaaattaggttttagaaattaggattttttttttataaagttagttataaaatataaaaatattattttaggttaggtaaggtggtttacgtttgtaattttattattttgggaggttaaggtaggcggattacgaggttaggagatcgagatcgttttggttaatacggtgaagtttcgtttttattaaaaatataaaaaaattagtcgggtgtggtggttggtatttgtagttttagttattcgggaggttgaggtaggagaatggtatgaatttgggaggtggagtttttagtgagtggagatcgcgttattgtattttagtttgggcgatagagggagttttcgttttaaaaaaaatatatatatatatagagagagagatatagatagatagatagatagatagatagatagatagatagatagatattattttagtattttttttgtgtttttatgtaaaatttgattataaagaaattatatgatttattttgtttgagtttaggttataagatttttattttaaagagggttttatggagagaggttaagaagaatttaagtagataggttttattggatttttttagtttaatagtattaggttatattttttttgtttaattatattttatatagttgtttatatgttgttgaaattaagtataaaatggattgtttttttatatttttgggtttttattttgaaggtttttaagttatataaaattatgattaaataaaattttttttttttatttatttgttttttgttagttgatttttattaaatttttagaggataaaagggaagttttttttttggttttataaaagtttatatattgagaatatatggtataatgagattatattatatgaggtataaggattagttatggttttaaaatgttttttttttttgaaagagttggttaggtgtagtggtttatgtttgtaattttattattttgggaggttaaggtaggtagattatttgaggttagaagtttaagattagtttggttaatatggtgaaattttgtttttattaaaaatataaaaattagttaggtatggtggtgggtgtttgtaattttagttacgagggaggttgaggtaggagaatcgtttgaatttcggaggtggaggttgaagtgagtcgagatagtattattgtattttagtttgggtaataaaagtgaaattttattttaaaaaagaaagaaagaaagaaagaaagaaagagcgatatcgtggtatatatattattatagtgtaaaaagtattgtatagatataagatgttttagttataattggattaggaaagtaagttagttatttggttttttgtttaggaagttattgtttttgtttgtttaattaaaagataaaatgttattaatatattttaaatgaaatgttttagagatgagtaatttggattggatttaatttttatattttataaggattaataaatatttttaatttaaaaagagtgatgttttaggtattcggtttggatgtttattaaatgatattttatttttttaggaaaaaaaaaaaggtttttgaggttagtttttcggttttttattgttaatttttttaaaataaaaatattgttaatcgtatgttgataagtgtttattcgtaattaattaatatttttaaagttttaatagaaaagttatcggttatttaagtttatgtaaatgaatgtggttttagtgatttgaaaaaattgttaaaattagtataaataatttgaagtaaaataaattaaatattaaatatttttttaaatgaaaattttataagttttttatgttaggtgagtaggaagtttagtttttttaagaggttttattttaatagttattttatattggtttttaggtaatttatttagtattttttagtttaaagaggtcgttttgtttttaaatgttttatcgaaagtgaagtgaaaatttgtcggtgtatagggaagttttagtgtttaggttcgattatagtggggttggaaattggttttataaatttaaaggattttttttttgatgttgtgaaggtagtttatatggttgtagagattttagtataggatgtatggtttttgagtttttaaaggggtattttttaaaattatagttttatatgtagttattgtttttaaatttaagaatatttgttgtgtttaggtggttgtcgggggtaggggatagtagtataaattttgttttttggtatgatgtttagttttttatttttttaattttttttaaggggagtttttttttggaggtttttggtatttttttttgttagttgatttttatttatgagagaggttgtaattacgttgaattttagaatgaaagagaggtgagatttaatgtttttgatatttttttagatagttgagtgtatataagagagttttagggaagggtggttttgtgaagttataaagtggtttggttattttttttagtgggtaataggtgtttttttgttttgtatttgtataataaagaggggttataggaattttttttttagaaattgtgggtattttgttaattatatttagtttttggagatgatttttttttaaataattattttttttattaaaaaataatttaggttttatatgagaagacgtttttggttataataattatttaagtggattttgatttaaatgattaaatataaatatattatggtagttgtttaggggtggagtgtttaaggatatttaataagattttatgtttgatataatagattggagttgtatatattggttaagattttgatatatttttataaggttaatagttttttaagatataaaaatatatattataaaattgttatttttggaagagtgtattatagaattattttttaagagttggaaagaaatttttttaaaaattggtataattattttatttttggatcgttattttattttatagaatcgtggttgtggaaaatagttggtatgaatttaattgattagttagtttgttttatgttttttatttttatttttttaaaaaggaataatttgggttattttatttttatttatatttttggataagttttattatgtaaaatttgttttttttgatatatttattaaagaaataaaatatattttaaattttatttatgtttttgtaattgttttataagattatttaaatatgtataatgtaataaaaataataatagggtttattatgtgttaggtatttttatgaggattttgtttatattaatttatttaatttttataataatattacgaggtaggtattattattatcgttatttttagtatgaatttgggtatagagaaattaagtaatttgattaaaatgttttttagttggtaagatgatggagttagaagtgtagtttaagaggttaggagtttaagattagtttggttaatatggcgaaattagatataaaaatataaaaatttttatttaaaatataaaaattagttgggtattgtggtagttatttgtaattttagttatttaggaggttgaggtaggagaattgtttgaatttggaaggtagaagttgtagtgagtggagattatgttattgtattttagtttgggtaatagagtgagttttcgttttttcgtttaaaaaaaaaaaagaaaaaaaaaaaaaataagttagttaggtacggtggtttaggtttgtaattttagtattttgggaggtcgaggtgggcggattatttgaggttgggtatttgagattagtttgattaatatggagaaattttatttttattaaaaatataaaattagtcgggtatggtggcgtatgtttgttgttt

SEQ ID NO: 1039 - DNA, 5107 bp, Artificial Sequence
  chemically treated genomic DNA (Homo sapiens)
tgtggtgttttagtaggattttattaggtgtggttggtttagggttgagtcgtttttttttttagttgggtaagatttttttattagggtttagtttttgtttgaacgttgggtttaggttagggttcgtgtgtttaggggtgtttgggttaggttttttatgtatttttgttttgggaatgtcggggtatgagtcggggaattagttggtattgttttagagtacgagtatttttaggcgtttagggtagacggtaagtttagtttgggcgaggtttttttttgagcgtttttgggtttggggggtttttttgtggaaaatatgggagaggaagtttgagggggtcggttttttatttttggtttttttcgtttatttagcgtttttcggaaatttttttttgtagtattgggatttgatatttcggtacgttttggaaagttttttattgaacgttgtgtatgagaagaaatttggggtagggttcgtttagttaggaggcgtgtattcgttattttttgtttgtgattagtaaggaggcgagggttgtgttttttgcggtttattagggggttaagagaatttttagatttagaggaattttattgttgttaggtttgagatagagggttttacgggatggttgtaagttcgtgggatggattgtaggaggtcgttttggtttgggcgagtaggagataaattattgttagataggagatcgtgttgggtcgggggatttgtttttgttaagttcgtagtttggtgggggaagttaaggaatatacgggatagtaaggaatgggtagagggagttttaggaagtgaatttttttagtttgggttggtcggtgagggttttttggaattttgaggagaagttttaggagaatttaatggggagggtgaggtggtggagggtggagggggtaggggagagggtaggtttatgaacggggttgggaattattttattaaagttttttgatagggtggtgtggttgagtttggggtaggaggtgggattgagtttaggttttttagtttatgggacgtgggttagttgttagttttatttaagaatgtttttgatgaagtattaaattttattaattttattaaattttgattttggagtgtgtttttttaatattcgcggaggtacgtttaaagtatttttattgtagtcggaagtatgttagcgtttttaggaaaagtttttgtatagtggtttgagttgtaggtttaatgggttgcgtgtatcgtttttattgaatcggcgatcggttggatgtttttttagagaagaataaaaagatttatttagagaaaaataatttttggattttgttgttggtgattattttggagtttttatgtaaatagtagaattttgagaaatttataattgtttttttgaattagacggttttttaatttttaaagatttttttgaggagtttggtggggatagttataaatgtagttttttataataataaagaatggtatttatttttggaagagttgtttgattgtgagattgatattttttaaacgattaatgcggaacgttatagaggtatatataggaaaagatttttgaggtcgaggcgggcggatcgtttgagtttaggagtttaagattagtttgagtaatatggtgaaattttgtttttataaaaaatgttaaaattagttgggtgtggtggtgtatgtttatggttttagttattggggaggttgatgtgggaggattttttgagtttggggaggttgaggttgtagtgagttatgattatgtaattgtaatttagtttggatgatagagtaagattttgttttaaaaataaaaataaaaataaaaaagaggaaaagatttttggaaagtgtaagatatattagttgattcgttttataatatattttttattttggaataattttaagatgatagacgagttgtaaggattgtatatatagtttttttcgtttaatttttttttgttaaggttatatttgattgtggtatggttgtgataattaagagtgtgatattgtttttcgatttattaatgtaatttaggttttatttggagtttattaatgtttttgtttatattttttttttgttttaggattttattgagggtttacggtgtatttgtttattttgtttttttttttgttttgttttgagacggagtttttttttttttttttttttttttgaggcggagttttattttgttatttaggttggagtatagtggtacgatttcggtttattgtaagtttcgttttttgggtttatgttatttttttgttttagtttttcgagtagttgggattataggcgtttattattacgttcggttaattttttgtatttttagtagagacgggattttattatgttagttaggatggttttaattttttgatttcgtgatttatttattttggttttttaaagtgttgagattataggcgtgagttatcgtgtttggttatattgagatggagttttatttttgtcgtttaggttggagtatagtggtgtaattttggttgattgtaatttttattttttaggtttaagtgatttttttgttttagtttttttagtaattgggattataggtgtttgtttttatgtttagttaatttttatatttttagtagagatagggttttattatgttggttaggttggtttcgaatttttgattttaggtgatttgtttgtttcggttttttaaagtgttgggattttaggcgtgtattattacgtttagtttcggtgtatttggttatgatgtttttgtcgttttttaaattgagggattgtaatattacggagtttttaaaggttatgggttttagattttgtattgtagttaagtttgaagaaatgatatttgttaagttttggtgtagtagtaaaaagaaaatttataagcgtataaggttattaaagtattagcgttttttattttttatttttaattacgtatgttcgtagatgtttttatttatattttttttatgcgttggttaaagtttgtagaggcgtgatgggaattcgttgttttttagtaagttatagagattcgtaaagtgtaaagatattttattttttttacggaatttgttttgttttgaaaagtttagttgttttttgtaaataaatattttatgttaatgtgtagtagtgagtttattattgttgttgtgattttattgttttgtgtttatttgttttatatggttttgagttagggttttgttttgtggtttaggtcggagtgtagtggtataatttaggtttattgtagtttcgattttttaggtttaagtgatttttttgttttagtttttcgagtagttggtgtgtgttattatatttggtttttttttttaattaaggatattttaatggttttatgtgtttgtatataatttatttgattattttatttattattttttattattatttttattattataattaattttattaattttttttttttttttttttatttttttattttttattttttatttttattttatattttattatatatttataataattttaatattatttatatatttatatatattttatttattatttttatatttatttattaatttaaatattattttgtttttggtgttaagaggtaggtaggggttgtaggtagtagggttcggagtttatgtttttttattatgggttaggttggatttttaggtgtttgttttggggagttgggagggtcggaggggtgtattttaggggtttagtttagatgatattatgggggtgatggtgttatgggatttggttaggagaggggagatgggtttttagaagaggagtgggggttgagagggtgtttggggggttaggacggagttgggttagtgtatagttttttatatttgtttatttttagagttttgtcgttatttttagattatacggaagatgaggttcgagtggtttgttgaggatttgttgtttgtttttaggtttttaggttatgttttttttttgttattttggggagttgagggttttagttggggttgttgttttaaggtagggtgggaattaggtagttagtagggaggggattttttttttatttttatttttttatttttattattttggtttatttatggcggtattttgggttattcgggattggggataggggttttggggataggggttcggggatagggttttggggataggggtgtgaggataggggtttcggggataggggtgtggggataggggtttcggggataggggtgtggggataggggtgtggggataggggtgtggggataggggtgtggggataggggtgtggggataggggtgtggggataggggttttggggataggggtgtggggataggggtgtggggataggggtgtggggataggggttttggggataggggttttggggataggggtttggggatagtagcgtaaagagtttcgttttgtagtttttagtttttttggtttaatgtggaaagtggtttaggtgagggttttgtttttttggagatatttgtttttagttgtgagtagggataggtttggttatcgggtttttggttaagattttaatgattcgttggttttgaggaagaggtgttgacgattaaggagatttttttatagatttagtattagggaaatggttcggaaattgtagttttagtttttagttatttgtcgatttttttattttaggttttaatgggttaggcggtaggggttgataggtaggggagatgggttttgagattataaagttagcgggggtttagtagtttttagttttttaggataggttgtattagaagaggttattaagtaggtttgttttaagggtttttgcgttaggtgggtttagggttttagggtggttggattttaggttttagttttgtagtagggaggacgtggttgggttcgtgaagtatgtgggggtgagtttaggggttttaaggtagggtatttggtttttagtttgttttagttttgtttgttatttaga

SEQ ID NO: 1040 - DNA, 5107 bp, Artificial Sequence
  chemically treated genomic DNA (Homo sapiens)
tttgggtgataggtagggttgaggtaggttgaaggttaggtgttttgttttggggtttttgggtttatttttatatgttttacgagtttagttacgttttttttgttgtagagttggggtttggggtttagttattttggaattttgagtttatttgacgtaaaggtttttggaatagatttgtttgatggttttttttgatgtagtttgttttggagggttgagggttgttgggttttcgttggttttatagttttagagtttattttttttatttgttaatttttgtcgtttggtttattagggtttggggtgggggggtcggtagatggttgggggttgaggttgtaattttcggattatttttttggtgttgggtttgtgggaagatttttttggtcgttagtattttttttttaggattagcgggttattagagttttaattaggggttcggtggttagatttgtttttgtttatagttgggggtaaatgtttttaggagagtaaagtttttatttgggttattttttatattagattaggagagttggaggttgtagggcggggttttttgcgttgttgtttttagatttttgtttttaggatttttgtttttaggatttttgtttttatatttttgtttttatatttttgtttttatatttttgtttttaggatttttgtttttatatttttgtttttatatttttgtttttatatttttgtttttatatttttgtttttatatttttgtttttatatttttgttttcgggatttttgtttttatatttttgttttcgggatttttgtttttatatttttgtttttaggattttgttttcggatttttgtttttaggatttttgtttttagtttcggatggtttaagatgtcgttatggatgggttaaggtggtgggggtgggagagtgggagtgagggaggggttttttttttgttggttgtttagtttttattttgttttaggatagtagttttagttgaggtttttagttttttagggtggtagaaggagggtatgatttggggatttggggataagtagtaagtttttagtaggttattcggattttatttttcgtgtgatttgggggtggcggtaggattttgggggtgggtaggtgtgggaagttgtgtattggtttagtttcgttttggttttttaggtatttttttagtttttattttttttttgggagtttatttttttttttttggttaggttttatgatattattatttttatagtgttatttgggttgagtttttggggtatattttttcggtttttttagttttttagaataggtatttggaggtttagtttgatttatggtgagggggtatgggtttcgagttttgttgtttgtagtttttatttgttttttagtattaggggtagggtggtgtttgagttggtgggtgggtgtgggggtggtgggtgaggtgtgtgtgggtgtgtgggtggtgttggggttgttgtgggtgtgtggtaggatgtggggtgggggtggggggtgggaagtgagagggtgaggggggaagagagaggggttggtggggttggttgtggtggtgggggtggtggtggggagtggtaggtggagtaattaaataagttatgtataagtatataaggttattaagatatttttaattaaaaaaaaaagttaggtatagtggtatatattagttattcgggaggttgaggtagaaggattatttgggtttggaaggtcgaggttgtagtgagtttggattgtgttattgtatttcggtttgggttatagagtaagattttgatttaaaattatatgaaataaatgaatataaaatagtaaaattataatagtaataataaatttattattatatattaatataaaatatttgtttataaaagataattaggttttttaaaataaagtaagtttcgtgagaagagtgagatgtttttgtattttgcgaatttttgtggtttgttggaaggtagcggatttttattacgtttttgtaggttttggttagcgtatgggaagaatgtagatgaggatatttacgaatatacgtggttgggagtggggggtggggggcgttggtattttaatggttttatgcgtttgtagattttttttttgttattatattaaaatttgataagtgttatttttttaagtttagttgtaatgtagaatttgaaatttatgatttttagagatttcgtgatgttatagttttttagtttaggaaacgatagaggtattataattaaatgtatcggggttgggcgtggtagtgtacgtttggaattttagtattttgggaggtcgaggtaggtagattatttgaggttaggagttcgagattagtttggttaatatagtgaaattttgtttttattaaaaatatgaaaattagttggatatggaggtaggtatttgtaattttagttattaaggaggttgaggtaggagaattatttgaatttgggaggtggaggttgtagttagttaagattgtattattatattttagtttgggcgataagagtgaaattttattttaatgtggttaggtacggtggtttacgtttgtaattttagtattttgggaggttaaggtgggtggattacgaggttaggagattgagattattttggttaatatggtgaaatttcgtttttattaaaaatatagaaaattagtcgggcgtggtggtgggcgtttgtagttttagttattcgggaggttgaggtaggagaatggtatgaatttaggaggcggagtttgtagtgagtcgggatcgtgttattgtattttagtttgggtgatagagtgagatttcgttttaaaaaaaaaaaaagaaaaaaagaaatttcgttttaaaataaaataaaaaaaaaaataaaataaataaatgtatcgtggatttttaatgggattttggaatagaaagaggatgtgaatagaaatattggtgaattttagatgaagtttgggttatattaataagtcgagaagtaatgttatatttttaattgttataattatattatagttaggtgtgattttaataaagggggattgggcgaggggggttgtgtgtataatttttgtaattcgtttgttattttgaaattgttttaaaataaaaggtgtattatggaacgagttaattggtgtattttgtattttttaaggattttttttttttttttgtttttatttttatttttgagatagggttttgttttgttatttaggttggattatagttgtatgattatggtttattgtagttttagtttttttaggtttaggggatttttttatattagtttttttagtagttgggattataggtatgtattattatatttagttaattttaatattttttgtagagatagggttttattatgttgtttaggttggttttgaatttttgggtttaagcgattcgttcgtttcggttttaaggatttttttttgtgtgtgtttttgtaacgtttcgtattgatcgtttggaaaatattaattttataattaggtagtttttttaggagtggatgttattttttattgttatggaaaattatatttgtgattgtttttattaggttttttaggaaggtttttaaggattggaaaatcgtttggtttaagggggtagttgtaagttttttaaaattttgttgtttgtatgaaagttttaaggtggttattaatagtaaaatttaggagttgtttttttttaagtggatttttttgtttttttttgaggaaatatttagtcggtcgtcggtttagtaaaagcggtgtacgtagtttattgagtttgtaatttaaattattgtgtaggagttttttttggggacgttggtatgttttcggttatagtgggagtgttttgagcgtgttttcgcgaatattaaaaagatatattttagggttaagatttaatagaattaataaagtttaatgttttattaaggatatttttaagtgagattggtagttggtttacgttttatgggttgggagatttgggtttagttttattttttgttttaaatttagttatattattttgttaggaggttttggtgggatggtttttagtttcgtttatagatttgtttttttttttgttttttttattttttattattttattttttttattagatttttttggagtttttttttaaggttttagggagtttttatcgattagtttagattagagaaatttattttttggggttttttttgtttattttttattatttcgtatgttttttggttttttttattaggttgcgaatttggtagaggtagatttttcgatttagtacggttttttatttggtagtggtttattttttattcgtttaggttaggacggttttttgtagtttattttacgagtttgtagttatttcgtagggttttttgttttaggtttggtagtagtgggatttttttggatttgggaatttttttgattttttggtgaatcgtagagagtatagttttcgtttttttgttaattataagtagagagtggcgggtgtacgttttttagttggacgggttttgttttaagtttttttttatgtataacgtttagtgaggaattttttagaacgtgtcgggatgttagattttagtgttgtaggaaggagttttcggggagcgttgggtgagcgggaaagattaggagtaaggagtcgatttttttaggtttttttttttatgttttttataagggagttttttaggtttagaggcgtttaggggaaggtttcgtttaagttgggtttgtcgtttgttttgagcgtttggaagtgttcgtgttttgagatagtgttagttgatttttcgatttatgtttcggtatttttaggatagggatgtatggagggtttgatttagatatttttgggtatacgggttttggtttggatttagcgtttagataggaattgggttttagtgggaggattttgtttagttgaaagaagagacgatttagttttgagttagttatatttgatggggttttgttggggtattata

SEQ ID NO: 1041 - DNA, 9117 bp, Artificial Sequence
  chemically treated genomic DNA (Homo sapiens)
ttatatttgagttttaagtttaaaattaaaaaggaatttttttttaattgtttatgtgttattttagaatttttaggattaatagtttgttattttaaatttagtatttgtagtatgatgataataggttttatggaagtggtagttgataagtttttttttaattttagggaagtaaataaggaaaaataatgtagagttaaagttattgtaatataaatttatgatggtttgttatgtggtatttaaataattttaatttattgataattagtagaattaagaataaggattatatatttaaattatagattaggagttgttaaaaatgattagggtaggttttgttttttatttacgaaatatatttcgggtattgtttttttattttgtatagttaatatttaaaaaataatagttatagtaaaatttaatagaattagattttgtttttagtttttattcggtttttttttttttttttttttattttttttttttttttttttttttttattttttttttttttttttttttttttttttttttttttttttagatggagtttcgttttgtttttaggttggagcgtagtgatgcgattttggtttattgtaattttcgttttttaggtttaagcgatttttttggtttagtttttttagtagttgggattataggcgcgtattattatatatagttaatttttgtatttttagtagagatagggttttattatgtcggttaggtcggttttgaatttttgattttatgattcgtttgtttcggttttttaaagtgttgagattatagtcgtgagttaacgtgttttgttagttttttattttttagatagaagtagtttatgttatgattggggtttagttataagcgtataatgttatattgttttatatgattttattggatttttaggttatagatgaggaagtggtagtttagaggttggggtttttttaaggttagtaagttgataagtagtaatttgtttgtaaaacgaggtgtaaagagtggttttaaaaaatatataacgatttttgttattttggggttgaggttttttttatttttattagatgttgttttttttttttagcggttatgaataatagtaagaatattggttatgtgtattttttattatgtgtattgttagaaataaatagaaaaaaaatatataaataagttagaattagatattattgtttagtaataatatagaaatgtaggagagtgtaggaagaataaaaagaaagaatgtttgtttggaattcgtatataaaaatttaaaatattattttttttttggattattttgttaaaaataatgcgtattttagaaatttagatttttgtatttatttttatttatttttattatttttattaaatttatgaattttacgtaaatatttttacgtttttagatcgttgttagtgatatattgttatatacgtggtatattagataatgatttagattttggtaattggaaaatgatagtttttgggcgtgattataagtttatagaaaattaataatcgatatttattttttatttttatagagaagtgagagttttgatatgcgttaatatatttagtgttatgattggtttttttgggtggatatttgttcggaatgggaaattaaaaagcgatttattaaatgattatgttatgtgaagttgttcggtgggtaagtttttaggagggtttggtattattgagtaaagtagggtgttttttttgtaaatttatagttagataaaatagataagaaataagtttattattttaatttttagtttatttttatttattttttatttttaatatttttattttagagaaattattgtttagatttgagtttttgaatgttttagatagaaaaatggatgaaatttgttttttgtatatgtttaaatgggttcgttgtttataatacgttttggggaagcgttcggtttggtatttaagtattttcgcggatttattttagttattagagtagatagagtttaggtagcgtcgattcgtttttttttttgcggtcggcgcggattagtcgcgtttattttcggtcgtcgcggggttcgggttttttgatcgttttttaaggttattcggagcgtagtttttttgagtttagagttttttcgcgtttttagcgggcgttcgggggttcgtgtttcgttgttttcgtttaagacggtcggtttcggtttgttgtcggtttttgttgggtttgcgtcgttgttcgggattttttggagagattcgcggcgtttttcgagaggtggcgcgcggtgagggtaggcgaggtttcggcgtcgcggttttttgtcgggtaggaagttttgggagcgttttttcgtcgtcgttcgtcgtttcggaagtcgcgttttgagatttcgggtatttttttttttttttttggaatggtgtgatgttcgcggttgtttttgtttttatatttgaagacgttaagttttttaaaaggtgcgcgtaattacggcgcggaggtgcggggaatttgggtcgtaagcgtcgaagttattcggtgaagaaggtttggagtattggttttcgattcgtcgtcgaagatttgggttgagcgatggtggtattaggtttaagggatttgatttttaaaaggcggaacgggagcgttggtgtgttcggttcgttaaagttgtagtcgttcgcggttttcggcgtttggtttgtttcgtttgcgcgaggttttcggtaggcggcgttgttgtttcggttgagcgggcggaacggtttggatttcgcggtttttgtttttagttttgcggtcgatttgagagttgggatttcgggcggggagcgggaggttgagtaggggtagtcggagtcgtcgtaggaggggttgaggggtgtttcgcggtttttttcggtcgtttcggtggtttttcgggttttttggttaagggcgttgggttgcgggtgggtttcggggggagtcgtttcgtatagtaggcgcgagttaatttatttttttttattttttcggtggcgttgtggtttttaaaattttcgttttttttttttatagttattagaaggcgcggtttgttatttggataaacgcggttttttttagagttcggttgcgttttaaagtcgggtttcgttttattttcgataaagatattttttgatttgtttttcgttagattttagtaattttttgggttttcgggaagttgatttcgtttttgggtttttatgattagtggtagttggagcgttgttttttaatttgggtttatttagggtgtgtggggtagggaggagggtggggttatttttaaaatttattatcgcggttttttttttagggtagattgaatttgtagagaagtttaggtggtcgattggtttttttgttttttaataaaaataaagagtttttaaaatagagtatttaattcgtatttaaaatataaatatttttagtaggaagaaagaaatatattaagattgatttttaaaggtttggatgttggtgcgttgtttagaaaaggcggagtagtgatttttttttggtttggttttttggggtttaagtttttttttgttgagacgtttttgtaaagttgtttagtttttttaaaatttacggtggcgtttcgagaaacgtttttatttcgggagtatttagttagaggttggttaggtcgttaggtttagcggattatgtttaggtagggggttggacgttatcgttattcggaggttatttattcgcgttagtgggtgtagaaaaagtggttttgtttaagttaggattttagaatgtttagaagttattgaatggtttgaagttaagtatagatgttattatggaaaatgtagcgtttttatttttttttttaaatatgtaattttttttttattttttttttttttgtttgttttattttaattgtaagtagaagagagtgagtgttttttgtcggtaaatttcgttagggtttcggttcgtagagagtcgttaagggtttggaattttcgtgttaatatttgtttttgtttcgtagttttaagaggaaggtcgcgtttttttttttcgttgtattgggaagttacgttcgggttggttaaatgggttttaattttttaaaatttaaatttgtaatattttttaattttttaaaaaaaagaatttaaaaaagtttttgtgaatgttttagaagttatcgtttatattttagaagtatttgtagtatatttataagtaaaaatatataacgaatgttagagtttcgtgtgttttttaatcgatatttttgtggttgtgaataaattttataaataaaatagaattaaatgtttttgatttagagagttgggtttgtaaattttttttttatcgtatttcgtaatagttaaataaaaaattaaaaatttaatatgtttttttgtaaattatattaattaataaatatattatgtttattattaaatataatagaaaaaatataggaaaatagaaaatagaaaaatataggaaaatagaaatttttaagttacggtgaaaatgtttttataaatgagtggttttaatgttttcgtgagcgtttattttggggagtatcgttagttgttcgtttaggagtgtgtagtaaatttagttgagagagaaaattggaataaaagtaggtgttcgcgggtatttgggtttagttttttagtgcggttagttaggttaattacggttttcggttgaattacgtggggtttcgcggagtttatggtgcggcggtcggttcgtcggttcgcgttggttgtgggttttttttgagattagtgcggagttgttaaagcgagtaggggtggcgtcgggagtgggaacgttatatagtgttaaattttcggttttagttttcgattttcggttttcgggtttcggttttcggtgtttaatttcgggtcgtagttatgaacggcgaggagtagtattacgcggttacgtagttttataaggatttatgcgcgttttagcgaggttcggcgtcggagtttagcgttagtttttttgcgtgtttgtatatgggtcgttagttttcgtcgtcgtcgtcgtattcgttttttggcgttttgggcgcgttggagtagggtagtttttcggatattttttcgtacgaggtgttttttttcgtcgacgatttcgcggtggcgtatttttattattatttttcggtttagttcgcgtttttttattcgttcgtcgggtttttttcggagggagtcgagtcgggcgttttggaggagtttaatcgcgtttagttgttttttttatggatgaagtttattaaagtttacgcgtggaaaggttagtgggtaggtaagtttggttttttatttttttttttttttcggtttttattcggtcgttttatttttaagcgtttttaggagttttttttttgttttcggcgttttggattatttcgggtcggattaaattatattagggagttatcgagtttattttttatagtagtgtttttttagtttagtttgaagtattttttttatttagtttttttgggagtgtatattttttttttttttgttcgttgagtttattttcgttttaggagttcgcgtttttagcgttatttttagagagtcgaggttgagttttgtttagggtttcggatattatagatttttttttagtaggggattcgggaatttaggattttttggtagtgtatatcgaggaagtcgagtagggatatgggtgtttcggatttaggttttagatcgttttcggagtttcggagttttttatttttcgcgtttcgttaaggaagggtaggtatttaggggcgttaggtaggtgtagaaaggtagggagggaaaggaaattgtatttaatttagtagtgttcggttgttttggttgtggaaataggataggagtaaagaggaaggggttggggtaaggcgggggtttatcgcgaggttgaaagtcggttttttaacgttagagtttggtagttaggagagtaatttgagaagcgaattcgttttttattaatcgaaagtaattgaagttgttttttcgtatcgttttttaggaagtaattttttaggagatgggcgttttttgtttagttggtggggaggcgagaggtttggtttttgcggtttttcgcgtcggtagagaatagaaggtttttttcggagtcgggagtcggaggtacggggtagttttcgggttttttgcggtttcgcgcgagcggtaagtttcggcgcggtttgtgtcgtcgtcgttatttattgttatcgttgtcgtgttttagttatttttggttatatttgtatcgtaaatagttgttttttttttttaattggtagtcgggagtagggggaagtagttcgagtcggcgtttttcggtttatttcgaaaatttttagcgtttatttgcggggtttggttagttttgtttgatattgattttaggcgtagttaggaggggttttgtgcgggagagggagggggattttagtttgtttggggtttacgggatttttttttttttagtttatttttttgttaaggcgaaggttttgaggtaggacgagggttgaattgcgttgtaatcgtttttatttttagcgaaatttagttgataggggcgttagaagttgtcgcggcgtttttgtaaatttatttagttcgcgtagttcgggttaaaggttttgaagttttcggaaatgcggggtttttaggaggcgggaggatagtttttcgaataaaggtggggggtttttcgtttttatttagtttttttttagggttgttttttttttagattttttttttggttttttaggttttcggagtttttgtttttttattttgggttttttttaggaaatgggcgatattagggtttcgaaagaggatttgtgaggtggagtaatttttttattttaatttaaggggtgatatttttgttttggaggatttgggtttaggttgatttaagaagttagaaagtaaaattagaaggtaaattagtagttttggcgagggttcggggatttaaggagggcgatattttcgggttggagttggttttaggtttttgttggcgttttttaattcgttgtatgttcgattttcggggaaggagacgattttttttttttttttttggaagtcgtttgcggggtcggttgttattttcgcgtttttttaggggaaatttcgatggagtcgaaatttaaaaattgtaaatttatttgtttttgggaagagcgaagtgataaaagggtttttattggtagtacgaatttgaatgttaatgataatagaggttttgaaaaatattgatttttaaatgttttagtagcgttgtttagttggtatttaaattgtattattttgcgttttggggaagggtttaggtttggcgattttgatttttttttattatttttaatttttatttttgtcgcgtcgcgttgagtataggtttttcgggaatagtgtattttaggaagtttttttttgagtagtttttcgtagggattttacgaagttttttcgtagggattatacgaagttcgtagtttaaggtaggaatttagagatatgtcggtttaatgtaaaaattttggagagttttttaaaatgtttattgaaggttcgtttcgttttttttttaggcgtgggatgttaggtagattcggggatgtttttagggagtagaattttttttggattagggtttgagtttttgttttagtttttggcgttttttttcgatttggggggaaatttagtagggttttatcgcgaaattaaattcgtttttaatatatatatattcgttttttaattttttaaggtttagttaatatttataggagaaatgttttttgtttttgttttaagataagttttttttcggaattttggtggaatttttcgcgttagcgtttatagtttgggtgtagttagtattttttatagaaaagaaaagattgggatttggttgagcgtagcggtaaatagtgaatgtgggtttttaattttttgggttagggcgttttgttgttttttggagatacgagaggtttgtttttgtattattattatttttttcgtagggttgtcggttttgtagttgggttagggtttttgtgtttttttttaatatttttgagggtatttgggatttagggcgtagagtttggagttgttagagttttgttttggttaacgtgatttttagaataatatttttttatttcgcgggtagaagttcggttgaagttaaaataattatggagaatttgttggtttttaggttgggattaattacgatataattatagagagaggaaatatatggttagatataataaaatgtgttatagtttttattagtataaagatttttaaattgtaggttgtatttattcgtaggttataaaattaatttattaggttgagattagtattttttaaacgaaatagtagataatggagagaaaagtagatagtattatacgtggtaaacgtttgttttatgtttttaagatttgttagtataattgatttgtagtgttcgtgtgtgaattatataacgattcgaaatgtattttttatatttgtgggttattattaggaggttttttttagttttggattaaaggcgttttattgtttttgtaggatttagcgggtttaattattatatatatttaaattaatattaattagttgattaatatcgattatatgagcgtatttaaggattatttattggtagagttaagtttaggtttacggcgagagttgattcgagtttggtttttaataaaaaggttatttttattaggaagggtttgagttattagggaagagtttcgcgcgtttatattaggcgttgaaatgggatgttggggtttggtggtttcggcgggagtagttggtagggttagggttttttggttttttttgaaggggttgggttgcgtgggtgggggttgtgcggggtttcgggggttatatttacgttttgtgtcgttcgtagg

SEQ ID NO: 1042 - DNA, 9117 bp, Artificial Sequence
  chemically treated genomic DNA (Homo sapiens)
tttgcgggcgatatagggcgtgagtgtggttttcggagtttcgtatagtttttatttacgtagtttaatttttttaaggggggttagggagttttagttttattagttgttttcgtcggagttattaagttttagtattttattttagcgtttagtgtaggcgcgcgaagtttttttttagtaatttaagttttttttaataaagatagtttttttattggagattaaattcgagttagttttcgtcgtgagtttaagtttggttttgttaatgagtggtttttgaatgcgtttatataatcggtgttaattaattgattgatgttgatttaaatgtatataatagttaaattcgttggattttataaaggtaataaaacgtttttaatttagggttaaaaaaaattttttgatggtgatttataaatgtgagaaatatatttcggatcgttgtgtagtttatatacggatattgtaggttagttatattgataaattttaaggatataaaataaacgtttattacgtatgatgttatttatttttttttttattatttgttatttcgtttaaaaaatattaattttaatttagtaaattgattttatgatttgcgaatgggtgtaatttgtagtttgaaaatttttgtgttaatggagattgtgatatattttgttatatttgattatgtgttttttttttttatagttatatcgtaattagttttaatttgagagttagtaaattttttataattgttttaattttagtcggatttttgttcgcgaagtgaaggaatattgttttgggggttacgttggttagggtagaattttggtagttttagattttacgttttggattttaaatgtttttagaggtgttgaggggagatataggggttttagtttagttgtagaatcgatagttttacggaggaggtggtagtggtgtagaaataagtttttcgtgtttttaagaggtaataggacgttttggtttaggaggttggagatttatatttattgtttgtcgttgcgtttagttaggttttaatttttttttttttgtggaaaatattgattgtatttaggttgtggacgttggcgcgggaagttttattaaagtttcggggagaggtttgttttagagtaaaggtaggggatattttttttgtgaatgttggttaagttttaaggaattgaaaggcgagtgtgtgtgtgttgggggcgggtttaatttcgcgatggaattttattgggtttttttttaggtcgagaagaggcgttagaagttgaagtagaggtttaaattttagtttagggagagttttattttttgggggtattttcgaatttatttggtattttacgtttgggagagaagcgagacgggtttttaataaatattttgaaaggttttttaaagtttttatattaaatcgatatgtttttgggtttttgttttaggttgcgggtttcgtatagtttttgcgagagggtttcgtgaagtttttgcgagagattgtttagggagagattttttggggtgtattattttcgggggatttgtgtttagcgcgacgcggtaggggtggaggttgaggatggtgggaaaaggttaaggtcgttaagtttgggtttttttttaaggcgtagagtgatgtagtttaggtgttagttggatagcgttgttgaagtatttgggggttaatgttttttaaaatttttgttgttattagtatttagattcgtattgttagtgagagtttttttgttatttcgttttttttaggggtaggtgggtttgtaatttttgaatttcggttttatcgaagttttttttagaggaacgcggggatagtagtcggtttcgtagacggtttttaggggaagagaggggaggtcgttttttttttcgagagtcgagtatgtagcgggttagagggcgttagtaaaggtttggggttaattttagttcgagagtgtcgttttttttgggttttcgaattttcgttaaggttgttgatttgttttttggttttattttttggttttttgggttagtttaagtttaagttttttagagtagaggtattattttttgggttgggatagggaagttattttattttataaattttttttcgggattttgatgtcgtttattttttgaggaaggtttagggtgggaaagtaggagtttcgagggtttaggaggttagaagagaggtttggaggggaggtagttttggaagaaaattgggtgaggacgaggagttttttatttttgttcgagggattgttttttcgttttttaagaatttcgtattttcgaaaattttaaggtttttggttcgggttgcgcgagttggataaatttgtagaggcgtcgcggtagtttttggcgtttttgttaattgggtttcgttggaggtggggacgattgtagcgtagtttagttttcgttttgttttaggattttcgttttagtaagaaagtgaattaggaagaagagagtttcgtggattttaggtaagttggggtttttttttttttttcgtataaagttttttttggttgcgtttggggttagtgttaggtagggttggttagatttcgtagatgggcgttgaggattttcggggtgggtcgggggacgtcggttcgagttgtttttttttattttcggttgttagttgaaaggaaaaggtaattatttgcggtgtaggtgtgattagaagtggttgaggtacggtagcgatgatagtgagtagcggcgacgatataggtcgcgtcggaatttgtcgttcgcgcggggtcgtaaaggattcgggggttatttcgtgttttcggttttcggtttcgggaaagattttttgttttttgtcggcgcggagggtcgtaggaattaggtttttcgtttttttattagttaggtagggagcgtttattttttgaaaaattattttttgggaagcggtgcggggagatagttttaattgttttcggttggtgaaaaacgaattcgttttttagattgtttttttagttgttaggttttgacgttgagaggtcggtttttagtttcgcggtgagttttcgttttgttttagtttttttttttttatttttattttgtttttataattagggtagtcggatattgttgggttgggtgtagttttttttttttttttgtttttttgtatttatttggcgtttttagatgtttgtttttttttaacgaagcgcgggaagtgaggggtttcggggtttcgaaggcgatttggggtttgggttcgaggtatttatgtttttattcggttttttcgatgtgtattattaaggagttttgggttttcggattttttgttggaggaggatttgtagtgttcgaagttttgagtaggatttagtttcggttttttaaggatggcgttgggagcgcgggtttttggggcgaagatgggtttagcgaatagggaaggaaggagtgtatatttttaggagagttgggtgggaaagatgttttaaattggattagagaagtattgttgtgagggatgggttcggtagttttttgatgtagtttagttcgattcgggataatttaaggcgtcgggaatagagagaaggtttttgggagcgtttggaggtaaggcggtcgggtgagaatcggaaaggagaaaggggtggggagttaggtttatttgtttattggtttttttacgcgtgagttttggtagattttatttatgggaaaggtagttggacgcggttgggtttttttaggacgttcggttcggtttttttcgggaagggttcggcgggcgggtgggggagcgcgagttgagtcgggaggtggtggtgaaggtgcgttatcgcggggtcgtcggcgagggggggtatttcgtacggggagatgttcggggggttgttttgttttagcgcgtttagggcgttagggaacgggtgcggcggcggcggcgggggttggcggtttatgtataggtacgtaggggggttggcgttgaatttcggcgtcgggtttcgttggaacgcgtatgggtttttgtaaagttgcgtggtcgcgtagtattgtttttcgtcgtttatggttgcggttcgggattgggtatcgggagtcgggattcgggagtcgggagtcgggagttggagtcggggatttggtattgtgtggcgtttttattttcggcgttatttttgttcgttttgatagtttcgtattgattttagagggaatttatagttagcgcggatcggcgggtcggtcgtcgtattataggtttcgcggggttttacgtggtttagtcgggggtcgtgattggtttggttggtcgtattaagaggttaggtttaggtattcgcgagtatttgtttttgttttaatttttttttttagttgagtttgttgtatatttttgaacgggtagttggcggtgttttttaaaatgggcgtttacgaaaatattagaattatttatttatagaaatatttttatcgtggtttaaaagtttttatttttttatatttttttattttttatttttttatattttttttattatatttgataatggatatagtgtgtttgttaattgatgtagtttataaggagatatgttgagtttttaattttttatttaattgttgcggaatacgataaaaaaaaagtttgtagatttagttttttaggttagaagtatttgattttattttatttatgaagtttgtttatagttataaagatgtcggttaaaaaatatacgaaattttggtattcgttgtgtgtttttatttgtggatgtgttgtaagtatttttggggtgtaaacggtaatttttgaagtatttatagagatttttttaaatttttttttttaaaaaattaaagggtattataaatttgggttttggaaaattggggtttatttggttagttcggacgtagttttttaatatagcgagggggaaagacgcggttttttttttggggttgcgaagtaggggtaggtgttggtacgggggttttagatttttgacgattttttacgggtcgggattttggcggagtttgtcggtagagaatatttatttttttttgtttgtaattgaaataaggtaagtaggagagggggaagtggaggaagagttatatatttagaaaaagaaataaaaacgttgtattttttatgataatatttgtgtttggttttaaattatttagtaatttttgggtattttggggttttgatttaaatagggttattttttttgtatttattgacgcggatggatgattttcgggtggcggtgacgtttaattttttgtttgggtatgattcgttaggtttggcggtttgattagtttttgattggatattttcgaaatgaggacgtttttcgaaacgttatcgtgggttttagaaaaattagatagttttgtagaaacgttttagtaagagagagtttgaattttaaagaattaagttagagaaaaattattgtttcgttttttttaaataacgtattaatatttagatttttgagagttaattttaatgtatttttttttttttattggaaatatttgtgttttaagtgcggattgagtgttttattttgaggattttttatttttattaaaagataaaaaagttagtcggttatttgaatttttttgtagatttaatttattttaaagggagggtcgcggtaataggttttaagaatgattttatttttttttttgttttatatattttaagtgggtttaggttggggagtagcgttttagttgttattaattatggaagtttagaggcgaaattagtttttcggggatttagaaaattgttggagtttggcgaggggtaaattaggaagtgtttttgtcggagatgggacggaattcggttttggggcgtaatcgggttttgggggagatcgcgtttgtttaggtggtaggtcgcgttttttgatggttgtgaagagaaggagcgggggttttaagagttatagcgttatcgagagagtggaaaggagtagattagttcgcgtttgttatgcgaggcgatttttttcgagatttattcgtagtttagcgtttttggttaggaggttcggaaagttatcgaggcggtcgaaaggggtcgcggggtattttttagttttttttgcggcggtttcggttgtttttgtttagtttttcgtttttcgttcggagttttagtttttagatcggtcgtagagttgggaatagaagtcgcggggtttaggtcgtttcgttcgtttagtcggagtagtagcgtcgtttgtcgggggtttcgcgtaggcgagataggttagacgtcggaggtcgcgggcggttgtagttttgacgggtcgaatatattagcgttttcgtttcgttttttgaaaattaaattttttgggtttggtgttattatcgtttagtttaggttttcgacgacgggtcgaaggttagtgttttaggttttttttatcgagtggtttcggcgtttgcggtttaggtttttcgtattttcgcgtcgtagttgcgcgtattttttgaaaagtttggcgtttttaggtataaggataaaaataatcgcggatattatattattttaaagaagaaaaagaaagtgttcggaattttagggcgcgattttcggggcgacgggcggcggcggagaggcgtttttagggttttttattcggtaggaggtcgcggcgtcgggatttcgtttgtttttatcgcgcgttatttttcgggagacgtcgcgaatttttttagggaatttcgggtagcggcgtagatttagtaaggatcggtagtaggtcgagatcggtcgttttgggcgagagtagcgggatacgagttttcgggcgttcgttgggagcgcggggaggttttgggtttagggaagttgcgtttcgagtggttttggaggacggttaaggagttcgggtttcgcggcggtcgggagtggacgcgattggttcgcgtcggtcgtaggggaaggggcgggtcggcgttgtttgagttttatttgttttaatggttggggtagattcgcggagatatttgaatattaggtcgaacgtttttttaaggcgtgttgtagataacgggtttatttgagtatgtgtaaagaataaattttatttatttttttgtttaaaatatttaaagatttaaatttagataatagtttttttgaggtagaagtgttgggggtggggggtgggtgggaataaattaaaagttggggtaatgagtttgttttttgtttattttgtttgattatagatttataaaaggagtattttgttttatttagtaatattaggtttttttagaaatttatttatcgaatagttttatatggtatgattatttgatgaatcgttttttagttttttatttcggataaatatttatttaagagaattaattataatattggatgtattaacgtatgttaagatttttatttttttgtagaaatgagaaataaatgtcgattgttggttttttgtagatttgtgattacgtttaggaattgttattttttagttattagaatttgaattattgtttaatgtgttacgtatataataatatattattaatagcgatttaaaagcgtaaagatgtttacgtaaaatttatagatttgatgaaaataataggaatgaatgaaaataaatataagaatttggatttttaaaatacgtattatttttaataaagtggtttaagggaaaaataatgttttaagtttttatgtgcggattttagataagtattttttttttttgttttttttgtatttttttatatttttatgttgttattagatagtgatgtttggttttgatttatttatgtattttttttttatttgtttttggtaatgtatataataagaaatatatatagttaatatttttgttgttgtttataatcgttgagaaaaaaaagtagtatttagtaggaataaaagaagttttagttttagaatggtaagaatcgttatatgttttttagggttattttttgtatttcgttttatagataggttattatttattagtttattgattttgggaagattttaatttttgagttattatttttttatttgtaatttgaggatttagtgaagttatgtaagataatgtagtattgtacgtttatgattagattttagttatgatatgagttgtttttgtttagaaaatagagggttggtagggtacgttggtttacgattgtaattttagtattttgggaggtcgaggtaggcggattatgaggttaggagtttaagatcggtttggtcgatatggtgaaattttgtttttattaaaaatataaaaattagttgtgtgtgatggtgcgcgtttgtaattttagttattgaggaggttgagttaggagaatcgtttgaatttaggaggcggagattgtagtgagttaagatcgtattattgcgttttagtttggagatagagcgagattttatttaaaaaaaaaaaaagaaaaaagaaaaagaaaagaaaagaaaaatgaaagaaaaagaaaagaaaagaaaaatgaaagaaaagaaaagagagggtcgagtgaagattgaaaatagaatttagttttgttaagttttgttgtagttgttgttttttaaatattagttatatagagtgaaagaataatattcgaagtgtatttcgtgagtaggaaatagagtttgttttggttatttttaataatttttaatttgtggtttaggtatataatttttgtttttgattttattaattattaataaattaaaattatttaagtgttatataataagttattataagtttgtattataatgattttagttttgtattgtttttttttgtttgtttttttgaggttggagaggaatttattaattattatttttataaaatttattattattatattatagatattaagtttgagatagtagattgttaattttgaaagttttgagataatatatgagtaattaggaaaaaatttttttttagttttgaatttaaaatttaaatatga

SEQ ID NO: 1043 - DNA, 5294 bp, Artificial Sequence
  chemically treated genomic DNA (Homo sapiens)
ttatatatatatttgtatattgtataattataaatttattttgtttgtggttttatatatataaaaaaagatttgttaaaattatatttgttgtttaattataatatttttgataattatagtataggataagggaaaataaaaaaagaaaaaaaagaaaaaaaaacgataaatttgtttgttggttattttttttgtttaagtagattcgtggtttttttttcgttttttttaagggtttttttgtgttaggtgaaggaggttttaggtagtatttaggttttgtatttttgtttttttcgtgtttgtgaaagaggttttaaggttttgggtgtaggagcgtttttttgatttgttgaagttcggaacgtagtcggtatagtttggtcgttttttatttttgggagttggagtttattggggtggtttgatttttttagtttttttttcgtgatttggttagggtgagtttatgtggagttagtttcgtaggtttttttgttagtagggttcgagtgtgttttattttttttattttgtcgagtttgggggttggagcggagacgggaggtttggtttgtttcggaatttgtgagttgtattaggtagaacgttagggattttagaattatgtgcgttagtttaaggggttttttttaggagtagtgaagattttagaaatgtttttttttttttttttattttacgagtaattgtatttgtttttgtaatttttaatgagtaatatttgttagagagtttagttgtaatagttttttttgattatttttttttaataattagaaatattaaaaaaatttagaaatttgtttttttaaagtagagagtattataattattagggttaaaagtttttttttttgttgttattgttttttttgaggtttgaatttaaaagaaaaatagttataggtttttttagtggtcgggttattcgtgagtttttcggaggattagggttggggtagtttttgggtttatattcggggttagtttcggcgtgtgtttagtgttagtagtgggttatgatgtttttttttatttagtttgggataggggtagaggaggcgaggaggtcgttgtcgttgatgtttggtcgtgaataggtgggtgtttgcgtgcgtttacgtgcgtgttttttgattgatatgaaatcgacgttcgagttagttttattcggtgatttttagttttgttcggatggagcggggtttattcggtttagtgtttttggggagttggatagtggagtgtaaaaggtttgtagaatttgaagtttgtttttttttttgttattacggtttttttttcgtttgatttgttattgttttaattaataatagtcgttttagagttagtagttaatgaatatatgattaaatattattaggattgttatttaatgtgtgtcgagtttttgtttatgttgggttttcgtgtatttggatattgtaacgtgtgttgtgtttgttttttttttttttttttttttgttttttatttgtttttttggggtttttttgtttgggtttggtttggtttttatttttttttttgtgttttaaatatgaggttttttttattggtttttttaattgtggtgttgaggtttatatttgtgtaatttttggtgggtgaaaggaattttgttaagtaaattttttttgtgtttgaattgaagtttgtattgtaattatgtttaaagtaattgttttagagataaatatttttagatattttttttttataaataaaagtattcggagggagggggatggtgattgagatgagaggggagagttgaatagatgatttttgtttagattagttagaagttatttaaagtagtggagtttaggagttttattttaagttagtaagtcgaatagttgatgtgttgttattttttaagttattgtaaaattaggttttgtttcgtttagtggatttttgttttgtttttttttttttcgagattattattattatttcgtgtttttaaggaaaggtaagattgatgtttttttgaggggagttaggaggggatgtgtgtgtgtagagttgaagagttggggagaatggggttgggtttatttaagtaggaggttgggacgttttgttgtgggtataggttaggttaatgttggtagatgtagttttttttggataggttaggtggtgggtattttttttttaaggtgtgtttcgtgggtattattgtttaagatattttcgttatattttattttattttttagggtttaatattgtgatatttttattttttatttttttttttttagggtaataaaatgattatggagggggtttgtatttttttggttgttattcgatcgttagtaaaatttagatgtgagaaaatttttttttattttatggcgaaaatatttttttagaaaagttattatttttattaggtatggttttgggtttttaaaatatttgatagttttttttttttttgagaggcggagagtgttgattgtagtgattattgtatgtcgggtgtagtatttggaagagttaggtagggtgtttgtttttttttgagttgaagttatgtttttttgtgttagtttagaggtcgagagttatggatagtattgttagtaatataggttattttgtgtagaagggagttggttttagtttggaaatttgtttgaggttgggagaggtgtatttggggtatagggagaggtcgggatatatttagttggagatgtttttaaaagttttgtatcgtatttatttttagtttttgtgttttgggataattattttagaaaataagtaggtcgttttaaaaataaaaattattgattgtttttttgtagtgtttagaaaaaaggttttttgtgtatagttaaatgattgaaagtattgatatatttaaaaataaaaggtaatttattaaggaaatttgtattattttagtaaatttgtttgaatgtatttgtatacgttttaaaaatattttttttttattgaatttttgtaatttatttattatataaagagtttgttttataaatttatataaaaatgttcgtttgtgttttttgttgtaaaaattaagtgatttttttataaggtttttttattattggaaaagatgggtagtacgtagttttattttatttttgtaagttttttaatatatgtgaaagtaaagaatatttagtatgtttttttaagtgacgcgtttgtattttttgttgggaagtattgtattttgtgttgttagtattttcgataaatttttttgtgaaagtgatttaaggtttgggtttttattataagatagaagtttttttttagtttatatgatagtatggtgttgcgtttttttattggatttggttgtttttggatataggtagttgtttttaggtttgttacgagcggttaagggaagttttttttatatgttggtttcgttggttttttagttttttttaagttagtgttttttaggtatattgttttagcgtgtgacgggaagggtttggtatgagttagtttgtagtataatttttttgttttagattcgtatggtaggggtattttttaggtttggatgtgttgtggtgtttttggatatttttattttcgtaggttgtggttttttttgtgttttattttggttaggatttttacgtgttttttgttgattgttaacgtggttttttgattaggtaagggtaggttgaggggtttgtttaaagggggtttttttgttattggtttttttggtttttaggagtagttttattaggttggtaaggggttggaggagataattgtttaaaggagtttagttttatatgtatatgttagaaggtattttcggaaggtttggtttttaaaggtagattttagggttgaaaagttaatttgtatgtattgagtatttcgtatgttagttttgtttcgtgagttgatgggtttttgtgtgtaagtaggattaagtgttttcgtggaggttagtatgggtgtgtagttattttagatatttgagttggtatattttagtaaagtttgtttcgtgagaagttatgggttttatggtatggttggtattttttttgggagtggttatagtggtggtggttttaggaaagagattttaataggggttagttgtgggttttgggtatttttcgtttttaggaaaagttttaagtttgtagggttaggggtggggaattttttcgttgttaggattaagagggtaaggggaattgtcgttggaggagatatttagttggagaaataaaagagtaagtttgcgttgttgtttgtggggttttttttattttagggcggggatcgggggtggcggtttagataagtaattaaggacgatgtttaggaggggataggtacggggtggtaggagttttgtcggcgggtttaggaagtttttattatagttgtttgagtttatttttgttaaatgagggttggggtagtagtaacgtatatatttacggttgtggcgggtagcgttttcggtatattttaggatatttaaggagattgaatggtttaaggttgttgtcgtgtgtagggggttagacgtggggcgggtaggtagggtttttggtaatagttttgtaggtcgtagtggagagtagggtttcggtagggtcgtttaggagttttcggaaggttcggtttcggttttttttcgagtagttcgggttttcgttttgttttttgtttttaacgtcgggagtcgtcgttcgttttttagagtttcgttcgggcgagttcgggaggtcgatcgtcgttcgcggaattcgtcgggattcgggtttttttcggcgcggggcgttttcgtgtgatttagcgcgcggtcgcggcgcgtaagatggcggcgggttcgggtatcgtttttttcgtttcgtcgggcgtcgtacgaggtcggttcgaaggggaagtgagttagtgttcgcggattcggtcggtttaggttcgcgttcgtcgcggttttgagaggtttcggtaggtttcggttcggcggcggtagttatggtcggggggtcgggttcgggggagttcgtagttttcggcgtttagtattttttgtacgaggtgtcgttttgggttatgtgtcgtttttataaagtgatggacgttttggagttcgtcgattggtgttagttcggtgggtggcggcgggttgtcggggggcgggaggcgcgcgggtttttggcgtcgacgtttgacgtttttcgtttcgtagt

SEQ ID NO: 1044 - DNA, 5294 bp, Artificial Sequence
  chemically treated genomic DNA (Homo sapiens)
gttgcggggcggggggcgttaggcgtcggcgttaggagttcgcgcgtttttcgtttttcggtagttcgtcgttatttatcgaattggtattagtcggcgggttttagggcgtttattattttgtagaagcggtatatgatttagggcggtatttcgtataagaagtgttgggcgtcgggggttgcgggttttttcgggttcggtttttcggttatggttgtcgtcgtcgggtcgggatttgtcggggttttttagggtcgcggcgggcgcgggtttgggtcggtcgggttcgcggatattgatttatttttttttcgagtcggtttcgtgcgacgttcggcggggcggaaggggcggtgttcgggttcgtcgttattttgcgcgtcgcggtcgcgcgttgggttatacgggggcgtttcgcgtcggggagggttcgggtttcggcgggtttcgcgagcggcgatcggtttttcgggttcgttcgggcggggttttggaggacgaacggcggttttcggcgttggggatagagggtagggcggaggttcgggttgttcggaaaggggtcggggtcgggtttttcgaaagtttttgggcggttttgtcggaattttgttttttattgcggtttgtagggttgttattaggagttttgtttgttcgttttacgtttagttttttgtatacggtagtagttttgagttatttagtttttttaggtgttttgaaatatgtcgagaacgttgttcgttatagtcgtgagtgtatgcgttgttgttgttttagtttttatttggtaagggtgagtttaggtagttgtggtgaaggttttttgagttcgtcggtagagtttttgttatttcgtatttgtttttttttgggtatcgtttttgattatttgtttggatcgttattttcggttttcgttttgagatggggaagattttataagtagtaacgtagatttatttttttgtttttttagttggatgttttttttagcgatagttttttttgtttttttgattttgatagcgaaggggttttttatttttagttttatagatttaggattttttttagaaacgagaagtgtttaaggtttatagttggtttttgttggagttttttttttgaagttattattattgtggttatttttaaggaagatgttaattatattatgaaatttatggttttttacgggatagattttattgagatgtattaatttaagtatttgaaatgattgtatatttatgttaatttttacgggggtatttggttttatttatatataaaggtttattagtttacggaatagggttggtatacgagatgtttaatgtatataagttgattttttaattttgggatttatttttgaaggttaggtttttcgagggtattttttagtatgtgtatgtgaagttggatttttttgagtagttgttttttttagttttttattaatttggtgaggttgtttttgagagttaaggaagttagtaataagggggttttttttgggtaaattttttagtttgtttttgtttggttagagaattacgttagtagttaatagagggtacgtgagggttttggttagaatgagatataggaggagttatagtttgcgggggtgggggtgtttaaaagtattatagtatatttagatttagggggtgtttttattatacgggtttggagtagggaggttgtgttgtaggttgatttatgttaggtttttttcgttatacgttggagtagtgtgtttggagagtattggtttggaagaagttgaggggttagcgaggttagtatatggaggaggttttttttggtcgttcgtggtaggtttgaaggtagttatttgtgtttagggatagttagatttaatgaggaaacgtagtattatgttgttatgtgagttggagggggatttttgttttataatgaaagtttagattttgagttatttttatagagagatttatcgagaatgttaatagtataggatatagtattttttaataaaaggtgtaaacgcgttatttagaaaggtatgttgagtattttttgtttttatatgtattaaaaaatttataaaaataaaataaaattgcgtgttgtttattttttttaatagtaaaagaattttatgaaaaaattatttgatttttataataaaagatataaacggatatttttatgtaaatttataaggtaaattttttatataataaataggttatagggatttagtggggggggggtgtttttgaaacgtatataggtatatttagataggtttattgaaatggtataaatttttttaataaattgttttttgtttttaaatatattagtgtttttagttatttggttatatataaagaattttttttttgaatattataaaaaagtaattaataatttttgtttttaaaacgatttatttattttttaaagtaattgttttaaaatataaaaattgaaggtgaatacgatatagggtttttagagatatttttagttaagtgtgtttcggtttttttttgtgttttaagtgtattttttttaattttagataggtttttaggttggagttagtttttttttgtatagggtggtttgtgttattggtaatgttgtttatagttttcggtttttgggttggtataggggagtatgattttaatttaggagggggtagatattttgtttagtttttttagatgttgtattcggtatgtaatggttattatagttagtatttttcgttttttagaggagggaggggttgttaggtgttttgggagtttaaaattatgtttaatgagggtaatggtttttttaaggagatgttttcgttatggaatgggaaggggtttttttatatttaagttttgttggcgatcgggtgatagttaagagagtgtaagttttttttatggttattttattgttttgggaaggggagggtggggaatagagatgttatagtgttgagttttggaggatggggtgggatgtgacggaagtgttttaaatagtaatgtttacggggtatattttggagagagaatgtttattatttggtttgtttaggaagagttgtatttgttaatattagtttgatttgtgtttatagtagagcgttttagttttttgtttgggtgggtttagttttattttttttagttttttagttttgtatatatatatttttttttggttttttttaaggaaatattaattttgtttttttttaaaagtacgggatggtggtaataatttcggggggaggggaagtaaaataagaatttattgggcggaataaaatttggttttgtagtgatttggaaagtggtaatatattagttattcggtttgttggtttggagtgggatttttgggttttattgttttgggtggtttttggttgatttgggtaggggttatttgtttagttttttttttttattttagttattattttttttttttcgaatgtttttgtttgtaaagaaaaagtgtttagaaatatttgtttttggaataattattttaaatatagttataatatagattttagtttaaatatagaagagatttatttagtaaaattttttttatttattaaaaattatataaatataagttttaatattatagttaagaggattagtagagagaattttatgtttggaatataaaaggagaaataaaaattaaattaaatttaaatagaaaaattttagaaagataagtaaagggtaaagaaggaaggggaaggggagtaaatatagtatacgttatagtgtttagatatacgggagtttagtatgggtaagggttcggtatatattgagtaatagttttggtgatatttggttatatatttattgattattgattttggagcggttgttattgattgaagtagtgataaattaaacggaaaggaggtcgtggtagtaagggaaggagtaggttttaagttttgtaagttttttgtattttattgtttagttttttagaaatattgaatcgggtgggtttcgttttattcgggtagggttagaggttatcgggtgaggttaattcgggcgtcgattttatgttagttagaaaatacgtacgtggacgtacgtagatatttatttgtttacggttaaatattagcggtaacggttttttcgttttttttgtttttattttaggttgggtgggaaagagtattatgatttattgttaatattgaatatacgtcggagttggtttcggatgtgggtttagaggttgttttagttttggtttttcgaagggtttacgggtagttcggttattgaaagggtttatggttgttttttttttggatttaggttttagaagaagtaatgatagtagggagggaagtttttggttttggtgattataatgttttttgttttggaagaataagtttttggatttttttggtgtttttaattattaaaaaaagatgattaaaaagaattgttatagttaaattttttagtagatattgtttattaagaattataaaagtaaatgtaattattcgtaggatgggggagaagaaagggatatttttggagtttttattatttttggaggggattttttggattgacgtatatgattttggggtttttggcgttttatttggtgtagtttataggtttcgagataggttaggtttttcgttttcgttttagtttttaggttcgatagagtgggaaggatgaaatatattcggattttattggtagggaggtttgcgaggttgattttatatgggtttattttgattaggttacgggaaggggattgggggagttaggttattttagtggattttagtttttagaggtggaaggcgattaggttgtgtcgattacgtttcggattttagtaggttaagggagcgtttttgtatttagaattttgggattttttttataagtacgggagaaataagagtgtaaaatttgggtgttgtttggagttttttttatttggtataggaaagtttttgaaagaagcgaggaaaagattacgaatttgtttggatagaagaagtgattagtagatagatttgtcgttttttttttttttttttttttttttatttttttttgttttatgttatggttattagaaatattgtaattaagtaataggtataattttaataggtttttttttgtgtgtgtggagttataagtaaaatgagtttataattgtgtaatatatagatatatatataa

SEQ ID NO: 1045 - DNA, 6022 bp, Artificial Sequence
  chemically treated genomic DNA (Homo sapiens)
attttttagtaatttttgatttttcgatcgttttattttttgtcgagtacgtttatttagttttataattgtttgttttttttttttttgttatttatgtatttgttcgtttgagagttttttattttatttcgaggttttttcggttttttggttattgttttttttcgggcggtatttatattatggttagataattttttttttattgtagtttttattttattacgggggaatatgagttaaagttatgtaattcgttgtcgggtaggaattaatagagttagtatatgtttttttcgtatttttttttttattaggtggttaggaatgtttcggattttcgtggttttgttatggatattttatttgaataagaagtaattttttttttagaattttagggggtttcgttattatagtataatttaatttttttagaaagatatatttttttatttagtatgtttagagttttatgtgtgataagtgacggtatgttgttttataaaatttcgttgaaagagtcgttgatgaattttagaataatttaatattaggcgttgttataaatgggtggaattagataaagtcgtttgttttttattttttgttttagtttttagaaaattgtttaaaggtattgtaaattatttgcgtttttattggtttggttaaggagttggtagtgttaattggttttgtgtaaagttacgttattgtttttgtagagagtatgatacgttagagaggtgggaagtgttgttaggattttttttagaatgttggtaagaagagtaggcgaaaagggaagagttgtttataaatagggaaaggagatattatttcgtatttttggttttttattacgttatcgattataattataagttttattttttataagtttgaaagcgggtttttttttgtatgtaggaaaaagtttcgtttattaattttgtttttaaagagattataagttggttttgaacgttttgtgttttgggaatgtttattgtcgaagttttgtaaatttttttattgaaggtatttagggtattttgttaattaaattaggaaaatgtgtatagttttatttgaaaaaatttaggtttatgttttgtattttattattaaagaatttattattttttaaataatatttaattattttaaattgagtgtgtagtgagagtatttataatataattttatttttagagtgttttattttaatttttttttggtataagtagtttagaaggttagattttttttttttagaggattaaatattcgagaagagtggttaagaggtagtattaggttttttttatttttttaaagagaatttagttttgtgaagaagaataaagtgaaggttaatggttagatttatggtttaaaaataaaatgtagttttttttattttgaatttattataattaaaaaggttacgaggtagttattaatgattttaagttgtaatagaaagaaaaaaatatttatttagggttaaacgaggatttagtggttatttgtcgtcggtttttattttataggggcggaggatgaggttagggaagatttttttatttatattgatttgattagagatgaaatttttttttttatgatagtttgtatttagaggttgattttgaaatagttatgttaaatgtagttaatttttgtgtataaggagaaaaaatagttttttagagttgtgtttttgggttagttatttggattttttataatttttttcgttttttttatatttgggttgaatttcgttttttttgtttgttaggtttggtttgggggttaaatgagtgaaagttcgtgagatatttttaagtattgaagtgcgtagtaaatgataatagttttgatttgttgaatatgatgatgtgttaggtattgcgtaaagtattattttattattataataaatattgttgggaggtagggatatttttattttttttgtatatttagaagtaggattttggttaaatggtttttttaaggttttatagttttaaaaatttaagtatttatttaatttttaatgatattattttttggttatgtaatgtgttatggttagtaattagatttgtaaatatatataattaaagaggattagaagagatatatattttatataaattatatgaaaatagtatttttagtatttttttgattttttttggtaattaaaaatgattgttttttatatttttttatggatatagttgtattgtttttagttaattgtagtttttttttttaaagagtgaattagtgggaaaatagtgttatttaagattttaagaatttagtgtgtgtgtttgtgtgtgtaggatgggtttttttgaaatattttatttgtatgtgaatgtataattttaaagattggtttttaaaatattgaattgaggtaaatttagttttttttgtagattttttacgataaatgtgaaattgaaaatggaaatgttttatttagatggtgtgtcgattataattttaatatacggataatttattaaataagtaattttttcgtggaatattacggttagtttttgttttgggtatatatttaatgaattggttttttattagtttttgtttgttaataagttgtgttatttattgataaatatttagttttttattaaggaatatcgatttttttaagttttagtgtgtggagggggtgggagtttggtggggaagttttttaatttgagaatttttgtcgttttttgttttaatcgtgattaagatataaaagtttttggttattattgttagttgttatttgtttattgtttttttgacgggtaatgaggttattcggagttttagtgattaaaatgttttattatttgtatttatattattattaagaaaaataatttttagtggattaatatggtaaatgagtaaattagaagatggcgttgaagattagtaattatatttaaaaataaggtagtggtgtgaaggtttagagttttatataacgattgttgttttgaattaaaagtagaggatgtggatgagtgaggggagggtatgttgaaaatgattaaattcggtgtagaggatacgtatacgaaagtgtaaaaagtttttatttgttattttttgtttttagtaaatttttttttggtatgtttgtgaacgtttgagggaaaggtaatattgattaaaatataatgtaataagaaggtaacgatttttgttttgtttattgatgtgttttaagtgtttaggacggtttttgataagtagtaggtgtttaaaatatatttgttaagtgaataaatttgtgaaaggaaaggaagaaaaataggttgtgattagaattttttgtgaataaaattttgttgtttattatatagattttggtaatggaaaatttatttgggtgaaataaaaaatggtattttgttaatttttgagaacgtttgttggttttaggaaaagtatatttatttatattttattatttgttttgttttagtttaaatatagatttttttttggttaggagatattgatttaatatataagattaaaataaaaattgagaaataagtgaaattaaaagttttttaaaagttgtaggttgatttacggtggtggtggtttaaaattatatagaaattagagatttgatggtttatttgaaaatgcgaagtaaatgtatatatttagtattttagacgatcgaaagtttaacgggtgaaagtttagggggttaattttgcgattaaggatattttggaaaagtatgtaaaatttttggtttatttaagtattatttttattttgggtttttatttatttattttgagatggagttttgttttgtcgtttatttcggtttattgtaattttagtttttcgggtttaagcgattttcgtggttcgtttttttaagtagttggggttacgttcggttaatttttgtatttttagtagagatggggttttatcgtgttggttaggttggtttcgaatttttgattttaggcgatttatcgtttcggttttttaaagtgttgggattataggtttgagttatagcgtttggtttattttgggtttttatattttattggtaaattgtttttttttaggttgaggttaaaacgatattattttaaggtgaattgaagtttggaagtgattaagtatttggatttttagggagttttttttcgtttttattttttttatgttaagataattaaaatttcggggtcggggtattgtttgagttattttaatttattagtttaatagatgtaaaaggatgtaagtatgttagatacgtagagatagtatttgaattaagtttaatagtttaagggagttgggttattttttattttttttttagtgagtgcgatgttttttaaatatcgcggagaggtagggttttcggtgatggttttgtcgagggtgttttcgtaatttttatttttagttttttttggattattttttcgtttttcgttatacgttttgtaaagcgaagtttttttcgtattagattttcgttattatacgttttttatttttcgttttggttatatcgttgtagtttagtgattgattggttttttgaggttttggcgtaaaggcgagattcgtatttcgtatttcgtttttcgcgggaaacggttttagtgatagttttcgaagcggcgcgcgttcggttggaggtgcgtttttcgggcgcggcgcgcggagggtcgttaagggcgcgggaattttatttcggtcgcggtagtttttagtttttacgtcggttttgaggttcgttcgttcggtcggtttcggttttcggtttgtaaagtttttttttttagtttaattttcggtttttataggtttcggcgtttcgtttcgttttaggtttcgttttagagagttttataaagttttttttttttatttcgtatttttagttttatcgttcgattttgggatttatcgttgtttttagtttcgagtttagggcgaggtaagggttggagtcgggtaggaggaggggtgtgaggttgatattagagaggattcggagcgcgaattagaggttcgatttttagggtagcgtagggtatttcggtttcggagcgggaagggagcgcgtttcgttttggagtttcgatttttattttatttgcgttgagtcggaggcgcgggtttgggttttaaggttcgtttttttggttttgttcgagttttttcgtttgtttttcgcgtttttgcgacggggtcgttataagttggacgggatgagttaatcggattgtcggggtttttcggggttcggcggacgttttgcgcgcggaatttttcgtattggggttgtagttttcgcgtttgcgttatttgtcgtttgtagagtttatttagtgcgcgttagttgggtagggataggggttttattcggggcgaagggtttggatgcgagtagagaaagcggagggtggaggaattcggggttgcgtttttggaacgttcggtcgtaggcgaggtttttcgcgcgtggaggtcgttaggggagtggaaattgatagagtcgcgggaaggggcgagaagcgggttgggagtgagcgaaggtaagcgagagttgcgagtgagtgcggaaggagggttaggaggggtggcggttgggtggggagagagggtgtaagacgagcggcgcgtgtcgggagtttttgggttgcgggtgcgttataggagagtaggcgggtaggagttttcgcgggggtcgagttcggaaggcggacggttgtgttcgtttaggggatgcgttcgggtcggtcgcgaaggtgttttttttcgggggttcggacgattttgatacggtacgcgcgcgtttcgtagttttaaagatttcggggtttcgtggttattggcgtaggggatcggggcggggtgttcggagtgcggtgtttcgtggttgaagggtagttttttttttcgtagt

SEQ ID NO: 1046 - DNA, 6022 bp, Artificial Sequence
  chemically treated genomic DNA (Homo sapiens)
attgcggggagaagagttgttttttagttacgaggtatcgtatttcgggtatttcgtttcgattttttgcgttagtgattacgaggtttcggagtttttgaggttgcgaagcgcgcgcgtgtcgtgttagggtcgttcgggttttcggaagaaggtattttcgcggtcggttcgggcgtattttttgggcgggtatagtcgttcgtttttcgagttcggttttcgcgaaggtttttattcgtttgtttttttgtaacgtattcgtagtttaaaggttttcgatacgcgtcgttcgttttgtattttttttttttatttagtcgttattttttttggtttttttttcgtatttattcgtagttttcgtttgttttcgtttatttttaattcgtttttcgttttttttcgcgattttgttagtttttatttttttggcggtttttacgcgcggaggatttcgtttgcggtcgggcgttttaggggcgtagtttcgggtttttttatttttcgttttttttgttcgtatttagatttttcgtttcgaataggatttttatttttgtttagttagcgcgtattaagtgggttttgtaaacgataagtggcgtagacgcgggggttgtagttttagtacgggggatttcgcgcgtagagcgttcgtcggatttcggagggtttcgatagttcggttagtttatttcgtttagtttgtggcgatttcgtcgtaggagcgcggagggtaggcggggaggttcgggtagagttaaggaggcgggttttggagtttaaattcgcgttttcggtttagcgtagatggggtgggagtcggagttttaggacggggcgcgtttttttttcgtttcgaagtcggggtattttgcgttgttttggaggtcgaatttttggttcgcgtttcgggttttttttggtattagttttatatttttttttttgttcgattttagtttttatttcgttttggattcggagttgagggtagcggtgggttttaagatcgagcggtgaaattgagagtgcgaggtgggaaagaggaattttatagaattttttggggcggggtttggggcggggcggggcgtcgaggtttgtgggggtcgggggttggattggggagagggattttgtaagtcgagagtcggggtcggtcgggcgggcgagttttagggtcggcgtgaaggttgggggttgtcgcggtcggggtggggttttcgcgtttttggcgatttttcgcgcgtcgcgttcggagagcgtatttttagtcgggcgcgcgtcgtttcggggattgttattggggtcgtttttcgcgaagggcgaggtgcgaaatgcgaatttcgtttttgcgttaggattttaggaggttagttaattattaaattgtagcgatgtggttagggcgggaaatggggggcgtgtagtagcgggaatttggtgcgaaggggatttcgttttgtagagcgtgtaacggaagacggaggaatggtttaaagagaattggaggtggaggttgcgggagtattttcggtaaggttattatcgggaattttgttttttcgcggtgtttagagaatatcgtatttattaaaaagaaaataggaaatggtttagtttttttgagttattaagtttgatttaaatattgtttttgcgtgtttgatatgtttatatttttttgtatttattaggttggtgaattgaagtgatttagataatgtttcggtttcgaagttttaattattttagtatgaaagagatgggggcggggagaggttttttaaggatttaagtgtttaattatttttagattttagtttattttaaaatgatgtcgttttaattttaatttggaggaaagtagtttattagtggggtataaaagtttaaaataggttaggcgttgtggtttaagtttgtaattttagtattttgggaggtcgaggcggtggatcgtttgaggttaggagttcgagattagtttggttaatacggtgaaattttatttttattaaaaatataaaaattagtcgggcgtggttttagttatttgagaggacgagttacgagaatcgtttgaattcgggaggttgaagttgtagtgagtcgagatgggcgatagagtaagattttattttaaaataaataaataaaagtttaaaataggaataatatttaagtggattagggattttatatatttttttaagatgtttttaatcgtaaaattaattttttgagtttttattcgttgagttttcgatcgtttgagatgttgagtatgtgtatttatttcgtatttttaggtaaattattagatttttggtttttatatgattttagattattattatcgtaggttaatttgtaatttttgaaaagtttttgattttatttattttttagtttttgttttaattttatatattgggttaatgttttttaattaaagaagaatttatgtttaggttagagtaaaataggtagtgaggtatggataggtatgttttttttaaaattaatagacgtttttagaaattaataggatgttattttttattttatttaagtaagttttttattattaaagtttatgtaataaataatagggttttgtttataaaaagttttggttataatttgtttttttttttttttttttatagatttatttatttgataaatgtattttgagtatttgttatttgttaggaatcgttttaggtatttggaatatattagtgaataaagtaaagatcgttgtttttttgttgtattatattttaattagtgttattttttttttaaacgtttataaatatattagagaggagtttgttgaggataaaaaatggtaaatgagagttttttgtattttcgtatacgtgttttttgtatcgggtttagttatttttaatatattttttttttatttatttatattttttgtttttagtttagaataatagtcgttgtgtgaaattttgagtttttatattattattttgtttttaaatgtaattgttaatttttaacgttattttttggtttatttatttgttatattgatttattagaagttattttttttaatgatgatgtgaatataagtaataaaatattttaattattaaaatttcggatggttttattattcgttagggaggtagtgaataggtagtagttggtagtggtgattaaggatttttatattttagttacgattgaaataaaaaacggtaaaggtttttaaattgaaaagtttttttattaaatttttattttttttatatattgagatttgagaaaatcggtattttttagtaaaaggttggatatttattagtaaatgatataatttgttgataagtagaaattaataggaaattagtttattgaatgtgtatttaaaataaaggttgatcgtgatattttacgaggaagttatttatttagtgaattattcgtatgttgaggttgtagtcggtatattatttgaatggagtatttttatttttaattttatatttatcgtaaagagtttgtaagaaaagttgaatttattttaatttagtattttaaaagttaatttttaaaattatatatttatatgtaagtaaaatattttagaaaaatttattttatatatataaatatatatattagatttttaaaattttggataatattatttttttattaatttattttttaaaggggggggttataattggttaaaaataatgtaattgtatttataaagaaatataaagggtaattatttttaattattagaaaaaattaggaaaatattgaaagtgttatttttatgtaatttatatagaatatatgttttttttaattttttttggttatatgtgtttgtaaatttaattattggttatgatatattgtatggttaaaaggtagtattattggggattaaataagtgtttgagtttttaaggttgtgaggttttgggagagttatttaattaaagttttatttttgggtgtataaggagggtgggggtgtttttgttttttagtagtgtttgttgtgatgatgaaatgatgttttgcgtaatgtttggtatattattatgtttaataaattagggttattattatttattacgtattttaatatttaggggtattttacggatttttatttatttggtttttaaattaaatttggtaggtaaggaaggcgggatttagtttaagtgtagggagaacgaaagagattgtgagaggtttagatggttggtttaaggatatagttttgaggaattattttttttttttgtatatagggattggttgtatttggtatgattattttagaattagtttttgagtgtaggttgttataggagggggagttttatttttggttaggttagtgtgggtaagaaagttttttttggttttatttttcgtttttgtgaagtggaggtcggcggtaagtgattattgaattttcgtttaattttaagtaggtgtttttttttttttgttgtaatttaggattattaatggttgtttcgtggtttttttggttatggtaaatttagagtaaggaaagttgtattttatttttaagttatggatttaattattgatttttattttatttttttttataaggttaaattttttttgaggaaatgagagaaatttggtgttgttttttagttatttttttcgaatgtttaattttttggaaaaaaaaaatttaattttttaagttatttatattagagaggagttgggatggaatattttggaaatgagattatattataaatgtttttattgtatatttagtttaaaataattgaatgttatttgaaaagtgataaattttttggtaatagaatatagagtataaatttggatttttttaagtagagttgtatatatttttttaatttaattagtagaatgttttgagtgtttttaatgagaaaatttgtagagtttcgatagtaagtatttttagggtatagggcgtttaggattagtttgtgatttttttgagggtagagttagtaagcggggtttttttttatatgtagagaagaattcgtttttaggtttgtagaaaatgagatttgtgattgtaatcgatgacgtaatgagaagttaaggatacgaggtgatgttttttttttttgtttataaatagttttttttttttcgtttgttttttttgttagtattttaagaagagttttggtaatattttttatttttttgacgtgttatgttttttatagaaatagtgacgtggttttatatagggttagttgatattgttaattttttaattaagttaatgaaaacgtaaatggtttgtaatatttttgggtaattttttgaaaattgaagtaagaggtgaaaggtaaacggttttgtttaattttatttatttgtaatagcgtttaatgttgggttattttaaagtttattaacggtttttttagcgaaattttgtgaaatagtatatcgttatttgttatatataagattttaggtatgttggatagaggagtgtatttttttagaaaggttaggttatgttgtggtaacgagattttttgagattttggggggggggttattttttgtttaaatgagatatttatggtaaagttacggggattcggaatatttttggttatttgatggagagaagggtacgggagaagtatgtgttggttttgttagtttttgttcggtagcgagttatatggttttggtttatattttttcgtaataaggtaagaattatagtaaaggaggaattatttggttatagtgtgggtatcgttcgagagagaataatggttaggaggtcggggaggtttcggggtgaggtagagagtttttagacgggtaggtgtatgggtggtagaggagggaaggataagtagttatggggttgagtagacgtgttcggtagggggtggggcggtcggggagttaggggttgttggagggt

SEQ ID NO: 1047 - DNA, 10254 bp, Artificial Sequence
  chemically treated genomic DNA (Homo sapiens)
  unsure 735, 3704, 4981: n is a or g or c or t
aggtgtattttataagtaaagtttgtgattggaatgatgatattgatatatttgttaatgataataatgttttgataatttattaatgtagaagattatgtagtggttttttaaaattgaattatttaggtaattagagaatttatttatttggttttaatatattattatataaaagtattgttagattttggttgttaatgttttattttatttgttagatatatatttatggtagagattgattgtattatttttttttggtggatttttgaatatgttttagtattaaagttatatatatttatgaataaaatggaaggaattttttataatatggaatattttaaataatattggaattattttttttttaagttatgtaagatttagttgtaatttttatttggtatttatgtttgttttttaggtaaaattttattttagaaaagttttagatttttagaaaaattataaagtatagagagaaatttaatttataatttatagagagtttttgttatttgtttttatagtaggtaggagtttgagattatagtgaattataatggtattatggtattttagtttgaaagataaagtaagattttgtttttaaaaaaaatttttttttgtgtatgtgtagatggaattagtaaataggaagaaataatgaaataatattaatatattattaattaaattttaaattttatttggatttttttagttttnatttaatatgtttttttttttttttattgtagttaatatatttagtattgaattagtttaattttttggattttatttttgtttaagttttattttgaagtttattttggtataagttagtagggagaaatggaaagaatttaaattttgaattttaataaattttagtttaaataaaaattttatttatggaattattaatatagtaaaatgtttatatagtgtggttaaatagtattaaaatttttggaggaattgagaaatgttgaattaaattattttatatttatatgtaattataattttgtgttaatatatttttttagtatattaattttagattatgaagaaaatttaaaagttttataataaaagttggtttatttagttttttgaataggaaagttttaataattagtatgtttatttatttatagtttattaataattgatttttatatgtcgattttgaggggttgtaagattttaaaatattaaaggttgaataaagtttgtttaatgtagttgtgttagttttttatggttgttatattaattattttagatttagtggttttaaattatataaatttattgttttataattttggaggttagaagtttaaaatggattttattgggttaaaattaaggtgtgggtagggttgtatttttttttggaggttttaggggatagtttgtttttttgtttttttaagtttttggatgttgtttttattttttggtttgtggtttttgttagttagtagttatattatttaatttttgttgttgtaattatattttttatttttttgtttttttttttttttaatgaaaatttttgtgattatatttagtttgtcggataaatttaggataattttacgttttttaatttaattatatttttaaatttttttttgttatataaggtgttatatttatagggtttggggattaggatatgtatgtggatattttaggagagtggggtagggtatttttttgtttgttttagtagttaatgttaagtttattttattttaattttttaaaattagtaagaatttatatgtatagatgatatatatgtgatatgtatatgtaaatttatttaataaatgtattaattttttttaattatgttggaaaatagattttttttattttttattttatatgtatgatttaattattttattgatatatatttttgtttttttagatgtattataaattttttttttatgtttttttttttttttttgaaatttaattaaagttttatgatgtaattttttgtttttttttttttttgaggtggagtttcgttttgtcgtttaggttggagtgtaatggtgttatttcggtttattgtaagttttgtttttgagaaagttgttttaggtttaggatattatatgttttagaagtataggtaattttatagttattataattgatttaataaaattatgtttttttttttgaatagattaaatgttatttgttgtattttattttttgtttatattgtttttttttatttttaatttatattttataatttgaataatagaaaataaatttatttaatgttggttgtatgattgggttggatgttttttattattttatatattttataagatataaaatattgttatatgttatatggtttttgagaatgagagaataggatttttgaatgaattatggtttatggaagttgtgtagatagtaaaaatgcgtagaagaggaatggtattagagtgaaagaattggtttttgtgttatgttttaaagttatagttattgttattgttttatttgttttttgtttttgtatagttttaagaatttgtgattagattatttttaatggtttatttatgtttagaaatagtagatataattttgatatttttatagttatgagtattattttttgttatttttatataaattttgtatttatatgtattggtttttagttgattttagtagatttttaatttatttgttggaggtttagataaagtttttgttgaagtgatcgatatagatgtaggttgtagtttgatttgtatgattatagagtttatggtaatggtttttaaattattaaaatttggaaagttttttttttataggattttattttttgtttaatttgttagtgtttttgtaaaataaattattaaagttatttttatatatttattttttaaatatagaaattttgatttttttaaaatagtaattaagtagtgaattgtttatttaaaaataaaatttgatttagtttttaaaagaaggtttttttggtatattttttaaaagttgagtgaagttgaataaggtattcgttagagataggttttgtgaacggtgattgtgaataattggatatgtgaaaagggttatttgtagattaatgatttaaaattttagttgattaattaaatgttagttattgttattataaattattattgttaattgtatatgattttaatgagtatatttattgtatggaaggtattaatagaatttttttagtatagttgtaattgttggtaaaaagtattgttttgttttgtttttttttttaagattttttttgatatttgttatttagtatgtaattatattgtagattaattatttttaatttaaggttaggtgggagttttttaattgtatggttaaatggattttgaaatatagaaattttttttgtatttgtagtgaggtttgaaaagtattgtaggaattatagtttgaatttgtaaaatatatttattgtaaatttgtgtatggagggagatttttttattttaatatttgataatataggaagtatataaagttattattatttgtaattggaatagtgttgttaaaatgattttattgtagtatttttttacgtaagtattgttttgttttgatttttaagttanatttattaggaaattgttaaatttgtagtaaattttaatttttaaagttatagtagtggttaaaggtatttttttttgtttagaaaatttcgtttgtgatttcgagtttaaaaaaattataataaaattttgtaattattaagttattagatttttgtgttataaggtaagtttagattttgtttttatttttgattaaaatttatagaatttatgatggttaaatttgtgagaataaatgaagtttattggtgatattattggtttagtgatatatgataaattaatgttttttttattggtttaatgatatatgataaattgttttttttattgatgaataatagagtgaagtattatagttttaaatagttatgtttttataaattttgtaaatttgtttaattaaatttttttttggtttttatttatttttgttattattagttgtaatatattttaacggattttaatttaggttatattgaattggtgtttttttaatttgggaaatatttttgtttattattattttatggagattttttatagattttaattttttcgtgattttaagtttggaattgattttttgagcggagttgtcggtgtttaggcgcgttgtttttatcgttcgtcgtggtgtttcgttttttttttagtacgtttggtggtcgagagggtcgggcgcgcgtcgttcggttcggaatgtagagattcgggcgggacgtttcggcgtcgttgttcggttgtcgagcgcgaggtttcgttacgtgtttatttttttcgagtgagatcgtcgcgcggtcggagggggtcggcgcgtagagttagacgtcgtcgtttgttttggttggggttttcggtaatttttcgaggaggaggaggaggagggaggaggggagaagtaattgtagcgtagcgtttttcgaggaataggcgtttttttcgaattttttttaaattttttttattttttttcgtttttgttttttttttttttttttagtcgtttggagcgaggggtagggatgagtttgttttttcggtcggtttttagttgtagtggttgttcggtatcgtttcgtatggaaaagttattttttttattcgtcgagatgggttcggatgggggttgtagaggacgcgttcgcgggcggcggtagtagtagtagtagtagtagtagtaatagtaatagtcgtagcgtcgcggtttttgcgattgagttggtatttgggcggttggtggcggttgggacggttggggggtgggagtnataacggaggagggagaatttcgtgtaacgttgggatttggtaattcgtttttttttgtttaaggatatttaatttgtttcgggaatcgttgtttttagaggggaatttaggagggaaggcgcgcgcgtttttggaggggtatcgtagggattttcgattgtcgtttttttgtgtcggattttagtcggggcgacgagagatgtattttcgtttttttttggtggcggcggcggttgagaggagatttggttttcggaggatcggggttgtttttatttcggacgtattgttttttcgtcgggcgtgaagcgttcgaaaatttcggtcgggtttttttttgggtttagtagttgcgtttttttttagttgttttttttcggcgcggggggcggcgtggattttagagtcggggtttttgttgtttttagttttgtttgtatgtgtcgggtcgcggcgaggagttttcgttttttattcggttgtttttcggagtttttttttgtttagcgttggtggtggcggtggtagtatggcgagtttttcggagagcgatggtttttcggacgtgcgtaaggtgggttatttgcgtaaatttaagagtatgtataaacgttttttcgtattgcgcgcggttagcgaggttgggggttcggcgcgtttcgagtattacgagaacgagaagaagtggcggtataagtcgagcgtttttaaacgttcgattttttttgagagttgttttaatattaataagcgggttgattttaagaataagtatttggtggttttttatattcgggacgagtattttgttatcgcggcggatagcgaggtcgagtaagatagttggtattaggtttttttatagtttataatcgtgttaagggttattacgacggagttgcggtttcggggcgggaggtggtgggggtagttgtagcggtagtttcggttttggtgaggttggggaggatttgagttacggtgacgtgtttttaggattcgtatttaaagaggtttggtaagtgattttgaacgttaagggtttgggttagataaagaatttgattggtatttatcgtttttgtttgattagtaagattattagtttcgtgaagttgaattcggaggtagcggtcgtggtgttgtagttgatgaatattaggcgttgtggttattcggaaaattttttttttatcgaggtgggtcgttttgtcgtgacggggttcggggagttttggatgtaggtggatgattttgtggtggtttagaatatgtacgagattattttggaggttatgcgggttatgagtgatgagtttcgttttcgtagtaagagttagttttcgtttaattgttttaattttattagcgtttttttgcgtcggtattattttaataatttttcgtttagttaggtggggttgattcgtcgattacgtattgagagtattatcgttattttttcggttagtatggtgggcgggaagttaggtttttttcgtgttcgcgtttttagtgacggcgaaggtattatgtttcgtttagtttcggtggacggtagttttgtgagttttagtattaatagaatttacgtttatcggtatcggggtagcgttcggttgtatttttcgtttaattatagtcgttttatttttatgtcggtttttcgttgttcgttttcggttattagttcggttagtttgtcgtttagtagtattagtggttatggttttatttcggattgtttttttttacggcgatttagtgtttcggtgtttggtttttttagcgatggcggttttattttttcggatgagtatggttttagtttttgcgattttcggagtttttttcgtagtgttatttcggattttttgggttatattttattagttcgcggtgaggaggagttaagtaattatatttgtatgggtggtaaggggttttttattttgatcgtttttaacggttattatattttgtttcgggtggtaatggttatcgttgtattttaggaataggtttgggtacgagtttagttttggttggggatgaagtagttagtgttgtagatttggataatcggtttcgaaagagaatttattcggtaggtatattttttattattatttattagaagaattcgttttagtttttagtggtttttattgaggagtatatagagatgatgtttgtttatttattaggaggtggtagtggaggtcgattgtcgggatataggtatttcgttttcgtgtttattcgtttttatttagaggagggtttggaaatgtattttttggagcgtcggggggggtattatcgtttagatagttttattttttatacggatgatggttatatgtttatgtttttaggggtggttttagtgtttagtggtcgaaagggtagtggagattatatgtttatgagttttaagagcgtatttgttttatagtagattattaattttattagacgttatttttagagagtggattttaatggttatatgatgatgttttttagcggtggttgtttttttgatattggaggtggttttagtagtagtagtagtagtagtaacgtcgtttttttcgggattagttatggaaagttgtggataaacggggtagggggttattatttttatgttttgttttattttaaatttttagtggagagtagcggtggtaagtttttattttgtataggtgattatatgaatatgttattagtgggggattttaatattagtagttttttcgattgttattacggttttgaggatttttagtataagttagtttttttttattatttattgttaagattttttaagtatatttagcgtttcggggagtcggaggagggtgttcggtattagtattttcgtttttttattagttttggtcgttttttttatgttgtaatagtagatgatttttttttttttattagtagcgatagtttgggtgggggatattgcggggttaggttggagtttagttttttatatttttattattaggttttgtagttttatttgtttcgaaaggtggatatagttgtttagattaatagtcgtttggttcggtttacgaggttgtttttgggggattttaaggttagtattttatttcgggttcgagagtagtagtagtagtagtagtttttgttgtattttttagagtttaagagttcgggggaatatgttaatattgaatttgggagtgattagtttggttatttgtttggttcggtggttttttatagtttattttttgttaggtgtttattttagttttagttagtttttagagaggaagagattggtattgaggagtatatgaagatggatttggggtcgggcggaggtagtttggtaggagagtattggggtcgagatgggtagattgggttttgtatttttcggggttgttagtatttgtaggtttattcgggtagtgttagtagtcggggtgattatatgattatgtagatgagttgttttcgttagagttacgtggatatttcgttagttgtttttgtaagttatgttgatatgcgaataggtattgttgtagaggaggtgagtttgtttagggttattatggttgttgtttttttatttttagtagtttttgttttttcgattgggttttaaggggtagtagagttggttgtttattcgtttttgttggggggtttataaggatttgggggtatgagcgtttttattcgggtgaattttagttttaatcgtaattagagtgttaaagtgattcgtgtagatttataagggtgtcggcggaggtatagtttcgagattttttttttaatatttagtgttattcgggtgggtaatatagtgttttttggagcgggggtagtagtagggggcggtggcggtatagtagtagtagcgaggatgtgaaacgttatagttttgttttttttgagaatgtgtggttgaggtttggggagtttgggggagtttttaaggagttagttaaattgtgtggggttgttgggggtttggagaatggttttaattatatagatttggatttggttaaggattttaaatagtgtttttaggagtgtatttttgaatcgtagttttttttatttttatttttttattaatttttgggtagcggtgagagtagttttattcgtcgtttaagtgaggatttaagcgtttatgttagtattagtttttagaagtagttagaggatcgttagtagtttaattggatattatagtaggtgcgttttatggtgataaagttagaagataaaattgtttttaattttgtttttgaattttgtttttcgtttttgtttttttttgtttttttttattgtttttttagggagaatgtatttatatttttagggtatataagatgtttattttatattgatatttggtagagagttaaataaatatgtaggagtagttataggagggttttttcgtttgagaatttttaagtgaagtagttattgtagtatttttaaaatatatattttatgttagttttgcgttttgtagagttttttcgtaagaagtttgatttgtttgttgaagttttttttttattatatatttaggttagtttttggaagggatagttttataaaaaatatttgttaatataggggttaaatttttttttattttaaattattttaatagtttttgggagtttttaagggtgattttattaagttgttttttgtatttttgttttgtgattttataatattagggtaatataaatagtagcgggaagtattgatttttatttattttgttttaaaaagattaggagtaagagttttttagaaatatgtatttagagagaagtatttatttattttgtgattttttaagaaagtaattatgggtgacgttttttttttgtttatgtattaggatttgtgaaatattatttatatatcgatttattattttacgggtttggttttttttgtataggatatgtaggaaattttgtatgtgtttgggatttattattaagagttatgggagtttattttaggatgtttgttttatagttatttttttttgtattgagatattatagatattatttgggggttattatatattttttgtaaaattatttttatttgttgagaagaatgtatattaagttaggaatatgttttaatttgttttgttttgtattgagtagaagggttaaattgtatattttttatttttagggttatttgttgt

SEQ ID NO: 1048 - DNA, 10254 bp, Artificial Sequence
  chemically treated genomic DNA (Homo sapiens)
  unsure 5274, 6551, 9520: n is a or g or c or t
atagtaaataattttaaaagtggagggtatatagtttagtttttttatttaatgtaaaataaaataaattaaggtatgtttttgatttagtatgtattttttttaataaataaaagtaattttatagaagatatatagtagtttttaaatgatatttgtaatgttttagtgtaagaagagataattataaggtagatattttaggatgaatttttataatttttaataatgggttttagatatatatagagttttttgtatattttgtataagagaggttaggttcgtgggatggtgggtcggtgtgtgaataatattttataaattttggtatatgaataaaaggagaacgttatttataattatttttttgagagattataaaatagataggtatttttttttaaatatatatttttaaaaagtttttatttttgatttttttagggtaggatgaatagaaattaatgtttttcgttgttgtttatgttgttttagtattatgaaattatagaataaaagtatagagaataatttgataagattatttttaagggtttttagaaattattaagatagtttaagataaggaagggtttagtttttgtgttaataaatattttttgtagaattgttttttttaggggttgatttaaatatatagtgaaaagaaaattttaataaataaattaagttttttacggaggaattttataaaacgtagaattggtataggatatatgttttaaaaatattgtagtaattattttatttgggaatttttaaacgaaaaagtttttttgtggttgtttttatatgtttgtttgattttttgttagatgttagtgtggggtgagtattttgtgtgttttgagaatgtaagtgtattttttttgaggaagtagtgggaaagaataggaaggggtagaggcgaagaatagaatttaaggataaggttaaaagtagttttgttttttgattttgttattatgaaacgtatttgttgtgatgtttagttgagttattgacggttttttggttgtttttggaaattgatgttggtataggcgtttaaatttttatttgagcggcgggtggagttgtttttatcgttgtttaggggttgatgagggggtgggggtgggggaggttgcggtttaggggtgtatttttgagggtattgtttgaagtttttgattaaatttaggtttatgtagttaagattattttttaaatttttagtagttttatatagtttggttggttttttgggggtttttttaagttttttaggttttagttatatatttttaaaggaagtagagttgtggcgttttatattttcgttgttgttgttgtatcgttatcgttttttattgttgttttcgttttaaagggtattgtgttgtttattcgggtggtattgggtgttgaggagaaagtttcggagttatgttttcgtcggtatttttgtgggtttgtacggattattttggtattttggttgcggttaggattgaggtttattcgggtgaaggcgtttatgtttttaggtttttgtgggttttttagtagggacgagtgggtagttagttttgttgttttttgaggtttagtcggggaagtagaggttgttgaggatgaggaggtagtagttatggtggttttgggtaggtttattttttttgtagtaatgtttgttcgtatgttagtatagtttataggggtagttggcgaggtgtttacgtagttttgacggggataatttatttgtatggttatgtagttatttcggttgttggtattgttcgggtaggtttgtaaatgttagtagtttcgggaggtgtagggtttagtttgtttatttcgattttagtgtttttttgttaggttgttttcgttcggttttaggtttatttttatgtattttttagtgttagtttttttttttttgggagttggttggagttgggatggatatttgatagaaggtgagttgtggaaagttatcgggttagataagtagttagattgattatttttaaatttaatattgatatattttttcgggtttttgggttttggagggtgtagtaagggttgttgttgttgttgttgttttcgggttcgaggtaaggtgttggttttgggattttttagggatagtttcgtgggtcgggttaggcggttattggtttgagtagttgtgtttatttttcgaggtagatggggttgtagaatttgatggtggggatgtggaaggttgggttttagtttagtttcgtagtattttttatttaggttgtcgttgttggtggaagaggaagaattatttgttgttgtagtatagagaaggcgattagagttagtggaaaggcggaggtgttgatgtcgggtattttttttcggtttttcggggcgttgggtgtgtttaaaggattttggtaatgagtagtaggagaggattggtttgtgttgggggtttttagggtcgtagtagtagtcggaggggttgttggtgttggagttttttattggtgatatgtttatgtagttatttgtgtaaggtaagagtttattatcgttgttttttattgggggtttggggtgaggtaagatatgagagtggtggttttttatttcgtttgtttatagttttttatagttggtttcggaagggacggcgttgttgttgttgttgttgttgttggggttatttttaatgttaggagagtagttatcgttgggggatattattatgtagttattggggtttattttttggggatggcgtttgatgggattgatgatttgttgtggggtagatacgtttttggggtttatgggtatatagtttttattgttttttcggttattgggtattggggttatttttggggatatgggtatgtagttattattcgtgtggagggtggagttgtttgggcggtggtgtttttttcgacgttttaaggggtgtatttttagatttttttttgggtaggagcgggtgggtacgaaggcggagtgtttgtgtttcggtagtcggtttttattgttattttttggtgggtaggtaggtattatttttgtgtattttttaatggaagttattgaggattgggacgggtttttttggtgggtaatggtaggggatgtgtttgtcgagtgagttttttttcggaatcgattatttagatttgtagtattggttgttttatttttagttaaggttggattcgtgtttaagtttgtttttggggtgtagcggtggttattgttattcgagataaaatgtagtgatcgttgggggcggttagggtggagggttttttgttatttatgtagatatagttgtttagtttttttttatcgcgggttggtggggtgtggtttagggaattcggagtgatattgcggaaggaatttcggaaatcgtagggattggagttatatttattcgaggagatgaaatcgttatcgttgggggaattagatatcgaagtattagatcgtcgtgggaagagataattcgaggtggagttatggttattggtgttattggacgatagattgatcgggttggtggtcgaaggcgagtagcgggaagtcggtatggggatggagcggttgtggttgagcggggggtgtagtcgggcgttgtttcgatgtcggtgggcgtgggttttgttggtgttgggatttatagggttgtcgtttatcgaggttgggcgggatatggtgttttcgtcgttattggaggcgcggatacggaaggagtttggtttttcgtttattatgttggtcggggaggtggcggtgatgtttttagtgcgtgatcggcgggttagttttatttggttgggcgggggattgttgagatggtgtcggcgtagggggacgttgatggggttagagtagttggacgaggattggtttttgttgcgagggcggaatttattatttatggttcgtatggtttttaggatggtttcgtgtatgttttgggttattatagagttatttatttgtatttagaatttttcgggtttcgttacggtagaacggtttatttcgatgaagaagaagtttttcgagtggttatagcgtttgatgtttattagttgtagtattacggtcgttgttttcgagtttagttttacgaagttgatggttttgttggttaggtaaaggcggtagatattaattaggttttttgtttgatttaggtttttggcgtttaggattatttgttagatttttttgaatgcgggttttgggggtacgttatcgtagtttaagttttttttagttttattaaggtcggagttgtcgttgtagttgtttttattatttttcgtttcgaggtcgtagtttcgtcgtggtggtttttagtacggttgtgagttgtaggagagtttggtattagttgttttgttcggtttcgttgttcgtcgcgatggtaaagtgttcgtttcgggtgtagagagttattaggtgtttgtttttggagttagttcgtttgttgatgttgaagtagtttttaagggggatcgagcgtttgggggcgttcgatttgtgtcgttattttttttcgttttcgtagtattcgaggcgcgtcgggtttttagtttcgttggtcgcgcgtagtacgaagaagcgtttgtgtatgtttttgggtttgcgtaggtagtttattttgcgtacgttcgagaagttatcgtttttcggagggttcgttatgttgttatcgttattattaacgttgagtagagggaggtttcgaaaaataatcgggtggggggcggaggtttttcgtcgcggttcggtatatgtaaatagggttggaggtagtagaaatttcgattttgaaatttacgtcgtttttcgcgtcggggaggggtagttgaaggaggacgtagttgttgagtttaggagagagttcgatcggagttttcgggcgttttacgttcggcggggaggtagtgcgttcggggtgagggtagtttcgatttttcgagagttaagtttttttttagtcgtcgtcgttattaggaaggagcgaagatgtatttttcgtcgtttcggttggagttcggtatagggaggcgatagtcgggggtttttgcggtgtttttttaggagcgcgcgcgtttttttttttgagtttttttttggaagtagcgattttcgaggtaaattaaatatttttgggtagggggaggcgggttgttaagttttaacgttgtacggggttttttttttttcgttatngtttttattttttaatcgttttagtcgttattagtcgtttaaatattagtttagtcgtagagatcgcggcgttgcggttgttgttgttgttgttgttgttgttgttgttgttgtcgtcgttcgcgggcgcgttttttgtagtttttattcgggtttatttcggcgggtggagaaagtggtttttttatgcgaaacgatatcgggtagttattgtagttggggatcggtcggagggatagatttatttttgtttttcgttttaggcggttggggaggaggggaggggataagggcgagaggggatgggggaggtttgggaagggttcggggaagacgtttgtttttcgggaggcgttgcgttgtagttattttttttttttttttttttttttttttttttcggagagttgtcgagagttttaattaaaataagcggcggcgtttggttttgcgcgtcggtttttttcgatcgcgcggcggttttattcggaggagatgaatacgtgacggagtttcgcgttcggtagtcgggtagcggcgtcgggacgtttcgttcgggtttttatatttcgggtcgagcgacgcgcgttcggttttttcggttattaagcgtattggagaagaggcggagtattacggcgagcgataaggataacgcgtttggatatcgataatttcgtttaagaagttaattttaagtttgaaattacggaagagttagagtttatgaagagtttttataaaataataataagtaagaatattttttaagttgagaaagtattaatttagtataatttgaattggaattcgttaagatgtgttgtaattgatggtgataaaaataaatgaagattagaaaaaggtttagttgaataaatttataaagtttgtgaaagtatagttatttaaagttatggtattttattttattatttattaatagggaaaataatttattatgtattattgaattagtagggaaaatattaatttattatgtattattgaattagtaatgttattagtgaattttatttatttttatagatttaattattataagttttgtaaattttgattagaaatggaaataaaatttggatttgttttatgatatagaagtttaatggtttagtggttatagagttttattgtgatttttttgagttcgaggttataaacgaaattttttgaataaaaagaaatgtttttaattattattatagttttggaaattaaaatttgttgtaaatttgatagttttttaatgaatntgatttaaaagttaaggtaaagtagtgtttacgtgagaaaatattgtaataaagttattttgataatattgttttaattataagtaataatggttttatatattttttgtgttgttaaatgttaaaataaaaagatttttttttatatataaatttgtaatagatatattttgtaagtttaaattatagtttttgtagtgttttttagattttattgtaagtgtaaaggaaatttttatattttaaaatttatttaattatgtaattgaggagtttttatttaattttaaattggaagtggttaatttgtaatgtaattgtatattaaatagtaaatattaagaaaagttttgggaaaaaaaataaaataaaataatgttttttgttaataattatagttgtattgagagaattttattagtgttttttatataatgaatatgtttattaagattatatataattggtagtaatgatttatgataatagtggttggtatttgattgattagttaagattttaagttattgatttataaatagttttttttatatgtttagttgtttatagttatcgtttatagagtttatttttagcgggtattttatttaattttatttagtttttaagaaatatattaaggaggtttttttttaaaaattgagttaaattttatttttaaataggtaatttattatttgattattattttaaaaagattagaatttttatgtttaaagaatagatgtataaaaataattttaatgatttattttataaaaatattaataagttgaataaaaagtaaaattttgtgaaaagagaattttttaaattttgataatttaaaagttattattataggttttatgattatataaattaaattgtaatttgtatttatatcgattattttaataaggattttatttgagtttttaataggtgagttaaaggtttgttgggattagttaggagttaatatatataaatgtaaaatttatgtgaaaatggtaaaaggtgatatttatgattatgaagatattagagttatatttattatttttaaatatgaatgaattattgaagataatttggttatagatttttgagattgtgtagaaataggagatagatgagataatggtaatggttatagttttaaagtatggtataaaaattaatttttttattttaatgttattttttttttacgtatttttattatttgtataatttttatgggttataatttatttaagagttttatttttttatttttaaggattatatagtatgtaataatgttttgtgttttatagaatatgtagaataatgaaaaatatttaatttaattatgtaattaatattgaataaatttattttttattatttaaattataaaatataaattgaaagtgaaagaagataatataagtagaaaataaaatataataaatgatatttggtttatttagggaagaaaatatggttttattaagttaattatagtaattataaagttatttgtgtttttgaaatatatagtgttttggatttggaataatttttttaaaggtagagtttgtagtgagtcgagatagtattattatattttagtttgggcgatagagcgagattttattttaaaaaaaaaaaaaaataaaaaattatattatggaattttgattaagttttaggaggggaaaaaaggatataaaaaggaaatttatggtatatttgaaaagataaaaatgtatgttaatgaaatgattaaattatatatataaaataaaaagtaagaaaagtttattttttagtatgattagagaaagttaatatatttattaaataaatttatatatatatattatatatgtattatttatatatataggtttttattaattttaaaaaattggaataaaataaatttgatattaattattgagataggtaaaagaatgttttgttttatttttttaaaatgtttatatgtatgttttaatttttagattttgtgaatatggtattttatgtggtaaaagggggtttggagatgtgattaaattaagaaacgtgggattattttggatttattcggtagattggatataattataagggtttttattagggaaagaaagaggtaggaggatgaaagatgtgattatagtagtaaaggttgagtgatgtgattgttggttggtaggggttataaattaaggaatgagggtagtatttagaagtttgaaagggtaaggaaatagattgttttttaaagtttttagaaagaaatatagttttgtttatattttgattttagtttagtgagatttattttggatttttgatttttagaattgtaagataataaatttgtatggtttgaagttattaaatttggggtaattgatatggtagttataagaaattaatataattatattaagtaaattttatttagtttttaatattttagaattttgtagttttttaagatcggtatgtgagaattaattattagtgaattgtaggtaagtagatatgttggttattgaggtttttttatttagaaggttgaataagttagtttttattatagaatttttaaattttttttatagtttggaattagtatattaaaaaaatatgttaatatagaattataattatatataaatatgaaataatttggtttagtattttttaatttttttaaaagttttaatgttatttaattatattatgtaaatattttattgtgttagtaattttatagatggaatttttgtttgagttaagatttattggagtttaaaatttaggttttttttatttttttttgttggtttatattagaataaattttaaaatgaagtttgaataagaataaggtttaagaaattaaattgatttaatattgaatatgttggttgtagtgaagaagagaaaaagtatattgggtnaaaattaaagaaatttaaataaagtttggagtttagttaataatgtattaatattgttttattgtttttttttatttgttaattttatttatatatatataaaaaaaaattttttttgaagatagggttttgttttgttttttaggttggaatattatggtattattatagtttattgtaattttaaatttttgtttgttataggagtaaatagtagaaattttttatgggttatagattgagtttttttttgtattttataatttttttaaaaatttaaaatttttttgaaataaaattttatttaaaaaataggtatgaatattagatgaaaattataattaagttttatataatttaaaaaagagataattttaatgttatttaaaatattttatattgtaaagaattttttttattttatttatgaatgtatataattttaatattaaaatatgtttaagaatttattaaaaaagaataatataattaatttttattataaatgtgtatttaataaataaaatgaaatattagtaattagaatttagtaatgtttttgtatgataatatattaagattaaataagtaaattttttaattgtttggataatttagttttagaaaattattatataattttttatattaataaattattaaagtattgttattattagtaaatatgttagtattattattttaattataaattttgtttgtgaaatatattt

SEQ ID NO: 1049 - DNA, 6106 bp, Artificial Sequence
  chemically treated genomic DNA (Homo sapiens)
tttattgagtattaattttgtgttaggttttattttaggaattgtgagtgaaagaagttaatgagatatgttaatttggaagtttttaagattttttagaagagagatagatatgttttaaacgtagtttagtataaggattagaaatttgtttaaattagttttagagaaaaagagaaattattattaggttggtttaaaaataattgtgggttttgttattgaaagtaatagaatgatatatagatattttatggatgtaaatttaggaagaatagttagattttatataatggtaaataaaattaaaagatttagaataattttttttcgtgtttttttttttttttgtttgtttgttttatgtatgtatattttagttttttggttttttatatttgtttttgtttttgataaatggtgtagatggttttttttatatttattgaagaaaatgaatgggttgggtataattttaatattttgggaaggtggggtaggaggattgtttgaggttaagagttttagattagttttggtaatatagtgagattttatttttataaaaagaaaaattaaaaaattagataggtgtggtggtgtatgtttgtttagttattcgggaggttgaggtagtaggattatttgagtttaggagtttgaggttgaaacgaattatgaatattattgtattttagtttaggtagtataaagttttattttaaaaaaaaaaaaaaaaaaaaaaaggcgggggggaaaaaagaaagaaaatggttgtataaagtgaatataaatttttattttatgtgattagtaaagattttagaatttgtatattatgaatgtaaatttttaggagattgatcgagtttggttaggtgtttggtttagcgataaggaggtaggattatgtgatttagtgatttttagaaggggattatggaagattttgagaaagttttattggtagagttggtaaatagttttgtatgtttgttataagtatgaaaataagtaaggttagttaatcgtagttgtgttagaatcgaaatatgaatatgatttattagtgtattgatgggtttaggaagttaggaaatttagaattattttatttgttttgtttgtgtttaagttaggagtgttttttttattttggttattatgtattttagttagtgtttagagatttgtgtgtgagttaagtttaatggattttaagttttatttatttattttatggatttattgagtaatatttgagaagttattggttattttattttaaaattattaggatttatttagaagtttatatttattattttttttaggtttagggagaagaatgtggaattgttaggaaatttattttaatgtattataataattattaatatttattagaaatttatttattaggtataggattagatttttataataaaaatgtataagattttagagatttagtatttaaatgagaaggtagaatatatatatataatttaataatatattattttgtaatatatataaaagaaagtttatttgggggaaaaaataaaaataaaaaaaaaaagttagaggaaattagagttaagaaagaagaatgattagtttttagtgaagaaaatgggaaaggttgggttaataatatagaatttgattggagttttgaagtagaatttgaaataatggaagaaaaaaagaaagttattttaagtagaaaaataaggaattgataatgaagaatgggaaaggtaggttagtgaattcgtgaatttggtttaaatatagtgtgtaagagggaaagatagttacggagtttatagaggtgagttggagttaaatcgtgattttaaattttagggtattttgaatgttttgaagatatttaatgatttttagtagattagttttgtatttttggatattgtgataataggtataaagatgaattggaataggagagaaggaagtatagagagattatatgggagtttgttattatggtgaaagattaaaagggtttgaattaaagagagattagtagtggaatagaaaataggagatggtatagaaaattttagtagggtgtaaagatagaattggaatgggatgttagtagggggttggtggtgtatttggggaagaaagtagaggtttttggtttgggtgattgtttatatgaaaacgggataaataaaggagggtagggtatgacgatataatagattagaaggaaatattggggaaatttatttgagtcgtgttttttaataaaattttgttttgagttaaggaaaagaaaaagaggggaaggttttattttatttttgagtgttttttggagtagggtttttgggttttttaagatttttttaagtggttagtgaagttaaaattatttttataataatattgagacgttattgcgttttttattgtgttgatatttgtttttatggtgtaagaataaggatggggattggtggttattgtattttttattattgggtatttataggaagagaaagggagagggatacggagaggttagtagattaatgaattttaatgttacggaataggaaataattattgatatggttttagattttatattgtaattttaagaaattattatttgttgagttttggtgtagtattaggggattatttagaattattttttgtttttttaagtttatatttgtgtaatattagattaattaatataattttattaaaattatatgtcgtaatagattggatgtagaagtagatttgagaatttaaatgtttgtttttaagttagatatttaaaatattagtaaaaatgtaaagtaatgttatttttttttcggatttttttatttggagaaatatagttattttttataaaatgtatattatttatgtttatatataataggatttttgttaaaggatttattgagtaaagggtttttgagattaaagagtttgagaagttttagtttaattttttatattttttgttttgaatgtggtgttttttataattgtaattaggtaggagagtattttggaaggggtttttaaattattttgttttaggaatattttatttttttaaaattaatgtgaggtaggagtttgttttttgtttttaaaagttttgtttggttttggaaaatcgtagtttttgatttattttgtattttatgatagtgtaatgttaatttgtttagttttgagaataaaaattaagaaggatgtatgttatttttttttattttagagataaaatataaatttttgttttatattaaaggaagtgttttgttttttaaatataggtttgttttaaatatttatttatattttagtgagttagaaggaaatagatagatatttatttttttgaaatttggttgattttttttaaaaagtttgtaaggagcgttaaaatcgtgttatcggttagtgagtagttatttaagagtttttaggtgatagtcggagttttagtaagtaggtgagtattttagataatttagaaaaaaatgtttttaggtgtttgttaaggtgagtaagtgtagttagtaagtgattgataagaaaataggaaagagtttgggattatataatttgggtttaaagggtattagttataagttattagtagtaatatttgatgtatattaatttaatattttaataatgtgatatattagttttatttatagtaaagagaagagtttgatttttatgaattattaagttttttttattttgagttattttgttttttagaggtagtattttaggtattttatttagtttatagtagtattttatgaagatttggaatgatgataataatgatgattattagatttataattttttaagtttgatttatgaaaatagttcgtttttttataaaagtagttattggaagaattttggttttagtaatgtgttggaaatttgtggttaaatttttggataaaatataagatttagataagaaaaattaatattttattttttaggtttttaattaaaaatttcggatatagaatgttttttttttagatgtgagattgaaataatggaagaaaatggttatagtttatgttatggtgtaatgtagatagggagagttataagtgtatgtatgggtttttagttttttttttggttttgaagttaattttttaaatttagttattaaattagtttttaattatttcggaggagaggaagtaatgatgatttttttttttttgtttttttgttatatatatatatatatatatagtttttgtagtaggtattgtttaaatattattttggataattataatttgtgagtagatttttttttttgatgagttagtttttaatttggttattttgcgtttatttttgtttttttttttatttatttaggaaaaatagagaaagggacgtatcgcgtagtttttaggtattgtggtttagggttagtgttttcggtattcgttgttaggagtcgggcgttgttaagggttgcggaggggttacgttttttcggggattggggtattttttgcgtgttggcgataggttgcgggggcggagtggtgttagggcgggcgttcgttcgtcggatatgtttattcgtttcgtttagggtaggaaagtttgttagggcgttatttttatttttatcgtttttaggttgtcggggttgggtcgttgtacgggagttaaggtgcggtgtttcgcgtgtggacgagtcgaggtgtagttcgcggggtcgtagggtcggggtggggcggggcgcggtcggagtagattcggtgtttgcggaattaggaggggcgggttggggcgggttttcggcgttgtaggagttgtttagaaatttttttttgtttttatcgggcgggggagagaagttttttgatagtttttagagtgtgtaggttttcgtattttcggttaagggaattttttgtaaatttttgtaaatttagcgtaattacggtttttcggttagatttaggatggggttagaacggataggggtcgcgtcgttgtcgttgttgttggtgttagcgtttagttaaggtaagcggggatttcgttttgtatcggttgtaggagggattcgcgcggttttttggggttcgttggagggattgggcggaattagggagcgagtttcgtgtgttttttcggattttacgtggattcgggtttttagttattaggatttgtttggaaagagatattttttcgttttttttttgttattttaggttttgcgtttttattaggcgcgtttcgttttgtttgttaagtattttttaaagttattttagtgagtgttttgttttaggtatatatacgtatatatatatatatatatatagatagatacgtacgtatttaagtatggatagtgtggggattcgcgggtgttttggagatcgcgagttttgtagtttaattttttttggtttagataggtgtcgcgtttgttagagattagggaaattcggaatttattgttgatggcggtttgtagttttttagcgcggtgtttgttggttttgtagaagtttgcgagttttaaaatgtttattttttaatttaaggatgtgaataatgtttttattttttatttgaggacgaagcgttgtgttttttttcggggggatttggaataaattaagcgttatttaaatatttggtagaggggaattttttttttttttttgttttttttttattgttgtaatattgtttattcgacgaatgtaaatttaggttaggaaaagttttttttatttttggattttagatgtcgtaatgagagaataagtcggagtagtcgttttaattgtagtgttgtggtagtggggttcgtttattttttgagtttttttatattaagaggaggaaataaggttggggtggagagtttttgtgggattatcgtttgagtattttttttttgattattaggtagagttagagtgtggttaaatttaagaattttagtttatttggagggagaaggagatacgtttgtataatgtagtttgaatagcgattaaaataaaat

SEQ ID NO: 1050 - DNA, 6106 bp, Artificial Sequence
  chemically treated genomic DNA (Homo sapiens)
gttttgttttgatcgttgtttaaattatattatataaacgtgtttttttttttttttaaataaattaaaatttttaaatttgattatattttagttttgtttaatggttagggaaaaagtatttaggcgatggttttataaaagttttttattttagttttattttttttttttagtgtaaaagaatttaggaggtgggcgggttttattgttatagtattatagttagagcggttgtttcggtttatttttttattgcggtatttaggatttagaagtgaaaagaattttttttagtttaagtttatattcgtcgaatagataatgttataataataagaggaaggtagaagggaaggaagaatttttttttgttaagtatttaagtggcgtttggtttattttaagttttttcgggaagaaatatagcgtttcgtttttaagtaagaaatagaggtattatttatatttttgggttgaaaaataagtattttggggttcgtaggtttttgtaaagttagtaagtatcgcgttggggagttgtaggtcgttattagtaatggatttcggatttttttggtttttggtaggcgcggtatttgtttgagttaggggaagttgggttgtaggattcgcggtttttaggatattcgcggatttttatattgtttatgtttgagtgcgtgcgtgtttgtttgtgtgtgtgtgtgtgtgtgtgcgtgtgtgtatttaaaataaagtatttattgagatgattttggagggtgtttaatagatagggcgagacgcgtttaatggggacgtaaggtttgggatagtaggaagggaacgaagaagtatttttttttaagtaggttttggtggttgggagttcgagtttacgtggaattcgagggaatatacggagttcgttttttagtttcgtttaatttttttagcgagttttaggaagtcgcgcgggttttttttgtagtcgatgtagagcgaaattttcgtttattttgattgagcgttaatattagtagtagcggtagcggcgcggtttttgttcgttttggttttattttgggtttgatcgggggatcgtagttgcgttgggtttgtagaggtttgtagaggatttttttggtcgaggatacgagaatttgtatattttagaagttgttagagggtttttttttttcgttcggtgagagtagggaaaagtttttgggtagtttttgtagcgtcgagggttcgttttagttcgttttttttgatttcgtaaatatcggatttgtttcggtcgcgtttcgttttatttcggttttgcggtttcgcgggttgtatttcggttcgtttatacgcggggtatcgtattttggttttcgtatagcggtttagtttcggtagtttggaggcggtggggatggggatggcgttttggtaggtttttttgttttggacgggacgggtgggtatattcgacgggcgagcgttcgttttggtattatttcgttttcgtagtttgtcgttagtacgtaggagatgttttagttttcgggagaacgtggttttttcgtagtttttggtagcgttcggtttttggtagcgggtgtcgagggtattagttttaaattatagtgtttaggggttgcgcggtgcgtttttttttttgttttttttaagtgggtggagaaagggataaaaataagcgtagaatgattaggttagaaattaatttattaggaaagaagatttgtttataagttatgattatttaaggtgatatttaagtaatatttgttgtaagagttgtgtgtgtgtgtgtgtgtgtgatagagagatagagagagagaaattattattattttttttttttcgagataattaagagttgatttaatgattgagtttaggagattaattttaaggttagagaaaaggttgagagtttatatatgtatttgtgattttttttgtttatattatattatgatatagattgtgattatttttttttattattttagttttatatttggaaagagaatattttatattcgagatttttagttaaaaatttaagaaataggatattaattttttttgtttgaattttatgttttatttaaaagtttggttataaatttttagtatattgttgaaattagaatttttttagtgattatttttgtgaaggaacgaattgtttttataaattaagtttaaggagttatgagtttaataattattattattgttattattttagatttttatggaatgttattatgagttgaatgggatgtttgagatattgtttttaggaagtaaagtggtttaaggtgggaaggatttaataatttataaaaattaagtttttttttttattatagatagggttgatgtgttatattgttaaagtattaaattggtatgtattagatgttgttgttgatggtttatgattaatattttttgaatttaaattatatagttttaggtttttttttgtttttttattagttatttattggttgtatttatttattttgataaatatttgaaggtatttttttttgaattgtttggggtatttatttgtttattaaaatttcggttattatttgagagtttttaggtggttgtttattaatcggtgatacgattttgacgttttttatagattttttgaaggaagttagttaggttttagggagatgaatatttgtttgtttttttttgatttattgaaatgtgagtaagtgtttggaatagatttgtgtttgggaggtaggatattttttttaatgtgagataggaatttgtgttttatttttggggtggggggaaataatatgtattttttttggtttttgtttttagaattggataaattaatattatattgttatgaagtgtagaataagttaggagttacgattttttagagttaggtaaaatttttagaaataaagaataaatttttgttttatattaattttaagaggataaagtgtttttgagataaagtagtttgagaattttttttagggtgtttttttgtttagttgtagttgtgagggatattatatttagagtaggaaatatggaaggttaagttggggttttttaaattttttggttttaagagttttttatttagtaagttttttaataaaaattttattatgtgtgaatataaataatgtatattttatgaaaaataattatatttttttaaatgaaagaattcgggagaagagtggtattgttttatatttttgttaatattttaaatatttggtttaaaaatagatatttggatttttagatttgtttttgtatttaatttgttacggtatgtagttttggtgaaattatattgattaatttggtgttatatagatatggatttagaaaaataggagataattttggataattttttgatattatattaaaatttaataagtggtagttttttaaagttgtaatgtggaatttgaaattatattaatggttattttttatttcgtggtattaaaatttattgatttgttggttttttcgtgtttttttttttttttttttttgtgagtgtttagtgatgaagaatataatgattattagtttttatttttgtttttgtattatgagggtaaatgttaatatagtgaaaaacgtagtaacgttttagtattgttatgaaaatagttttgattttattggttatttgaaaggattttgagagatttagagattttattttaaaaagtatttaggggtgaagtgaggttttttttttttttttttttttttagtttaagatagagttttgttggggaatacggtttagataagtttttttagtgtttttttttgatttgttgtatcgttatgttttgtttttttttgtttatttcgtttttatatagataattatttaaattagaaatttttgtttttttttttaggtgtattattagttttttgttaatattttattttaattttgtttttatattttattagggttttttgtgttattttttattttttgttttattgttaatttttttttggtttaaatttttttgattttttattatggtgataaatttttatataatttttttgtgttttttttttttttgttttagtttatttttatatttgttgttatagtatttaaaaatgtaggattgatttgttgaaaattattagatgtttttaggatatttaaagtattttagggtttaaggttacgatttggttttaatttatttttgtgggtttcgtggttattttttttttttgtatattatgtttaggttaaatttacgagtttattggtttgttttttttattttttattgttaattttttatttttttatttagaatagtttttttttttttttttattgttttaaattttattttaaggttttagttaaattttatattattagtttagttttttttattttttttattgagaattaattattttttttttttggttttggttttttttagttttttttttttgtttttgtttttttttttaaataaatttttttttgtatgtattatagagtaatatattattgagttatatgtgtatattttatttttttatttaaatgttgggtttttgaaattttatatatttttgttataagagtttagttttatatttagtaaataaatttttaataaatattaatagttattataatatattgaaatgagttttttaataattttatatttttttttttagatttgaaaagggtggtaaatatgaatttttaggtaagttttagtaattttgaagtgaagtaattagtggttttttaaatgttatttagtgaatttatgggatgagtgagtaaagtttagaatttattgagtttgatttatatataagtttttaagtattggttggggtgtataatggttaaaataaaagagatatttttaatttaaatataaataaaataaataaaataattttagattttttagttttttggatttattaatatattgatgaattatatttatatttcgattttagtataattacggttgattggttttatttgtttttatgtttgtggtagatatgtaaagttatttgttagttttgttaatagggtttttttagagttttttatgatttttttttagaagttattgagttatataattttgtttttttgtcgttaagttaaatatttgattaagttcgattaattttttagggatttatatttatggtatatagattttagaatttttgttgattatatgaaatggaaatttgtgtttattttgtataattatttttttttttttttttttttcgtttttttttttttttttttttttttgagatggggttttgtgttgtttaggttagagtgtagtggtatttatagttcgttttagttttaaatttttgggtttaagtgattttgttattttagtttttcgagtagttgggtaggtatgtattattatatttgtttaattttttaatttttttttttatagagatggggttttattgtgttgttaaggttggtttggaatttttggttttaagtaatttttttgttttatttttttaaagtgttggaattatgtttagtttatttattttttttaatgagtgtagaaaaagttatttgtattatttattaaaaatagagatagatatgagagattaagaaattgaggtgtgtatgtatgagatagatagatagagaaagagagagatacggagagagattgttttaggttttttaattttgtttgttattgtgtgagatttgattgttttttttgggtttatatttatgaaatatttgtgtattattttattatttttagtggtaaaatttataattatttttggattaatttaataatagtttttttttttttttgaagttaatttgagtaggtttttagtttttgtattagattacgtttaagatatatttgttttttttttgggaaattttaaggatttttaagttaatatgttttattaattttttttatttatagtttttaaaatagagtttgatatagagttgatgtttaatgaa

SEQ ID NO: 1051 - DNA, 8375 bp, Artificial Sequence
  chemically treated genomic DNA (Homo sapiens)
ttaatttgaatttggggttgagtatttagatttgtttatatttttaaaatagtaaagatttttatttagaaagaaatgatattagatttataaaaattagtcgggcgtagtggtatacgtttgtaattttagttattcgagaggttgaggtaggagaatcgtttgaatcgggaggttgtcgtgagttaagattatattattgtattttagtttgggtaatagcgtgagattttgtttgttttatatatatatatatatatatacgttagaaaatgaaaagtgaggttaggtgtggtggtttatgtttaattttagtattttggaaggttaaggtaggtggattatttgaggttaggagtttgagattagtttggttaatatggtgaaattttatttttattaaaaatttaaaaaaaaaaaaaaaattggttaggtatggtggtgtatgtttgtaattgtagttatttaagaggttgaggtaggagaatcgtttgaacgtgggaagtggaggttgtagtgagttaagattatgttattgtattttagtttgagtgatagagtgagatttcgttttaaaaaaaaaaaaaaaaaaaaaaaaatgggcggggtacggtggtttaagtttgtaattttagtattgaggtcgaggtaggcgaattacgaggttaggagagatcgagattagtttgattaatatggtgaagtttcgtttttattaaaaatataaaaattagttaggtatgatggcgtgcgtttataattttagttatttaagaggttgagataggagaattatttgaattcgggaggtagaggttttagtgagttaagattatgttattgtattttagtttgggtgatagagtgagacgttattttaaaaataaaaaaaaagtgattttttgagagtaggggaggtgataagttaaagaggtagattggattgtatagagtgttatgtgaagatacgtgtagttaattgttttgttttgataaggttttagttattttggtttgaaatatgaaagtattttttttttaaatttttgatgattaatttaggtttcgttagttatttttatttttatttgttaaagatagttttatttatttttattaatttatattttaatttttgtagtatttttttgggtggtttttttgattagaatttaattttttgttttgtgtaagtttattggttttttagaatttgaatgtagtttattttgtatttattgttttttagtaaaattgtaatttttgagagaatagggagtgatttttatatttttttatcgtagtttttaacgtattttatattgaatatatagtaaatattttgattatatgtttaagaatatgagtaaagtggttaggtatagtgttttatgtttataattttagtattttgggaggttaaggtaggaggattttttgagtttagaaattcgaggttaatttgggtaatatagtaagattttatttttataaaataatttaaaaattagttgggtatggtggtataagtttgtggttttagttatttatgaagttgatgtgggaggattgtttgagtttaggggttaagtttgtagtgagttatgtttaggttattgtattatagtttgggtgatagagtaagattttgttttaaaaataaaaagaatatgagttaagtaaaatattattaattgaggattgtgtattagaattgagttaaaaaaaatttaaaaatgtgttttttggtttttggttttttgggttttttgagatggaattttgtttttgttgtttaggttggagtgtgatggtacgatttcggttgatcgtaattttcgttttttaggtttaagtaatttttttttagttttttaagtagttgagattataggtgtgtattattatattcggttaatttttgtatttttagtagagatagggttttgttatgttggttaggttgattttaaatttttggttttaagcgattcgtttattttggttttttaaagtgttgggagattataggtgtgagttattatgtttagtaaaaaaaaaaaaaaaaaaaaaaaaaattgttttttaggtatagttttatttttgtttaggttggagtggagtggtaaaatcgtagtgtattgtaatttaaaattcgtgggtttaagtgatttttttgtttcggtttttttagtagttggaattataggtgtgtattatcgtgtttggttaattttaatttttttgtagagatagggttttattatgttgtttaggttggttttaaatatttggttttaagtaatttttattttggttttttaaagtgttagggttataggtatgagttattaaatttggtgtaaaaaatttttataattttatttttttttttttttttttttttttttttttttgatggagttttattttgtcgtttaggttggagtgtagtggtatgattttagtttattgttattttcgttttataggtttaagtaatttttttgttttagttttttaagtagttgggattatagatatatattattacgtttagttaatttttgtatttttagtagagacggggttttattaggttggttaggttggttttaaatttttgattttgtggtttattcgtttgggttttttaaagtgttgggattataggtatgagttattatgttcggttaaaatttttatgattttttattttttatggattaaagtttagattttttaatatggtatttaaggatttttagtaatttgaatttttaagttttatttttttgcgttttagtttaattttttaagtattttgttatgttgagttaattatttgtttttttttatttttgtgtttttttgttgtttttatgtattttttatgtttaaaaatttttttattttttgataaaaggtaatttgaatatgagtttaagtgtaatttatgtttgaattttagttttgttatttgttggttgcgtaaatatgggtaatttatttaaaatttttgtgttatagttttgtgtttataaaatgggtataatagtatttattttttagggttgttatgagtaataatgatatacgattttgataatttgtgtattttttaaggtatgtttgattgtttttttgttgtagttatgtgtgtttatgttttaattttttttgggttgtttgttaagtttttttgatggttatttttggagtttttaaaatattttattttttataattttaaaatagagacgaggttttattgtattgtttaggttggttttaaatgtttgagtttaagttatttttttgttttagttttttaaagtgttgggattataggtatgagttattatatttggtttaatggttatttttgtattttttattaatatagtgttttgaatagagtaaatatttattgaaaatttgagtgaaatgtaagtttatatttggttttatagaatatattagtaatatagtaattatttatttgaggatagtgggaggatagaaggtaagtagaggattgggttaagtattcgtttaagtaaatatattaattatacgttttttatgtatttgatattgggaatttagtaatgaagaaggtttagattaaagtttaggtttttagttttttgttttataaaggataagatttttaattttaggttgaggtagtaaattacgaggggattttaaaatggtatagggtggttgagtaggatacggtaatggttaagtttgattagaaaatagaaattaaaaggaaaatgtggttatggttatttttagcggattttttaaatttttttgagaatttgtttttttgggaaggtatgagtgttagtaagatttggtattttttttttttcgtttatcgagagaaaatgattttgtttttttgtttaaaatttatttttttattttgttattttatgtttgtattttttatttttagtgtgtgtttttatttagttttttagtaatatacgtattatatattggatttttgggtagtttttagggttgtagtaaggagttttgtttttaagggatttatttatataattttgtgaacggattaagagtaaatagtgtgtttaatgttgtgtttacgtgtgttagtttacgcggttagtttgaggagttagggaaggtttttttaggtaaagtttttaattagaattaagttttaatggttaaagagttttattatttaaaaaggattgagggtttatttttaattgaatagttaatgtataattttagaaattgtgagttaaaattttttggaataattttattttatttttaatttttttgttatttagattaaggtttatttattattttgtttttagtattgattgtattgttgtggttatattaaagtttggtttaagacggaggaggagtgaggaagttgttgtattaatatggttggttgaggtcgtttaaggttttagaaggaggaagtgggtaaatgttatatttaaaaagatatagaagttttaggttttatcgggggtagtagttttttttttttttttcgatttgtggttaagttataaagtattatagttgtatagttagatgggggaagggaggagattagaattgtaggttagagtagataagtatggattagtttataattacgttattttaagtagaaagtgatggtggtttggattagtacggtggtagtagagatggggtaaagatttaagagatattattgataggtagaattaataggatatggtaataaattatttttaggaaaggggaggagttatggtttttagttatgagtatttattttttgggtggttttatttattttttggtaattttagttattatgagtttaggggttatagttttttgttttgttcgttgtttagtaagttatttggggttttagtttgataagaaaagattttttgtggaggaatttgaagggaaggaggaggagttggtttatttttgtttgggaggttgtggaagaaggaagatggttagagttttgtgtttattgtaagttttttggtttttggagtgggtgttgttgtttttgggattttgtgttgtttttttagtttgggttttgaatttggatttagtgtagtttattttttatgtaggttttaatggtagttagtttggatttttattggatttttataaggatagttatgggaggtgagtcgtaagggaagttggggtattgggagagagtaggatttttttttattattgtttttgggggtttcgagttttttatttgcgatagtagttgagtaaggtgatttgtggggtttatttaggttgattttttgttaagaatgttggggtttaggggattggtttaggtgaaggtataagggtagggtatatgtgggttgatgggtattgaaaattatagtaagaataaagggaagataagagttgatgttttattttttttttaagggttagttgtatgaattattttatttttaatattttgaaatgtagagaggaggtcgggcgcggtggtttatgtttgtaattttagtattttgggaggtcgaggcgggtagattatttgaggtcgagaattcgagattagtttgattaatatggagaaatttcgtttttattaaaaatataaaaaaaaaaaaaaaaaagagattaggtatagtggtttatatttgtaattttagtattttgggaggtagaggtgggtagattatgaggttaggagtttaagattagtttggttaatatggtgaaattttgtttttattaaaaatataaaaattagttgagcgtggtggtatatttttgtagttttagttattcgggaggttgaggtaggagaattatttgaattcgggaggtggaggttgtagtgagttgagattatgttattgtattttagtttgggtgatagagtgatatttcgttttaaaaaaaaaaaaattagtcgggcgtggtgtcgtatgtttgtaattttagttattcgggaggttgaggtaggagaatcgtttgaatttgagaggtagaggttgtggtgagtcgagattatgttattgtattttagtttgggtaacgagagcgaaattttgttttaaaaaaaaaaaaaaaaaaaaaagaaaggaaatgtggagaggagtatatgttttaaattgatttgtagaattaaagttgtttattttttcgtattttgtatttttgttttattttttttatttttattaatattataaatatttgaaaagaagtaataggttattaatgattagtattgattaggttttagaattaagagtgttaagattagagttttggttttttttttttatagcgtgtattttgagttattattgtgagagatattgtgtttattagttttagggagtggtaatgggtggtaatggtagatagtttttaagtgttagttatttaggggattttttttgttgaagagagttagtttattttaagtttttttttaagatggtttatatttagtgtttgattaatgagaagtgggtgagtggggagagtggaggtaggtgtgggggaggtatttgataagggtttagtttttttttattaattttgataattttttttttttttttttttttttttttttttttttttttttttttttgagatggggtttcgtttttgttgtttaggttggagtgtaatggtataattattggtttatcgtaatttttgtttttcgggtttaagcgatttttttgttatagtttttcgcgtagttgggattataggtatgtgttattatattcggttaattttgtatttttagtagagacgaggtttttttatgttggttagggtggtttcgaatttttaattttaggtgatttattcgttttggttttttaaagtgttgggattataggttttagttattatgtttagatttttttttttttttttttttgagatggagtttcgttttcgttgtttaggttggagtgtaatggggtgatttcggtttattgtaatttttgttttttgggtttaaacgatttttttgttttagtttttcgagtagttgggattataggtgtatgttattatgttcggttaatttttgtatttttagtagagatagggttttattatgttggttaggttggttttaaatttttgattttaggtgattagtttgtttcggttttttaaagtattgggattataggcgtgagttattatattcggttaattttgataattttgaagggttattttagttttaaagttcgtggggtgttggcgaatgttgttattgggtttgaattagtttaatttttttttgtgtttatttttgttgatttttttttttataagtagtgattttattggtattatttaaatattttgtaggttaaaaaaatattatgggttagatatagaggtttacgtttgtaattttttggttttttaaagtgttgggattataggtgtgagttattatgtttagtttataaaaaaattttttttaattagttaggtatggtgttgtatattcgtagttttagttattagggtggttgaggggagaggattgtttgagttttggagattaaggttatagtgagttgtgattatgttgttgtattttagttgggtaatagaatgagattttgttttaaaataataaaattattttttaaaattatagtattgttttaagagcgtttgttatgtatttggttgggattatgttaatcgttattcgtatttattatatttatttttgatagtattgattggttgtgaaaattagttattggttatgaaattggtatttttattttatatatggtagaattgtgatttaaatttagatttgttagggtttttttattagtatatatattttagttttattttagaggtattcgttatttttttttattaaaattagtttttaagaggggatttggtaatagtttaggtaggtattttagggagtatgtgaatcgttggtttttgttgcgggtggaaggatggaggtgttgtatagagtttaggttttttttagtaaagattttaaatttttggtgtttaaattaaattaaatggttatagttttagttttatttttaatttattgggttattttagttacgtgattgttttcgttgagagtcggttttattgtttataagatgaagaagtatattacggtggtttgtgaggtgttattgaggaaagatggtttagtgtttttatgttatatggtttttcgggtagtgtttttagcgtcggcgttagggtttgggatacgttggaatttgcgcggcgtttatttagtttttttatgtaga

SEQ ID NO: 1052 - DNA, 8375 bp, Artificial Sequence
  chemically treated genomic DNA (Homo sapiens)
tttgtataggaaagttgggtgagcgtcgcgtagattttagcgtattttaggttttggcgtcggcgttgggagtattgttcggaaggttatgtggtatgggggtattggattatttttttttaatgatattttatagattatcgtgatgtatttttttattttatggatagtgaaatcgatttttagcgagggtaattacgtggttaaagtaatttagtgagttgagagtagagttgggattataattatttggtttgatttgaatattaggggtttgagatttttgttgaaaaagatttaaattttgtataatatttttatttttttattcgtaataagaattagcggtttatatgttttttggaatgtttgtttagattgttattagatttttttttgagagttggttttaatgagggaaggtagcgggtatttttaaagtggggttggagtgtgtgtgttgataggaggattttagtagatttaggtttaaattataattttgttatatgtgaaataggaatattaattttataattaatgattggtttttataattagttaatgttgttaggagtaaatgtaataaatacgagtaacggttagtatggttttagttaaatatataataaacgtttttgaaataatgttataattttaaaaaataattttgttgttttgagatagggttttattttgttgtttagttggagtgtagtagtatgattatagtttattgtagttttgatttttagggtttaagtaattttttttttttagttattttagtagttgggattgcgggtgtgtaatattatgtttggttaattaaaaaaaatttttttataggttgggtatggtggtttatatttgtaattttagtattttgggaggttaagggattataggcgtgagtttttgtgtttggtttataatatttttttagtttgtaggatgtttaagtagtgttaatgggattattatttataggaggggaaattagtaggagtgggtataggaaggagttgagttgatttaggtttaatgatagtattcgttaatattttacgagttttggaattagaatgattttttaaaattgttagagttggtcgggtgtggtggtttacgtttgtaattttagtattttgggaggtcgaggtaggttgattatttgaggttaggagtttgagattagtttggttaatatagtgaaattttgtttttattaaaaatataaaaattagtcgggtatggtggtatgtatttgtaattttagttattcgggaggttgagataggagaatcgtttgaatttaggaggtagaggttgtagtgagtcgagattattttattgtattttagtttgggtaacgagagcgaaattttattttaaaaaaaaagaagaaaaaaagtttgggtatggtggttgaagtttgtaattttagtattttgggaggttaaggcgggtggattatttgaagttgggagttcgagattattttgattaatatggagaaatttcgtttttattaaaaatataaaattagtcgggtgtggtggtatatgtttgtaattttagttacgcgggaggttgtggtaggagaatcgtttgaattcgggaggtagaagttgcggtgagttagtgattgtgttattgtattttagtttgggtaataagagcgaaattttattttaaaaaaaaaaaaaaaaaaaaaaaaaaaagaagaagaagaaaaaaagaattgttagagttgatgaaagagggttggatttttattaaatgttttttttatatttgtttttattttttttatttatttattttttattgattagatattggatgtgggttattttgggaggggatttggagtgaattggttttttttagtagaggaaattttttaagtggttgatatttgaaggttatttgttattgttatttattgttattttttgaagttggtgggtatagtgttttttataatagtagtttagggtatacgttatgaagaggaggagttaagattttaattttggtatttttgattttgaagtttgattaatattaattattaatgatttattgtttttttttaaatatttataatgttgatggagatgagggaaatggaatagaaatgtaaggtgcgggagggtagataattttagttttgtaaattaatttaggatatgtgtttttttttatatttttttttttttttttttttttttttttttgagatagagtttcgttttcgttgtttaggttggagtgtaatggtatgatttcggtttattataatttttgttttttaggtttaaacgatttttttgttttagtttttcgagtagttgggattataagtatgcggtattacgttcggttaatttttttttttttgagacggagtgttattttgttatttaggttggagtgtagtggtatgattttagtttattgtaatttttatttttcgggtttaagtgatttttttattttagtttttcgagtagttgggattataggagtgtgttattacgtttagttaatttttgtatttttaatagagatagggttttattatattggttaggttggttttgaatttttgattttatgatttgtttatttttgttttttaaagtgttgggattgtaggtgtgagttattgtgtttggttttttttttttttttttttttgtatttttagtagagacggggtttttttatgttggttaggttggtttcgaattttcgattttaggtgatttgttcgtttcggttttttaaagtgttgggattataggtatgagttatcgcgttcggttttttttttgtattttaaggtgttgagggtggagtggtttatataattgatttttggggaaaaaataaagtattaatttttgttttttttttgtttttgttgtagtttttagtgtttattagtttatatgtgttttgtttttatatttttatttgagttagttttttggattttaatatttttgataagaaattaatttgaataggttttataagttattttgtttaattgttatcgtaaatgggaaattcgaagtttttagaagtagtgatggggaggggttttgtttttttttaatattttaattttttttacggtttattttttatggttgtttttgtggaagtttagtgaaaatttaaattggttgttattggggtttgtatagaaggtgagttgtattgggtttaggtttaaggtttaggttggaggggtagtataaggttttaagagtagtagtatttattttagaagttagagggtttgtagtggatataaagttttggttatttttttttttttataattttttaggtaggaatgggttagttttttttttttttttttagatttttttataggaagtttttttttattaaattggaattttaagtaatttgttgagtaacgggtagagtaaagggttatagtttttggatttatggtggttagaattgttaggaagtgggtgaggttatttagagggtggatgtttatggttgaaagttatgatttttttttttttttgagaatagtttattattatgttttattggttttgtttattaatgatgttttttgaatttttattttatttttattattatcgtgttagtttaagttattattattttttgtttgggatagcgtgattgtgaattggtttatatttgtttattttagtttatagttttaattttttttttttttttatttggttgtatagttgtggtgttttgtgatttggttataggtcggggaaggagaaggaagttgttgttttcgataaaatttgaggtttttgtatttttttggatatggtatttatttattttttttttttaggattttgggcggttttaattagttatattggtgtagtagtttttttatttttttttcgttttgagttaagttttagtgtggttatagtagtgtagttagtgttggggatagggtggtgaatggattttggtttaggtggtaaggagattggggataaagtggagttattttagggaattttgatttatagtttttgagattatgtattagttgtttagttgaaggtaggtttttaattttttttgggtgatggagttttttaattattaagatttgattttggttgggggttttgtttaggggagttttttttgattttttaggttggtcgcgtgggttaatatacgtaggtatagtattgagtatattgtttatttttggttcgtttataggattgtgtaaatgagttttttgggagtaaggttttttgttatagttttagagattatttaagagtttaatgtgtagtacgtgtattgttgaaagattggatggaaatatatattaaggatggaagatgtaaatatagggtgataaagtgaagggatgagttttgagtagaaaggtaaagttattttttttcggtaagcggaagaggaggagtgttaagttttattggtatttatgtttttttaaaaaagtaggtttttaggaagatttaagaggttcgttaggggtaattatagttatattttttttttgatttttattttttgattaaatttaattattgtcgtattttgtttaattattttgtattattttgaagttttttcgtaatttattattttagtttagagttaagaattttattttttataggataggaagttaaaagtttgaattttggtttgggttttttttattgttgagtttttagtgttaagtatatgggaggcgtgtaattaatgtatttgtttgaacgaatatttaatttagttttttatttattttttatttttttattgtttttaggtgagtgattgttgtattattggtgtattttgtgaggttaaatatgaatttatattttatttaagtttttaataagtatttattttgtttaaggtattgtgttgataaaggatataaagataattattaggttaggtatagtggtttatgtttgtaattttagtattttgggaggttgaggtaggaggatggtttgagtttaggtatttaagattagtttaggtaatatagtgagatttcgtttttattttaaaattataaaaaataaaatattttaaaaattttaaagatagttattaaggagatttaataaatagtttagaaagagttaagatatgaatatatataattgtagtagagagatagttaagtatgttttgaaaaatatatagattattaaagtcgtatattattgttatttataataattttaggaaataagtattattatgtttattttataaatataaaattgtggtataagagttttaggtaaattgtttatgtttacgtagttaatagatggtaaaattaagatttaaatatgggttgtatttgaatttatgtttaagttgttttttgttagagaatgaaagggtttttaggtatagagaatatatgagagtagtaaaggaatatagaggtagggaaggataagtagttgatttagtatagtagaatgtttaaagggttggattgaggcgtaagggggtaaagtttggggatttaaattattggaggtttttgaatgttatattaaggaatttgaattttaatttatgggggatggaaaattataaagattttagtcgggtatggtggtttatgtttgtaattttagtattttgggaggtttaggcgagtggattataaggttaggagtttgagattagtttggttaatttagtgaaatttcgtttttattaaaaatataaaaattagttgggcgtggtggtgtgtgtttgtaattttagttatttgggaggttgaggtaaaagaattgtttgaatttgtgaggcggaggtggtagtgagttaagattatgttattgtattttagtttgggcgatagagtgagattttattaaaaaagaaaaaaagaaagaaagaaaagaaaaataaaattataaagattttttatattaggtttggtggtttatgtttgtaattttagtattttgggaggttaagatgaggattgtttgaagttaggtgtttgggattagtttgggtaatatagtgagattttgtttttataaaaaaattaaaattagttaggtacggtagtgtatatttgtagttttagttattgaggaggtcgaggtaggagaattatttgagtttacgagttttaggttatagtgtattacgattttgttattttattttagtttgggtaagagtaagattatgtttaaaaaataattttttttttttttttttttttttttgttgggtatggtggtttatatttgtaattttttaatattttgggaggttaaggtgggcggatcgtttgaggttaggagtttgagattagtttggttaatatggtaaaattttgtttttattaaaaatataaaaattagtcgggtgtggtggtgtatatttataattttagttgtttgggaggttgaggaagaattgtttgaatttgggagacggaggttgcggttagtcgagatcgtgttattatattttagtttgggtaataagagtaaaattttattttaaaaaatttaaaaaattaaaaattaaaaaatatatttttgaattttttttggtttaattttgatgtataatttttagttaatgatattttatttggtttatattttttttatttttgagataggattttgttttgttatttaggttgtagtatagtgatttgaatatggtttattatagatttgatttttgggtttaagtagtttttttatattagttttatgaatagttgggattataggtttgtgttattatgtttagttaatttttaaattgttttgtagagatggggttttgttatgttatttaggttggtttcgaatttttgagtttaagagatttttttgttttggttttttaaagtattgggattataggtatgagatattgtgtttggttattttgtttatatttttgaatatataattaaaatgtttattatgtatttagtgtgagatacgttgggggttgcggtggggggatataagaattattttttgtttttttagagattataattttattgggaagtaatgaatataaaatgagttgtatttagattttgaaaagttagtaagtttatatagaataggaaattaggttttagttaggaaggttatttaggaaaatgttgtaaaaattgagatatgagttggtagaagtgagtgaagttgtttttggtaaataagaatggaaatggttgacgaggtttgaattagttattaagggtttgaagagggagtatttttatgttttaggttaaggtggttgaggttttattagaataaggtaattaattgtacgtatttttatataatattttatatagtttagtttgtttttttgatttgttattttttttgtttttagaaaattattttttttttgtttttgagatggcgttttattttgttatttaggttggaatgtagtggtatgattttggtttattggaatttttgtttttcgggtttaagtgatttttttgttttagttttttgaatagttgggattataggcgtacgttattatgtttggttaatttttgtatttttagtaaagacggggttttattatgttagttaggttggtttcgattttttttgatttcgtgattcgtttatttcggttttagtgttgggattataggtttgagttatcgtgtttcgtttatttttttttttttttttttttttttgagacggagttttattttattatttaggttggagtgtagtggtatgattttggtttattgtaatttttattttttacgtttaagcgatttttttattttagttttttgagtagttgtaattataggtatgtattattatgtttggttaattttttttttttttttaaatttttagtagagatggggttttattatgttggttaggttgattttaaatttttgattttaagtgatttatttgttttggttttttaaagtgttgggattagatatgagttattatatttggttttattttttattttttaacgtgtgtgtgtgtgtgtgtgtgtgagatagatagggttttacgttgttgtttaggttagagtgtagtggtgtgattttggtttacggtaatttttcggtttaagcgatttttttgttttagtttttcgagtaattgggattataggcgtgtgttattacgttcggttaatttttgtaggtttaatgttatttttttttgggtaaggatttttgttattttaggaatataggtagatttgagtatttaattttaggtttaagttga

SEQ ID NO: 1053 - DNA, 6713 bp, Artificial Sequence
  chemically treated genomic DNA (Homo sapiens)
tttatttattttttttagattttttagtttatttgcgtagaggtgtttatagtattttttttaaattttatttttaattgatatttttttttatttgttgagtaaaagaacgttatgtaaaagtaaaataaggattttttaaggattttaaagttaattattgggtgtgtagaatatagtaagataatataatttaaattgtattttttacgtatttttttttttgtatttttttatgaggatgtttaatataaaaaaaaaagatagttacggataattttagaggattgtttttttaagtattttaattgtattttttattgattatttaatatagttatttgatattagttgtgaatattttttttttttttttaattttgttttattatggtataatatatatataaaatgtattatttttattattttaagtgtaaagtttattggtaataattatatttatatatatatttttttttttatcgttttttatttatcgtttttttttttatagtaattattattttattttttatgtttatgagatttgttttttaagtttttatatatgagtgagggtatgtaatatttgtttttttgtgtttggtttagtttatttaatataattgtttttaggtttatttatgttgttgtaaatgataggattttaatttttttatggttgaattatattttattatgtatgtatgtttttttatttatttatttattgatgggtatttaggttgattttatattttagttattgtgaatagtgttgtaataaatatgggagtgtagatatttttttaatgtattgattttttttttttaggatatatatttataagaattgttagattatattatcgttttagttttatttttttgaggaatttttattttgttttttatagtggttgtaataatttatatttttagtagtattgtatgagggtttttttttgattttattttgttatcggtaattgtttttgttttttttatataagttattttaattggagtgaggtgatattttattgtggttttgatatttatttttttaatgattagtgatgttgtatatgtttttttatattcgtttgttatttgtatatttttttttgagaaatatttgtcgagattttttgttaattttgaaattatattttttgttaggttttagttttgttgttattgagttgtttgagttttttatatattttggttattaattttttattagatagtgtgttaatgtttttttttattatgtgggttttttttatatttagttgatgttttttttgttgtgtagaagttttttagtttgatgtaattttatttgtttatttttgtttaggttgtttgtgttttttaggttttatataaaaaaatttttgtttagattaatattttagagtatttttttaatgtttttttttagtaattttataattttaggtttataatttattttgatttggttttggtgtattggttattttaatagatgttgagatagtatttgataaaatttaatatttttttatgataaaaatttttattaaaatggatatagaaggaatatattttaaaataatgaaggttatatatgataaatttatagttaatattatattgaatatagaaaaaatgaaggttttttttttaaggattgaaatagataaggatatttttttttattattgttattttatatagtgtagaaagttttggttagagttattaggtaagaggaagaaaggaagggtatttaaattggaaaggaagaagtggtgagaaagttttaattttatttttttgtatgtagttattaagtttttttagtattatttattaaagagattgtttttttttattgtatgttttttatagttttgttatagattagttggttgtaagtgtatggatttatatgtggattttttattttgttttattggtttatgtgtttgtttttatgttaatattgtgttgttttggttattatagttttgtagtaaattttgaagttaggtagtgtgatgtttttagttttgttttttttgtttaggattgttttggttatttagggttttttgtggttttttataaattttaggaatttttttgtttcgtgaagaatgttatttgtattttgataggaattgtattgaatttgtaaattgttttaggtagtattgtaattttaataatattagtttttttagtttattacggagtatatttttgggtttttgtgtttttttcgattttttttattagagttttatttatagtttttttttgtatagatattttatttttttagttaaattgatttttaggtattgtatatttttgtagttattgtaaaaggaattgtttttttgatttttatttagattgtttattgttgttatataaatgttattgatttttgtatgttgattttgtattttgtaattttattgaattagatttaatagtttttaggtggattttttagatttttttaggtataagattatgtagtttgtaaataaatttaatttgatttttttttttttaatttggatatttttttttttttttttttgtttgatagttttggttaggattttttgtattacgtagaataatagtggtgagagggggtatttttgtttgttttagtttttggaggaaaggtttttattttttttgtgtttagtatgatgttgattgtaggtttgttatatatggtttttattattttgaagtatgttttttttatatttattttggtgagaatttttattataaaggaatgttgaattttattaaatgttattttagtatttattgaaataagtatatcgtttttgtttttgattttgttaatgatttatatttagatggtatttaaagatataggaaatgggttagattttttaaagagggaagatggaaagagaatgaaagagtttttagaatatagttttgggggtttttcgtatttatggcggagggaagggagttattagaggaaatttagagtggttagatagaaaggtaggaaaaagtttaataaggtggtattatgagaagagagtttttttagaaggagaaatgtttatttttgataaaaattgaaaaatagggtgagtttatattagaattttcgttattggggaggattttttatataaggttagagattatttgtattttgtttattataattttagtgtataatgtatttttttggtatatagtgggtatttatatatatattaatttgatgatatttaataattgagtgtttaaatatttatgtcgagttgagagttagggataggtatgagttttttttaaatatttttttttttttttttttttatttttttatttgtttttagaagtattgattagagagatagtagtatttttagttttttttaaagtaatatgaaatatattttatttttgttaatattaggaaaagcgagttgttttttaagttttggaggaaggaaatttagttaattaacgtgaggtaatgtagggtggttattttttgaaaggtagtgaattataattataattatattatggaaaaaagttttgttttattaattattttattgattgtttgttattaaaattacgttatgaaacgaattgtgttgagtggtttttattgtaaaagattttggtgaagggagggaaagaaattggtaggggtttagattagaagatttggttttgttagtttttggagggtgttagaatggttttaatatatttatttttttggttttaattggaggttttgtagttgtaaataagaaggattgtatagtttagaataacgatattgtaagtttattgtggaattgggttaaaattagtatgtagatttattaagaaagaaatatatttagtattattatagaaagaaatagttatgggttttgattgttagttttttggaagttattttatttttataatagatttattatatattgtattgattttttttagtatagagtaagagaaagttaatattttttatgttttgtttgttgatagattgaaaataattgtattgagtttggttagaatattttgttattttataaatattttaaattttatatggttaaaatttaatttatttatgtttttatttgtatgtatatatatatgtatataattttattttttagtgtttttttttttatgaatggtagtattatttttttttaagaaagagaaatatttttttttgggattattttatttttatttattgttgtaggggtttttaaaattaggttttttgtgtttagttttgtatttatatttttgaaatttagagttgatcgagataaattttttaattttttgttagttttaatatagatttaaaatttttaatttggtttatgaggtttattatgtatttttgtttttttaagttagttttatattatattaatttgtgtgtggagtggttaaatattttagttaggtaagtttttttagtttttttatttggtttttttggagttttttttattgtttattttatttttagtttgatttaagatttttggttttttaaatttttttttaagtgtttttatttggatttttttttagttagtataaatttttttatttattattggagcgaatattttttgaaattttgtattagttttgttttatttttggtggaattttgtggttttagttaagtgtttgttttatgaatgtgttgaataaatgaataagtattttaattgtgtatttgttattagtgttagatgtgttatttattttagtatggttttagtatatagatatattttttgatgtagattttttttttttttttatatatagtaataataaaaaattagatttttattttttgaaaatattagtttaataattatttatggttgtttttttggttgttgaaggaaaaaaaaaaaaaaggtagggtatatttggattgtattagaatgagatttattatttagtttaggtgtgttgcgttgtgggttttcggtatattttagaggtttattaggattttgattttatattggggtttatatttttaaaagtaggtgtgtttcgtggtaattgagtgggtgcgtgaaaaggggggattattaattattagttggagtaattcgaatcggttaaagtgaattaagttatagtgtttttttaatttaatttttttgttggggttagttatagtttaaatcgtttgtcgtttagtttgagaggttgttgttagtttgtttacgtatgtagttcgggttgtagaggaagtgtggggaggaaggaagtgggtatagaagggtgttgagatgtgggttttgaagagaatagttataacgtttttgttattaaaatgttttttaggggttttcggcgagtttttttgtttggttttttgtttttaatttgtggtttttgataatttatttagtggttgtttatatttgaaaaataagatatagtgtttaattattaacgaaagaattggacggtttttcgtcgtagttttatttttcgagtttgtggttggtatttgggttacgtcgggttgggcggttatagcgaggggcgcgtagtttggggttatatagtttcgtttttaggttttaattatcgttaaaaggggaagttcgtgttttattaggttcgtttttgttgagtttagagttatttcgcgttttgcgggttgggaggttcgggttaggacgcgagttttgcgtagtcgaggttttttagcgttttttgtagtcgcgcgtaggtagagacggagttcggttttgcgttttcgtattacgttcgggattttatttagcggttcgtattcggagaagtagcgcgagtattcgaagttttcggttggcggtagaaatcgggagtggggtcgggcgagtgcgcggtattttaggtcggttcgaacgtttcgttcgcggtgggtcgatttttttttttttttttttttttttttttttagttcgttggcgtcggatacgttgcgttttattttttggggcgttttttttcgttggttaatcgtcgtatttcgtgtaattttggggtagtggtcgtttagtgttgaatgttttttatcgagagcgtatggtttgggaagcgaggcgcgaattcggttttcgaagggtcgtcgttcgggagacggtgatgttgttgttgtgtttgggggtttcgatcggtcgtttttataacgtggatattgagagcgcgttgttttattagggtttttataatacgttgttcggttattcggtcgtgttgtatagttacggggcgaatcgatggtgagtagagttggattgatgcgtttttagtagtttagagcggcgtgagaatggcgttttagggattttttgttcgatttaaattttttttttttttaaggaggtaggagggaaacgttgcgagagttagttcgttggaaatttgttagggaaattaatttattttggggcggtagcgtttcgggtgcgttatggtgtaaggttttggagtttcgagtcgggggtggtgggcggaggaggaggtggggaagttgttttgttgcggattgtatatttgtggcgatagggagtttagtgggtagtatagtttacgtttgagcgtacgtgtacgtgtttcgttttagg

SEQ ID NO: 1054 - DNA, 6713 bp, Artificial Sequence
  chemically treated genomic DNA (Homo sapiens)
tttaaagcgagatacgtgtacgtgcgtttagacgtgagttgtgttgtttattgagttttttgtcgttatagatgtgtagttcgtagtagggtagtttttttattttttttttcgtttattattttcgattcgaagttttaagattttgtattataacgtattcggggcgttgtcgttttaagataagttagtttttttggtagatttttagcgagttggttttcgtagcgttttttttttgtttttttgggagggaggaaagtttgaatcgggtagggaatttttagggcgttatttttacgtcgttttgagttgttgagggcgtattagtttaattttatttattatcggttcgtttcgtggttgtgtagtacgatcgagtagtcgaatagcgtgttgtgggggttttggtaaagtagcgcgtttttagtgtttacgttgtaggggcggtcggtcgggatttttaggtatagtaatagtattatcgtttttcggacggcggtttttcgggggtcgggttcgcgtttcgttttttaagttatgcgttttcggtggggaatatttaatattaaacggttattattttaaagttgtacgggatgcgacggttggttaacggggaagaacgttttaagagatgaggcgtagcgtgttcggcgttagcgggttaaaggaaggagagagggaagaggaggggaagtcggtttatcgcgggcggagcgttcgggtcggtttgggatgtcgcgtattcgttcggttttattttcggtttttgtcgttagtcgggagtttcgggtgttcgcgttgttttttcgggtacgggtcgttgggtggggtttcgggcgtggtgcggaggcgtagggtcgggtttcgtttttgtttacgcgcggttgtagggggcgttggggaatttcggttgcgtaggattcgcgttttggttcgggttttttagttcgtagagcgcgggatggttttgggtttagtaagagcggatttgatggggtacgggtttttttttttaacggtggttggggtttagaagcggagttgtgtgattttaaattgcgcgtttttcgttgtgatcgtttagttcggcgtggtttaaatgttagttataaattcggggagtgggattgcggcggggagtcgtttagttttttcgttgatagttaaatattgtgttttgttttttaggtgtaggtaattattagataaattattaagagttatagattaaaaataaaaaattaaataaaaagattcgtcgaaggtttttggggaatattttagtgataaagacgttatggttattttttttaagatttatattttagtatttttttatatttattttttttttttttatattttttttgtagttcgggttgtatgcgtgagtaggttagtagtagttttttaggttgaacggtaggcggtttaggttgtggttgattttaatagagaggttgggttaaggaagtattgtgatttgatttattttaatcgattcggattgttttagttggtaattgatgattttttttttttacgtatttatttagttgttacgggatatatttgtttttaggggtgtaaattttagtgtggggttagggttttaatgagtttttgaaatgtgtcggagatttataacgtaatatatttgaattgggtagtgagttttattttaatgtaatttaggtgtgttttgtttttttttttttttttttttagtaattagagagatagttataggtgattattagattgatatttttaggagatgaaagtttagttttttattgttgttatatgtaaaaagaaaagaaaagtttgtattaaagagtgtgtttgtgtgttaaaattatgttggaataaataatatatttgatattaatgatagatatataattaaaatgtttatttatttatttagtatatttatggagtaggtatttgattaggattataggattttattaagagtaaggtaggattgatataaagttttaaaaaatgttcgttttaatggtagatagaaaaatttgtattaattagagaaagatttaggtaaggatatttaaagagagatttgaaggattaggaattttgaattaggttaagaatgggatgagtaataaggagggttttagaggagttaggtagaagaattgagagagtttgtttggttagagtatttagttattttatatataggttggtgtgatatgaggttgatttagggaagtaggaatatatggtgaattttatgagttaggttaggaattttaaatttatgttgggattgataggaagttgaagaatttgtttcggttagttttgggttttagaagtgtgaatgtaagattgaatatagaaaatttaattttggaagtttttgtagtaataagtagagataggataattttaaggggaagtattttttttttttgaaagagaatggtgttattatttatggagaaaaaaatattgagaaatgaagttatatgtatgtatgtgtgtatgtagatgggggtatggatgggttaagttttagttatgtggagtttgagatgtttatggaatgataggatattttagttaaatttaatgtaattatttttagtttgttaatagataaaatatgaggaatattaatttttttttattttatattggaaaaagttaatatagtgtgtgataaatttattgtaaaaatgaaatggtttttagaaagttaataattagggtttatggttgtttttttttgtagtagtgttgagtgtgttttttttttagtagatttatatgttgattttaatttagttttataatgagtttatagtgtcgttattttgaattatgtaattttttttgtttatagttataaaatttttagttgaggttaaggaagtaggtatgttgaagttattttgatattttttagaaattggtaaagttagattttttgatttgaatttttattagtttttttttttttttttattaaaattttttataatgaaagttatttaatataattcgttttatagcgtagttttggtgataagtagttagtggagtggttggtaaggtaggatttttttttatagtatggttatagttatgatttattattttttaagaaatagttattttatattattttacgttagttagttgaattttttttttttagggtttggaaaatagttcgttttttttaatgttagtaggaataaagtgtgttttatgttgttttaaaaaaaattgaagatattgttatttttttgattaatgtttttgaaggtaagtgagggggtggaggaaggagaagagaaggatgtttaagaaagatttatgtttatttttagtttttaattcgatataaatatttgggtatttaattattaaatgttattagattaatatgtatataagtgtttattatatgttaaaaaaatgtattatgtattaaaattatagtagataaaatataagtgatttttaattttgtgtagaaagttttttttagtagcgagaattttaatgtggatttattttattttttagtttttattaagagtaagtatttttttttttaggaagattttttttttatgatattattttattaagtttttttttgtttttttatttggttattttgagttttttttgatggttttttttttttcgttataagtgcgggaaatttttagggttatattttggaaatttttttattttttttttattttttttttttaggagatttaatttattttttatgtttttaaatattatttaaatataagttattaatagaattaaaaatagaaacggtatatttattttaatagatgttgagatagtatttgataaaatttaatatttttttatgataaaaatttttattaaaatggatatagaaggaatatattttaaaataatgaaggttatatatgataaatttatagttaatattatattgaatatagaaaaaatgaaggttttttttttaagggttgaaatagataaggatatttttttttattattgttattttacgtagtatagaaagttttggttagagttattaggtaagaggaagaaaggaagggtatttaaattggaaaggaagaagttaaattaggtttgtttgtagattatatgattttatatttagaaaaatttaaagagtttatttaaaagttgttagatttgatttagtaaagttgtaggatgtaaaattaatatataaaaattaatagtatttatatgataatagtgaataatttgaataaaaattaagaaagtagttttttttataatagttataaaaatgtataatatttaggaattaatttaattaaaaaagtaaaatatttatgtaaggaaaaattataaataaaattttgataaaagaaatcgaagaggatataaaaatttagaaatatatttcgtgatagattggaagaattaatattgttaaaattataatattatttaaagtaatttatagatttaatgtaatttttattaaaatataaatgatattttttacgaaatagaaaaatttttaaaatttataagaaattataaaagattttgaatagttaaagtaattttgagtaaaaagaataaagttggaggtattatattatttaattttaaaatttattataaagttatagtaattaaaatagtatagtattggtatagaaatagatatatagattaatggagtagaatagagaatttatatataaatttatgtatttataattaattaatttgtgataaagttgtaaagaatatataatggaaaaaaatagtttttttaataaatggtgttaggaaaatttaataattatatgtaaaaaaataaaattaaaatttttttattatttttttttttttagtttggatatttttttttttttttttttgtttgatagttttggttaggattttttgtattatgtagaataatagtggtaagagggggtatttttgtttgttttagtttttggaggaaaggtttttattttttttgtgtttagtatgatgttgattgtaggtttgttatatatggtttttattattttgaagtatgttttttttatatttattttggtgagaatttttattataaaggaatgttgaattttattaaatgttattttagtatttattgaaataattaatatattaaaattaaattaaaatgaattatagatttgaaattatgaaattattaaaagaaaatattggggaaatgttttaagatattggtttgggtaaagatttttttgtgtaagatttaaaaagtataggtaatttgaataaaaatagataaatgagattatattaagttaaaaagtttttgtatagtaaagaaaatattaattaaatgtagagagaatttatataatgagagaaaatattggtatattatttgatgagggattaataattagaatatataaggagtttaaataatttaatagtaataaaattaaaatttaataaagaatgtaattttaaaattggtaaaagatttcgatagatattttttaaaagaagatatataaatggtaaacgggtataagaaaatatgtataatattattaattattagaaaaatgaatattaaaattataatgagatattattttattttagttaaaatggtttatataaaaaaggtaaaaatagttgtcggtgataaaatggggttaaaggggaatttttatatagtgttgttagaaatgtaagttattatagttattatgaagaatagaatagaggttttttaaaaaagtaaaattagaacgatgatatgatttggtaatttttgtgggtatatattttaaagaaaggaaattaatatattgaagaaatatttatatttttatgtttattgtagtattatttataatagttaaaatatggaattaatttaagtgtttattaatgagtgaatggataaagaaatatatatatataatggaatataatttaattataaaaaaattaaaattttgttatttgtagtaatatggatggatttggaggtaattatgttaagtgaattaagttaagtatagaaagataaatattgtatgtttttatttatatgtgggagtttaaaaagtaaattttatgaatatagagagtagaatggtagttattataggagaggaaacggtaggtggagggcgataaagggaaaaatatatatataaatgtagttattgttagtggattttatatttaaaatggtaaagatgatatattttatatgtatattgtattataataaaataaagttaaaaaaggaaaaaagatatttataattaatattaaataattgtattggatggttagtgggggatataattaaaatatttgaagaaataattttttaaaattattcgtgattgttttttttttttgtgttaaatatttttatagaagagtataaaagaaagagtacgtagaaggtataatttaaattatattattttattatattttatatatttaataattggttttaaaatttttgaggaatttttgttttgtttttgtataacgtttttttatttagtaggtaaaaaaaagtattaattaaaaataaagtttgaagagaatattataaatatttttacgtaaataaattagaaaatttagaagaaatggataaa

SEQ ID NO: 1055 - DNA, 16167 bp, Artificial Sequence
  chemically treated genomic DNA (Homo sapiens)
  unsure 10329..10330, 10436, 10576, 10589..10590, 10595, 10598, 10615: n is a or g or c or t
  unsure 10634, 10639, 12165: n is a or g or c or t
attttggtgtttttaaatatgttataaataaataaataaataaataaataagaaaaattgaagaatttttaggaagagaagatattagtaagagtgaggggaaatttttttttattgatttgtttaatttggatttttgggttttatattttgtattttagtgtttttttagttttgttttttttttgttagtgtttattttttagtttttgtttttatgtgtttttttaatttagtttcgtttgaaaaaatttttagtttggtttttatagaggtatttagttataggttttttttgtttgtttgtttgttttgagtttgagtttttttttgtcgtttaggttggagtgtaatgatgttatttcggtttattgttatttttatttttcgggtttaaacgatttttttgttttaaatttttgagtagttgggattataggttttcgttattatgtttagttaattttttgtatttttagtagagacggggttttattatgttaattaggttggttttaaatttttgattttaggtgatttattcgttttagttttttaaagtgttgagattataggcgtgagttacgatatttggttttagttatagttttaattattgggttcggagttttggagtaataatagaatttacgaattttattgttaaggtttgtttttgttattttagtaaatattttttatttattttttttgtgttttgtgtaaattggggatagaaaaaggagaggagtttgggtttattttaggtataggatataggggaggggttttttttgggttagatagcgggtagggatggtggaggtgatttatagatgatagagtttttagtttttttaggtagagatttgagttagagaagtaatagagtttgagggtgtaaatggtttatttttgtattttttaattttttttttttagatatatacgtatatatatatagaataattttttagttttagtagtttttggattttggtataattgggtttttattttatttttggaaatttttttattttcgtttttagttttataatttttttaaatattttattttttttttttttgtgagatttaatttttttgtttgtttgtttgtttttgttttgttttgtttttgagatggagtttcgttttgttatttaggttggagtgtaatggtgtaattttaggttattgtaatttttgttttttaaggtttaagtaatttttttgttttagttttttaagtagttgggattataggtatttattattacgcgtggttaatttttgtatttttattagagacggggttttattatgttggttaagttagttttaaatttttgatttcgtgatttatttattatggttttttaaagtgttgggattataggtatgagttattgtatttagtttaggaagttttattttatggatattttagtttttattatttttatttaattagattttttatagtttaataagatttgagtttgttttttaaaattaaggtatttagttttagtgtttttagaatttttaggtatttgagaattttaaagaagttattgagttttattttagagaaattatatgtatataaataaaaatttttatttagttttagaggattaatggattgtatatttaatttttttttattttattttaaggataatggatttaggttataatttttattttagaatttttttttatatttttgtagaaatttagtcggtttatagggttgatattgtagtgggaaaagtaacggttttgaaatttattgggattgggtttggatttatttttgtttttttttgttggttttcgtttagttattttttttttttaggtttcgattttttaatagtaaaatgaggattatgatatttttagtgttggataagttgggataaatgggatagaggtagattaaaggttaagtttagggttaggaatatagtatgtgttaaataaattattattagtattttttattttttttttatattattaaaatttagtatgatttttggcgttagaatttgtatttgtattttgaatttttttgtggaaatttatttttgtggttttaaaattttagtttttagggtaagtaggttggcgataataggagtttgttgagtgttttggttttgttttttatttttttttttttttattaagtagattatgattaataatggttagttattatagtaaattatttttattgagtaatgaagggatagagggtattaaagaggttaggtttaagagaaaaagtagaggtatttggagatatataaatttggttagagaaaggttgagagatatataagatagaaagaaaaagttgagaggagatagattatttagaggggtagtgggtttagaggagaaggtattgggtttggagtttaaatatttaggttttaggtttatcgttaattggttagttatatgattttggataaattattttatttttttatatttatttttttttttgaaggagaagattggattgatggtttttattttttttttattggtttttttaggttagtttttaggtttggaggtttgtgttgaagtagttttaattaggaggggattttaagttaaggacgaatttagagtagaggaagagaggattaggtaaaggtaggtatggtgagaggaaaggtaggaggtgttggggttattgggagaggatttataagggtagaaagagttaagagaggagggatattgggggagagtagaaaggttagttaaagaatgattaaggggttttcggtgtaaataggagtagggaatggatagggagggggtttgtttgagttggttaaggttaggggtggagtggggaggaggattggggtaggacgttatgttttttgttttttattaaggtttttgggaggagttgagttatatatttttttttttgtatttttttttatttttatttttaattttttaaattttgggaaaatttaaagagtttgtttagattgagaaaggagagtgtttggtttatatacgtgttttgttgggttaaaaagtaattaggttttagtttttttttttttaaaggggtttttagtttatggtttgagtagtttttatttaaaggttgtttttttggtaatgttgggtttaaagattttgatttagagattttttggttttttatttaagaaagggttaggatttgtagatgtgagaatgggatacgggttagtattgttttatagtttggttagttagttttttttttgggttgtagttggttttggaggggggtttttaaaaaagtagatgggtgatttgggataggaagtggagtagtagagtgagggggagagttatggtaggaaaaaaatattgattttgggtatttttattttgagttttttagttcgaagtggggtaggggattggagaatagaagggatagggttgataggatattattgatagggtattattttggaaagtgaggagttttggaggaaagagattgaaaggatttgtagtttttttttttagattaagataaaggttagaattttgaaaagtgattttattatatagagtttgagtttggggaagaggtgggtagggggttattgttttttttttttagagtttttttttttatttttataggggaatttgggaagaatggggttttggtttttcgtttttattgtttttttggtttttggtttttggattttttttttttttttttttttggatatagttttgttttgttatttaggttagagtgtagtggtgtaatcgcggtttattgtagtttttgttttttgggtttaagtaattattttgttttagtttttcgagtagttgggattataggtgcggattattatatttggataatttttgtatttttagtggagatgggttttgttatgttggttaggttggttttgaatttttggttttaggtgatttgtttatttcggtattttaaagtgttgggattataggtgtgagttatcgtgtttggttagagtttttagcgtttatagttattaggagttgaaggttgggtttttttgtaagattttttattattattattattttttataattttttaggtttgtaggaattcggttagtttaattaagtaggtattgaggggttagttattcgtaggtttttggttaattgttagatttaaggaaggggtttagtagaggtttatatattttaggattaagaagggggtaaattggagtagaatttttttgatgaatgattttaaatttttgggtttttaatattagtaagtttggaggaggaagtagcggaatttgaggagttcgtgtaggttttttagtaagttgattgcgaacgttgtttttgtattttaattgttgtgttttaaatttagttggttagaatttaggtattcggcggtttcggaaggtaagggggaattttagttggtcggacgttagaggagttttttgtttttttagattttaaagttttttttttaaagtattgagggagattttatatatatatataggtttttttcgtttattagaggtgatttttttttttattaggaaatttttcgttttttttttcgattcgtttttcgagcgtttacgttgtatatttggaaaggaatggggaggaaggagggggaagtagagaggaggggggaagaatttaaattcgtttagtttaatttagtttagataatcggtttttagttggggttggggaaagggggttggaggggtgcgtttttttttacgttttttaggggtgggggacgcgggtttagagttttagggatttaggaatgttttttcgttagttttttcggtaggcggggggagggtttagtcgggagtttggtaaattttttttcgcgttgagttattcgtttttgggaggtttaggaagcggtttcgggtcggtggttttaggatagggaagagcgggcgttatggggagtcggacgttagagttttttttttacgtcgtgtagttgcgttgggggttttcggcgtcgattttcgttgtttgcgttgttgttgttgttgttgtcgtcgttatttagggtcgggggttttaatttagacgcggaggttttagtagtattttcggggttttcgggtttttttttcggatttttagtggagttttatcggtcgggaatagacgggtgagtgaggagggttggagacgggatgggggtgggggagtcgtttggagattgggggcgcggttggggtttggaggggattagggtttaagtttgagggtggagtttgtaaggaatagagttgtagttgggggatttggttagaattgggggttcgcgttggagtagggagggtatcgtggcgggtgaggaggggttttggcgtttgagattagtggggagatatgtgttcggtggggagaggatacggagttggagaagtttgggtaggggttttcgggttaagggagaggagagcgcgtgaatggagagttgagggtttttggttgaagtttgtgggttgttgggatttggggcgggtgggggcgtagagggggcgtagaggtcgggaagggtttttgggggttttaggagatttcgggattcgtaggggttattgtgcggcgagagaacgggtagaagtcgaatgagttacgtgtagtaggaggaaagttaaagattgagggggtcggaaggttaaatgggggttagttttatttttttttttttttttaatttagatcggggaaagattcgagagaggacggcggttttttttttttttttttttgttttttattttttttttcgtttttaatttttgtttaggcgaggggattcgagaattgggggcgagtgcggggattttggtattggggttttggggttgggggcgaatttagttaagggcgggtgttgggatgtgtcgggaggggtgtgtgcgcgcgtgaaggggggtgggcggtttttttttttttttggtttttgggaggaagagaaaagttggttttttgtagttggtcggttggagttgtgttgagatcgggatttttggggttggggtcggaagttggggagacgggggtttcgtggggttaagaacgttagaatgaaggatttaggattttggaaattttaaaggaggatttttatttttaatttagtatagtgataagtagattcggatttcgagtgtttagaaaatggggtattgataggtttgggaaataggagttagagtggaagtaatattagaattaagggtgtttgtttaaatgtgggatggcggggagattgggaagtaagagaggtaggtggttgtttttgggttaggttatagatgttagatttttggttttttataatgattggtgtaatttttttttttttatatttttgagttgggagttttttattgtttatttttattttaattttaggattttagggtttgaggggaattttgttagaagcgatttgtttttatatatgagatagttaattgatttttatttagtttttatagtttttggagaaaaggggttaatttagttaatataattggggagaaaggtaaatttttttttgtttggaggatttggggatgggagaaaagaaaaatgattaggtttcgattgttgttttgggttatttaagtttttatttaatttttattttatttttttggttttttgtttaaattttattgtattattattttggtttggagtttttgttaggtttggttttttttaggtttttttaaattttttattatagttttaatggagtagaaaagagggaaggaggaaggggatgaggttttttttcgtagattagagtatttagttgtttggtatttaattttttttttattttttttttttttaaatttttttttaaaatatttttttaaaatatttggattttatatatttttggttttttaggtgtttgtttggtttttgtttgattttgtagtttttaaagtttttttttaaaataggatttagtttttttattttttttttttttttttttgtttatttttttttttaagagaatttaggtgtttagtttgtatttttttttttttattttttatttataatatttttttatagtggaatattttatttttttagtgatttttttttattatagttaggtttttatttttttttttataatataagataaatatagttttttatttatagttattgttaaagagggagagttttagtgtttttgttttttttgtattattttttgtggtgaatattaaaatagtattaaaggatagggcgagtattaaagtagttagatggtaggaaagggtaaagtttttagttagatagaggtaggtgtgagtttttattatttattagttttttgcgtggtattttagtatttagggagaggtatttaagtttttggagtttggttttttcgtgaaaattagatatttgattaacggagttttgaggattaaatgagaaaatatatataaaaggaatttggtttatagagagtgattaatatatgggcggtatggtttttatggggtagttgtttttgtttttggtttttttttttttggttatcgtttagtttttttattttttatttgttttgagtatttgtttatattagtgatagtaataatagtttgttatatttttttagtatttttatatcgatttttttattggattgtaataaaaatttttgtgttaaagtaaaggaagtattattgttttatttttagatatataaaaattgaggttggttaggtgtagtggtttacgtttgtaatgttagtattttgggaggcggaggtgggtggattatttgaggttaggagttcgagattagtttggttaatatggtgaaattttatttttattaaaaataaaaaaattagtcgagcgtgttggtacgtatttgtaattttagttattcgggaaattgaggtaggagaattttttgaatttgggaggtagagattgtagtgagttgagattatatttgtattgagcgattttagattgggcgatagagtgagattttattttaaaaaaataataataaataaataaaaaataaaaataattgaggttttaggagttatagaaattttgaattagaagttagtttaggaaatatttaagggaaatttattattttatgttagagaatttaaagtttgaagagaggtagtgatttggtttaggatatttgaaagtttgagaggtaggttagttttagtttagttttttgtttttttttgtaattgttataagtggagatagttgtttttttttagttaattatatatattttttgtgaatgtattaggggattttaaattaggtgtttttttttggtttggtttatgttgttgtaggatttgtaggagttgggcgttggtttatttgttgttttttatttttgattttgttaggttaatagagttaaatagtaatttagtattgaattgggatttggttaattaaaagttggggagatagtagatatgagaggagggaataagttggtaatggggtagattagaatgttgtcgtagaaattaggatttttgatttttgttttatattttgggagggattatgagtgatttaagtttattatttaatttttttgagatagtttttttatttgtagaatgagaatatgggacgaggtgagtagttttgaatttttttttagggagtgttagaacgaggttagtttgtttttatgttatgtggttttaggtatttatagtgaagttttaaaattagtggatgttttttatagtgttttttagttgtggtagtttgtgtttttaaggattaatttttttatttttgaggttttagtataaattttggtagttatttttttttttagattttattttagaaaagtgtattttgtaatttgtatttagtaagaaatatgaattttttttttattttttttatttttttttttttttttttgagacggagtttcgttttgtcgtttaggttggagtgtagtggcgggatttcggtttattgtaagtttcgtttttcggggtttacgttatttttttgttttagtttttttaagtagttgggattataggcgttcgttattacgttcggttaattttttgtatttttagtagagacgggggtttatcgttttagtcgggatggtttcgattttttgatttcgtgattcgttcgtttcggttttttaaaagtgttgggattataggtgtgagttatcgtgttcggtttgattagtagttttttttttgaggtaggattttatttttttatttaggttggagtgtagtagtaagatttcggtttattgaaattttcgttttttgagtttaggtaatttttttattttagttttttgagtagttgggattgtaggcgtatgttattatattttagttaatttttgtatttttagtggagatagggttttattatgttgtttaggttggtttttaatttttgggtttaagtaatttgtttattttggttttttaaagtgttggtattataggtgtgagttattacgattggttttttttagtagtttttaggaattatttttggaagtttagtttagagtttgtttttttagttttttttagaattttgtgatttatttatttgatgttttagtaataagttttttattgtttaatttagttagaatcgattttgttttttgtaattaaattttgattaatatggagaatagggtatatattttaaaaaataaatataaatatttttatagttgaaagagttaaggaaagagtagagttaatttaaagagaagagggttgggtatggtggtttatatttgtaattttaatattttgggaggttgagatgggaggattacgtgaggttaggagtttgagattagttttgggtaatatagtgagattttatttttattattaaaatatagtaataatagtttggaattatttttatttattggattgttggtatattttttggagttagtatttttgaggttgtattgtattattgttagtatttttattttttattttttggttgatagatttttggttttttttttaagtaatataaagttttagttggttttatggatttgatttattggatgatttttggagggttagtataattttatttgttgttgatttgtttttaagatatgtttttattttatttttgttttttttatattaagaacgnnnagtaaacgaaagaggggaaagaaaagaggaagaaggggagaaaaagaaaagagaggggaagaagataaggagagaagggcgagaaagtagaaaaaagagaacganaaaaaggaacgggaaaaaaaaaggataaaaggagggaagaagataggaggaaagaagaaaagagagaagaaaagaaagggaggagggaaggagagaagaaaagcgcgaaaggaaaagaaggggggaaaaaaaaaaaaganaaaaaaaggtttnnntaanaanaaaaaaaaaaaaaaaanaaataaaaaaaaaaaaaanaatancgaatttttattttatttttttggttttttgtttaaattttattgtattattattttggtttggagtttttgttaggtttggttttttttaggtttttttaaattttttattatagttttaatggagtagaaaagagggaaggaggaaggggatgaggttttttttcgtagattagagtatttagttgtttggtatttaattttttttttattttttttttttttaaatttttttttaaaatatttttttaaaatatttggattttatatatttttggttttttaggtgtttgtttggtttttggtttgattttgtagtttttaaagtttttttttaaaataggatttagtttttttattttttttttttttttttttgtttatttttttttttaagagaatttaggtgtttagtttgtatttttttttttttattttttatttataatatttttttatagtggaatattttatttttttagtgatttttttttattatagttaggtttttatttttttttttataatataagataaatatagttttttatttatagttattgttaaagagggagagttttagtgtttttgttttttttgtattattttttgtggtgaatattaaaatagtattaaaggatagggcgagtattaaagtagttagatggtaggaaagggtaaagtttttagttagatagaggtaggtgtgagtttttattatttattagttttttgcgtggtattttagtatttagggagaggtatttaagtttttggagtttggttttttcgtgaaaattagatatttgattaacggagttttgaggattaaatgagaaaatatatataaaaggaatttggtttatagagagtgattaatatatgggcggtatggtttttatggggtagttgtttttgtttttggtttttttttttttggttatcgtttagtttttttattttttatttgttttgagtatttgtttatattagtgatagtaataatagtttgttatatttttttagtatttttatatcgatttttttattggattgtaataaaaatttttgtgttaaagtaaaggaagtattattgttttatttttagatatataaaaattgaggttggttaggtgtagtggtttacgtttgtaatgttagtattttgggaggcggaggtgggtggattatttgaggttaggagttcgagattagtttggttaatatggtgaaattttatttttattaaaaataaaaaaattagtcgagcgtgttggtacgtatttgtaattttagttattcgggaaattgaggtaggagaattttttgaatttgggaggtagagattgtagtgagttgagattatatttgtattgagcgattttagattgggcgatagagtgagattttattttaaaaaaataataataaataaataaaaaataaaaataattgaggttttaggagttatagaaattttgaattagaagttagtttaggaaatatttaagggaaatttattattntatgttagagaatttaaagtttgaagagaggtagtgatttggtttaggatatttgaaagtttgagaggtaggttagttttagtttagttttttgtttttttttgtaattgttataagtggagatagttgtttttttttagttaattatatatattttttgtgaatgtattaggggattttaaattaggtgtttttttttggtttggtttatgttgttgtaggatttgtaggagttgggcgttggtttatttgttgttttttatttttgattttgttaggttaatagagttaaatagtaatttagtattgaattgggatttggttaattaaaagttggggagatagtagatatgagaggagggaataagttggtaatggggtagattagaatgttgtcgtagaaattaggatttttgatttttgttttatattttgggagggattatgagtgatttaagtttattatttaatttttttgagatagtttttttatttgtagaatgagaatatgggacgaggtgagtagttttgaatttttttttagggagtgttagaacgaggttagtttgtttttatgttatgtggttttaggtatttatagtgaagttttaaaattagtggatgttttttatagtgttttttagttgtggtagtttgtgtttttaaggattaatttttttatttttgaggttttagaataaattttggtagttatttttttttttagattttattttagaaaagtgtatttgttaatttgtatttagtaagaaataatgaatttttttttttattttttttatttttattttttatttttttgagacggagtttcgtttttgttgtttagtttgggatgtaatggcgtaatttcggtttatcgtaatttttatttttttggtttaagcgatttttttgttttagttttttgagtagttggaattataggtatgtgttattacgtttagttaattttgtatttttagtagagacggggtttcgttatgttggttaagttggttttaaattttcgattttaggtgatttgtttgttttagttttttaaagtgttgggattataagcgtgagttattacgtttggtcgttgttgttgttgttgttgttgagaaggagtttcgttttgtttttggattggagtgtagtggcgtgatttcggttttttgtaagtttcgttttttaggtttatgttatttttttgttttagtttttttagtaggtgggattataagcgttcgttattacgttcggataatttttttgtatttttagtagagacggagttttattatgttagttaggatggtttcgattttttgatttcgtgatttgttcgtttcggttttttaaagtgttgggattataggcgtgagttatcgtatttggcgttttttttattttttattaattaaaaatatttatagttgttaattagagtttttgattagtatgagataattaggtttttatataagttgatataattttagttaaaagtaaatatatttgaggttttaattagtttaggttattttatttggtaaatgtatgattttcgttaggttttttgaaatattgaaaatagtatacggattttttattgttatttttttagatttttaaaagtgtttaattgttgtaggatttaggaagtaggaaaaagatgtgggaaaataaggataaattagtttgtatgttatttatggtattagttattttatttggcgtgttggtaggggaggtattatttattggattgattttaggttgttgggatggaagggttattgtttgtttaggaataagttaagggtagtgtgtcgggaggaaaggaggtttaggtttgtgttttttgtttgtatgttaggtattttgaattatcgtatagtcggaatggatatgtttttggtttgtgggttttataagttttgtaaattttttgttttgtaattttgttaaattttaggttatttttttaggttattttaggagtgttaggtttagtttttttttaagagtagtgggtgttggagaaattggtagtaggaatagggttttttggttttagttttgtgttttaggaaattttgagagaattttttttttatttagaggaagagggagagggtattttaagtttatagttagtgtttgaattagaatttttggtttttggtttagtgttttttttattgttttttgtatttttgttgttttggtttagtttaggttggtggttttttttgttttttagagtttgaaggtagtaattaagttttttgggggttgtttttgttgagagaggggttttttttttttatattatttagttttagggcggtgtagttagattttataagtggatgttatgtttaagtgagaagggtggggtttggtacggaggtgggggtgtgggagataaacggagaagtgagaggttggaaatagataggaagttataggtagtaaatattttttgtttttagagtaacggagattggtattttttttttttattttttttaattttaggagttttttttttttagtttatttattttttatttttttggattttgtttttttttttttttatttttattattggtttttatagatttttttttatttttttttttcgttttttcggatttgttttttttgttgtttttattttttatattttttgggttattttttttcgttttagtatatttggtttttttggaaaatatttttagtttttgtgatttttattataattttttattttgggtttttttgtttagtgagaaagttgaggaaggtatttaaatattagggaaagggtaggtattggacgggttgaaagttgaaagtgaatagaaattaatagagatggagaaatgtaaaatttgagatagagagataggatttaaaaattaaaattaagagagtaagtagttataggggtagagggatagagggattgagaagtagtgttagaggtagatatagagtagagtagaggttaaggttggtaggagtattggtttagaggttgggtcgagttgtttaggttgttagatataagttttggtaggagatttttaggggaaattaagagagttaagagcggtgtggaggttttggaggtaagagatttagggatgaatgaggtagagttgacggtaggaggattgtttagtttttaattatgatttttttttttttagggtaaatttttttttatattagggggattagaagtattgtgtttagaattgggattcggtagagtagattttgaatttagttagttgggggtggtttatgggaaaggggtttaagggttgaaatatagatttagttaggaaggggaggtttatattagggtcggggtgagggtaggtttaggtttagtggaataatttgtttttattgttttttagtttttttttttatttttgttgtttgatttttaagatttatattttttttttatacgttttaaggttgggtggttgggtagtcggatgtttgggttttggtttagggaggggatttggtttgggaggagagtatataggttagatgagagattttgaggttttataggattttggcgttttagaagttatatatttaattttagtaggtacgtagaggagagggagaagttaggggtataggttttggttttttttttttttttagaaattgattgtggttttttttttttttatgaataggataaggtaggagaggatagagaatggcgggaggaggggagggttgtgttagtgatagcggtatatggggatcgtttgattttagtttgtgtttttggtatttgtggtattttttgagatataaatataacgtagggggtatttattttatttttagttagttttagtttagaggtttgggttttttttgtttttagatattaatgaaaagttaggagttatttttaattgttttatttttttttttaatagg

SEQ ID NO: 1056 - DNA, 16167 bp, Artificial Sequence
  chemically treated genomic DNA (Homo sapiens)
  unsure 4003, 5529, 5534, 5553, 5570, 5573, 5577..5578, 5592, 5732: n is a or g or c or t
  unsure 5837..5838: n is a or g or c or t
tttgttggggggaaaagtgaggtagttgaggatggtttttagttttttattggtgtttggaggtaggaaggatttaggtttttaggttggggttggttgggggtggagtagatgttttttgcgttgtatttatattttagaagatgttatagatgttagaggtataggttggagttaggcggtttttatgtgtcgttgttattaatataattttttttttttttcgttattttttgtttttttttattttattttgtttataaagagaggaggaattatagttaatttttagaaggggaagaggggttagagtttgtatttttggttttttttttttttttacgtatttgttgagattagatgtatagtttttggagcgttaaggttttgtggagttttagggttttttatttagtttatatattttttttttaagttaaattttttttttgggttaagatttaggtattcggttgtttagttatttagttttggggcgtgtaggaggaaaatgtgagttttggaaattaggtagtaggagtggagagaggagttggaggatagtgaaaatagattgttttattgggtttgggtttgtttttatttcggttttggtgtgggttttttttttttggttgggtttgtgttttagtttttgaattttttttttatagattatttttagttgattgaatttagagtttgttttatcgggttttagttttggatatagtgtttttggtttttttgatatgaggggaagtttgttttgagaaggggggggttatagttaggggttgggtagtttttttgtcgttagttttgttttatttatttttaggttttttgtttttaagatttttatatcgtttttggtttttttggttttttttaagggttttttgttaggatttgtatttggtagtttgggtaattcgatttagtttttggattagtgtttttgttagttttggtttttgttttgttttgtgtttgtttttggtattgttttttaatttttttgtttttttgtttttatgattgtttgtttttttggttttggtttttgaattttatttttttattttagattttatatttttttatttttattggtttttgtttatttttagtttttaattcgtttaatatttattttttttttgatatttgaatattttttttagtttttttattaggtaagaaggtttaaagtgaaggattatggtagaggttataagagttgggggtattttttaagaagattaggtatattgaggcggggaggagtggtttaggaggtataggggatggaagtagtagagaggataggttcgaggggacggaagaggagagtgaggaggggtttgtgagggttagtggtgagaatggaggggagagaaggtagggtttagaggaataggagatgggtaggttgaagagggagagtttttgaagttaggaggggtggggaggggaggtgttagttttcgttattttggggataggaaatgtttattgtttgtggttttttgtttgtttttaattttttattttttcgtttgttttttatatttttattttcgtgttaggttttattttttttatttaggtatgatatttatttgtggggtttggttgtatcgttttagggttgggtgatgtgagagaaggagattttttttttagtaggggtagtttttagagaatttggttgttgtttttaggttttagaaagtagaaagggttattaatttgaattagattagaatagtagaggtataggaagtagtgaaaggagtattggattaggagttaagagttttggtttaggtattaattgtggatttgggatattttttttttttttttttgggtgaagaagaggtttttttaaagttttttggagtatagggttaaggttaagggattttatttttgttgttaatttttttaatatttattgtttttggagaggagttgagtttgatatttttggggtggtttgaggaagtagtttggagtttagtagggttgtaagatagagagtttataaagtttgtaaagtttataagttaggggtatatttatttcggttgtgcgatggtttaggatatttggtatgtaggtaagggatatagatttaggtttttttttttttcggtatattatttttggtttatttttggataggtagtggtttttttattttagtaatttaaagttaatttaataaatagtgttttttttgttaatacgttaagtgaggtgattggtgttatggatggtatgtaagttagtttgtttttatttttttatattttttttttgttttttaaattttgtagtagttgggtatttttaggggtttaagaaggtaataatggagggttcgtgtgttatttttaatattttagaaagtttaacggaaattatgtatttattagataaggtggtttaggttaattaaaattttaagtgtatttgtttttggttggaattatattaatttatgtgggaatttggttattttatgttggttagaaattttgattggtagttatagatgtttttggttaataaaaaatgagaaaagcgttaggtgcggtggtttacgtttgtaattttagtattttgggaggtcgagacgggtagattacgaggttaggagatcgagattattttggttaatatggtgaaatttcgtttttattaaaaatataaaaaaattattcgggcgtggtggcgggcgtttgtagttttatttattagggaggttgaggtaggagaatggtatgaatttgggaggcggagtttgtagggagtcgagattacgttattatattttagtttagagatagagcgagatttttttttaataataataataataataacggttaggcgtggtggtttacgtttgtaattttagtattttgggaggttgagataggtagattatttgaggtcgggagtttgagattagtttgattaatatggcgaaatttcgtttttattaaaaatataaaattagttgggcgtggtggtatatgtttgtaattttagttatttaggaggttgaggtaggagaatcgtttgaattagggaggtgggggttgcggtgagtcgagattgcgttattgtattttagattgggtaataagagcgaaatttcgttttaaaaaaataaaaaataaaaataaaaagaatgagaaaaggaatttattattttttattaaatgtaggttggtaggtatatttttttgaaatagagtttgagagaagaaataattgttagaatttattttgaagttttagaaatggaagggttggtttttggagatatagattattatagttagaaggtattgtagagagtatttattggttttaagattttattgtaggtgtttgaggttatatggtataaaggtagattggtttcgttttgatattttttaagaaaaagtttaaagttgtttatttcgttttatgtttttattttgtagatgggaaaattattttagaggagttaagtaatgggtttaggttatttataattttttttagaatatgaagtagaaattaggaattttgatttttacgatagtattttagtttattttattgttaatttattttttttttttatatttgttatttttttagtttttgattaattaagttttagtttaatattgggttattgtttgattttgttggtttgataaggttaggggtggagagtagtaagtggattagcgtttagtttttataggttttatagtagtatgggttaggttagaggaggatatttggtttggggttttttagtgtatttataagggatatgtatgattggttggggaagaatagttgtttttatttgtggtagttgtagaagggaataaggagttgagttgagattggtttgttttttaagtttttaagtgttttgggttaagttattgtttttttttaagttttggattttttggtatanaatgatggattttttttgaatgttttttaaattaatttttggtttaaaatttttatgatttttgaagttttagttgtttttattttttgtttgtttgttgttgtttttttgagatggagttttattttgtcgtttagtttggggtcgtttagtatagatgtgattttagtttattgtaatttttgttttttaggtttaagggatttttttgttttagtttttcgagtagttgggattataggtgcgtgttagtacgttcggttaatttttttatttttagtagagatggggttttattatgttggttaggttggtttcgaatttttgattttaggtgatttatttattttcgttttttaaagtgttggtattataggcgtgagttattgtatttggttagttttagtttttgtatatttaaaaatggggtaataatgttttttttgttttaatataaggatttttgttataatttaatggaaaaatcgatatgaaagtgttaaaggaatatgatagattattgttattattattagtataagtaaatatttaaagtaagtaagaaatgagggaattaggcggtagttaggaaggagagaattagaaatagaaatagttattttataaaaattatgtcgtttatgtattgattattttttgtggattaggttttttttgtatatgtttttttatttagtttttagaatttcgttagttaggtgtttgatttttacgggaagattaggttttaagagtttaaatatttttttttaggtattagggtattacgtaaaaaattagtaagtagtggggatttatatttatttttgtttgattgaaagttttgtttttttttattatttaattgttttggtgttcgttttgttttttaatattattttggtgtttattataagaggtgatgtaggaagaataagaatattgaggttttttttttttggtaatggttgtaggtgaggggttgtgtttgttttgtgttgtgggaaagggggtgaaggtttagttgtggtgggaggaggttattggggaggtagaatgttttattgtaagagggtattgtaaataggaaatgagagggaaggagtgtaagttggatatttgggtttttttgggaggggagatgagtagaaggggagggggaagggatgagagagttaggttttgttttagaagaggattttagggattataggattaggttaggggttagatagatatttaggggattaggaatgtgtgaagtttagatgttttagaggagtgttttaaagggaaatttaggggaggggggagtaaagagaaggttaaatgttagataattagatattttgatttgcgggaggagattttatttttttttttttttttttttttttattttattagggttgtgataagaagtttgagggaatttgggggagattaggtttggtagaggttttaggttagggtgatgatgtaatggggtttgggtaaaaggttaggggggtggggtgggggttcgntgttnttttttttttttttgtttnttttttttttttttttnttnttgnnngggtttttttttnttttttttttttttttttttttttttttttttcgcgtttttttttttttttttttttttttttttttttttttttttttttttttttttttttttgtttttttttttttttttgttttttttttttttcgtttttttttntcgtttttttttttttgttttttcgtttttttttttttgtttttttttttttttttttttttttttttttttttttttttttttttttttttttttcgtttgttnnncgtttttggtgtgagaaaagtaagaataaaatgagggtatattttaaaggtaagttaataataaatgaaattatattaattttttaaaaattatttaataagttaaatttataaaattaattaagattttatattatttagagaaaaggttaaaaatttgttaattaaagaatgaagagtaagggtgttaataataatataatgtaattttaaaaatattggttttaagaaatatattaataatttaatgaatgaaaataattttaaattattattattatattttaatgatagagatgggattttattatgttgtttaaggttggttttaaatttttggttttacgtgatttttttattttagttttttagagtgttgggattataggtgtgagttattatatttaatttttttttttttaaattaattttattttttttttaatttttttagttatgaaaatgtttatgtttattttttaaaatatatattttgttttttatattaattagggtttggttgtagagaatagaatcgattttagttagattaagtagtaaaggatttattattagggtattaaatggatggattatagaattttggggaaggttgaagaaataaattttagattggatttttagaaatgatttttaaagattgttaagggaggttagtcgtggtggtttatatttgtaatattagtattttgggaggttaaggtgggtaaattgtttgagtttaggagttggagattaatttgggtaatatagtgaaattttgtttttattaaaaatataaaaattagttggggtatggtggtatgcgtttgtagttttagttatttaagaggttgaaatggaaggattgtttgagtttaggaaacggaggttttagtaaatcgagattttattattgtattttagtttgggtgagagagtgagattttgttttaaaaaagaaattgttaattaggtcgggtacggtggtttatatttgtaattttagtatttttgggaggtcgaggcgggcggattacgaggttaggagatcgagattatttcggttaaaacggtgaattttcgtttttattaaaaatataaaaaattagtcgggcgtagtggcgggcgtttgtagttttagttatttggggaggttgaggtaggagaatggcgtgaatttcgggaggcggagtttgtagtgagtcgagatttcgttattgtattttagtttgggcgatagagcgagatttcgttttaaaaaaaaaaaaaaaaaaataaaaagaatgagaaaagaatttatattttttattaaatgtaggttgtagggtatatttttttgaaatagagtttgagagaagaaataattgttagaatttatattgaagttttagaaatggaagggttggtttttggagatatagattattatagttagaaggtattgtagagagtatttattggttttaagattttattgtaggtgtttgaggttatatggtataaaggtagattggtttcgttttgatattttttaagaaaaagtttaaagttgtttatttcgttttatgtttttattttgtagatgggaaaattattttagaggagttaagtaatgggtttaggttatttataattttttttagaatatgaagtagaaattaggaattttgatttttacgatagtattttagtttattttattgttaatttattttttttttttatatttgttatttttttagtttttgattaattaagttttagtttaatattgggttattgtttgattttgttggtttgataaggttaggggtggagagtagtaagtggattagcgtttagtttttataggttttatagtagtatgggttaggttagaggaggatatttggtttggggttttttagtgtatttataagggatatgtatgattggttggggaagaatagttgtttttatttgtggtagttgtagaagggaataaggagttgagttgagattggtttgttttttaagtttttaagtgttttgggttaagttattgtttttttttaagttttggattttttggtataaaatgatggattttttttgaatgttttttaaattaatttttggtttaaaatttttatgatttttgaagttttagttgtttttattttttgtttgtttgttgttgtttttttgagatggagttttattttgtcgtttagtttggggtcgtttagtatagatgtgattttagtttattgtaatttttgttttttaggtttaagggatttttttgttttagtttttcgagtagttgggattataggtgcgtgttagtacgttcggttaatttttttatttttagtagagatggggttttattatgttggttaggttggtttcgaatttttgattttaggtgatttatttattttcgttttttaaagtgttggtattataggcgtgagttattgtatttggttagttttagtttttgtatatttaaaaatggggtaataatgttttttttgttttaatataaggatttttgttataatttaatggaaaaatcgatatgaaagtgttaaaggaatatgatagattattgttattattattagtataagtaaatatttaaagtaagtaagaaatgagggaattaggcggtagttaggaaggagagaattagaaatagaaatagttattttataaaaattatgtcgtttatgtattgattattttttgtggattaggttttttttgtatatgtttttttatttagtttttagaatttcgttagttaggtgtttgatttttacgggaagattaggttttaagagtttaaatatttttttttaggtattagggtattacgtaaaaaattagtaagtagtggggatttatatttatttttgtttgattgaaagttttgtttttttttattatttaattgttttggtgttcgttttgttttttaatattattttggtgtttattataagaggtgatgtaggaagaataagaatattgaggttttttttttttggtaatggttgtaggtgaggggttgtgtttgttttgtgttgtgggaaagggggtgaaggtttagttgtggtgggaggaggttattggggaggtagaatgttttattgtaagagggtattgtaaataggaaatgagagggaaggagtgtaagttggatatttgggtttttttgggaggggagatgagtagaaggggagggggaagggatgagagagttaggttttgttttagaagaggattttagggattataggattaggtaggggttagatagatatttaggggattaggaatgtgtgaagtttagatgttttagaggagtgttttaaagggaaatttaggggaggggggagtaaagagaaggttaaatgttagataattagatattttgatttgcgggaggagattttatttttttttttttttttttttttttattttattagggttgtgataagaagtttgagggaatttgggggagattaggtttggtagaggttttaggttagggtgatgatgtaatggggtttgggtaaaaggttaggggggtggggtgggggttgggtggggatttgaatagtttagaataatagtcggggtttaattatttttttttttttttatttttaagttttttagataaaggagaatttgtttttttttttagttgtattagttagattaattttttttttttaaaaattatagggattgagtagagattagttaattgttttatgtgtaaaaataggtcgtttttgatagaattttttttaaattttgagattttggggttggggtgggggtgagtagtaggaagtttttagtttagagatgtagaagaaaaaggattatattagttattgtggaggattaggaatttggtatttatggtttagtttaggagtaattatttattttttttgttttttaattttttcgttattttatatttaaatagatatttttggttttaatgttgtttttattttaatttttgttttttaagtttgttagtattttattttttaggtattcggggttcgggtttgtttattattgtgttgagttgggaataaggatttttttttgagatttttagggttttgagttttttattttgacgtttttggttttacggagttttcgtttttttagttttcgattttagttttagaagtttcggttttagtatagttttagtcgattagttataggaaattagttttttttttttttttaagagttagaggaagagggaaatcgtttatttttttttacgcgcgtatatatttttttcgatatattttagtattcgtttttggttgagttcgtttttagttttagggttttagtgttagggttttcgtattcgtttttagttttcggattttttcgtttgaatagagattgggggcggagggaggagtaggagatagaggagaaaggagagggagtcgtcgttttttttcgggttttttttcggtttgagttgaggggggaggggaggatgaggttggtttttatttaatttttcgatttttttagtttttgattttttttttattatacgtagtttattcggtttttattcgttttttcgtcgtataatggtttttacggatttcgaggttttttggagtttttaaaagtttttttcggtttttgcgttttttttgcgtttttattcgttttaggttttagtagtttatagattttagttagagatttttagttttttatttacgcgttttttttttttttggttcggagatttttgtttagatttttttagtttcgtgttttttttttatcggatatatgtttttttattgattttaaacgttagggtttttttttattcgttacggtgttttttttattttagcgcgggtttttaattttagttaggttttttaattgtagttttattttttataaattttatttttaaatttaagttttggttttttttagattttagtcgcgtttttagtttttaggcggtttttttatttttatttcgtttttagttttttttatttattcgtttgttttcggtcggtaaaattttattgagaattcgaagaaggagttcgggggtttcgagagtattgttggggttttcgcgtttaagttgaagttttcgattttgggtggcggcggtagtagtagtaatagtagcgtaagtagcgggggtcggcgtcgggggtttttagcgtagttgtacggcgtggagaggggattttggcgttcggttttttatagcgttcgtttttttttgttttggggttatcgattcggagtcgttttttaaattttttagaggcgaatgatttaacgcggggaggagtttgttaaattttcggttgagtttttttttcgtttgtcgagggggttggcgggggggtatttttgggtttttggaattttgagttcgcgttttttatttttaaggggcgtgggggggggcgtatttttttaattttttttttttagttttagttggaagtcggttgtttggattgggttagattgggcgggtttgggtttttttttttttttttttgttttttttttttttttttttatttttttttagatgtataacgtaaacgttcggaaaacgagtcggaaaagggagcggagaattttttaatgaggaaaggaattatttttggtgggcggaggaagtttgtatatgtgtgtggggttttttttagtgttttagggaggagattttggggtttaaagagataggagatttttttggcgttcggttaattgggatttttttttgtttttcggggtcgtcgggtgtttgggttttggttagttggatttgggatataatagttgaggtatagagatagcgttcgtagttagtttgttagaggatttatacgggttttttaagtttcgttgtttttttttttaagtttgttagtattgaaaatttaggagtttggggttatttattaggaggattttgttttagtttgttttttttttggttttagggtatgtaaatttttgttgagttttttttttggatttgatagttgattaaaagtttgcgagtggttggttttttagtatttgtttgattaaattggtcgggtttttataaatttggagaattgtgagaggtggtggtggtggtggaaagttttgtaaagggatttaatttttagtttttaatggttgtaaacgttgggagttttggttaggtacggtggtttatatttgtaattttagtattttgggatgtcgaggtgagtagattatttgaggttaggagtttaagattagtttggttaatatggtaaaatttatttttattaaaaatataaaaattatttagatgtggtggttcgtatttgtaattttagttattcgggaagttgaggtaggataattatttgaatttaggaggtagagattgtaatgagtcgcgattgtattattgtattttagtttgggtgatagagtaagattgtatttaaaaaaaaaaaaaaaaaaaaaatttaaaaattaaaaattaaaaaaataatgggagcggaaagttaggattttattttttttagatttttttgtggaagtagaggaagggattttagaaagggaaggtagtgattttttgtttattttttttttaagtttaggttttgtgtgatgagattattttttaggattttagtttttattttagtttgggggaggggattataagtttttttagttttttttttttaggattttttattttttagaataatattttgttaataatattttgttaattttgttttttttgttttttagttttttgttttatttcgggttgaaaggtttagaataagagtgtttagagttaatgttttttttttgttatgatttttttttttattttgttattttattttttgttttaaattatttatttgtttttttaaaagtttttttttagagttagttgtagtttaagggagaggttggttggttagattgtggggtaatgttggttcgtattttatttttatatttgtaagttttgatttttttttaggtgaggaattagggaatttttgggttaggatttttaagtttagtattgttaaaaaggtaatttttaggtgagagttatttaagttatgggttgggaatttttttgggaggagaagggttgaggtttgattgttttttagtttagtaaaatacgtgtgtgaattaaatattttttttttttagtttaggtaaattttttagatttttttaggatttgggagattaggggtgggggtggggaggggtgtagggaaggaggtgtgtgatttagttttttttaggagttttggtgggggataggggatatagcgttttgttttagtttttttttttattttatttttagttttggttaatttaaataggttttttttttgtttattttttgtttttgtttatatcgggagttttttagttattttttggttggtttttttatttttttttaatatttttttttttttggttttttttgtttttataagtttttttttagtggttttaatattttttgtttttttttttattatgtttgtttttgtttgattttttttttttttgttttgggttcgtttttaatttggggtttttttttaattagagttattttagtatagatttttaggtttggaagttgatttagaaaggttagtgaggaggggatagaagttattagtttaatttttttttttagaagaggaaatgggtgtagagagatgaagtgatttgtttagggttatatggttagttagttagcggtgagtttagaatttaagtgtttagattttagatttagtgtttttttttttaagtttattgtttttttaaatgatttatttttttttagttttttttttttattttgtatattttttagtttttttttggttaagtttgtgtgtttttaagtgtttttgtttttttttttaaatttgatttttttggtattttttgtttttttattgtttagtaggaatgatttgttgtgatgattgattattattaattatggtttgtttgatggagaggaagaagggtgaagggtaaggttaggatatttagtaggtttttgttgtcgttagtttgtttgttttgaaggttggagttttagaattataagagtgaatttttatagaggagtttaggatataggtgtaagttttaacgttaggggttatgttgaattttagtagtgtggaagaggggtggggagtattgataatggtttatttagtatatgttgtatttttggttttgggtttgatttttaatttgtttttattttatttattttaatttatttagtattgaaggtattatgatttttattttattgttaggaaatcgaagtttaaaggagagaagtgattaagcgaaggttaatagaaaggggtagaggtaaatttaaatttaattttagtagattttagagtcgttgttttttttattgtaatgttagttttgtaaatcggttgggtttttatagaggtatgggggaagattttagagtaggaattataatttagatttattgtttttggggtggggtgggggaagattgggtatataatttattaattttttgaaattggatggaagtttttgtttatatgtatgtgatttttttggggtgagatttagtggtttttttaagatttttaaatgtttggaaattttgagaatattaaggttggatgttttggttttaagaaatagatttaggttttgttgggttgtaaaaagtttgattgggtagaggtggtagaggttgaggtgtttatgaaataaaattttttaggttgggtgtagtggtttatgtttgtaattttagtattttgggaggttatggtgggtagattacgaggttagaagtttgagattagtttggttaatatggtgaaatttcgtttttagtaaaaatataaaaattagttacgcgtggtggtgggtgtttgtaattttagttatttgggaggttgaggtaggagaattgtttgaattttgggaggtagaggttgtagtgatttgagattgtattattgtattttagtttgggtgatagaacgagattttattttaaaaataaaataagataaaaataaataagtaaataaagaagttggattttatagagggaaggaaggtgggatatttaggaaaattatgaagttgaaggcgggggtggggggatttttagaagtagaataggagtttagttatattaggatttagagattgttgaagttggggagttgttttgtgtgtgtgtgcgtgtatgtttaagaaagggaaattggaaagtataggagtagattatttgtatttttaggttttgttgtttttttgatttaggtttttgtttagaggaattgagggttttattatttgtgagttatttttattatttttattcgttgtttgatttaggagaaattttttttttgtgttttatgtttaaaataaatttaggttttttttttttttttatttttagtttgtatagagtataggaggggtggatggaagatgtttattagggtgataaaagtagattttagtaataagattcgtgggttttattgttgttttaggatttcgaatttagtgattaagattgtgattagagttagatgtcgtggtttacgtttgtaattttagtattttgggaggttgaggcgggtggattatttgaggttaggagtttgagattagtttggttaatatggtgaaatttcgtttttattaaaaatataaaaaattagttgggtatggtggcgggagtttgtaattttagttatttaggagtttgaggtaggagaatcgtttgaattcgggaggtggaggtggtagtgagtcgagatagtattattgtattttagtttgggcgatagagagagatttagatttaaaataaataaataaataaaaaaaatttgtgattagatatttttgtggagattaaattgggagtttttttaggcgagattaggttggagaggtatatggagatagggattaggggatgggtattgataggaaaggagtagagttaagaggatattgggatataagatataagatttaggaatttagattaagtagattaatgggaaggaatttttttttatttttgttaatgttttttttttttaaaagttttttagttttttttatttatttatttatttatttatttatggtatatttagaggtattagaat

SEQ ID NO: 1057 - DNA, 9666 bp, Artificial Sequence
  chemically treated genomic DNA (Homo sapiens)
ttttagagttgagtagaggatatggggtatttgtatttagtgtttttatttgatttttttagggttattttttatttgttttttttttgggtttttattgtttattgtttaattttagtttttgttgtagttgaagtttagttttatttgtttttggtagagatggatataagtcgtatatatatttatttggagaatgatttttgaaatttgaagtttttttttgtttatttttttttacgattttttatttagattatttttttttggattgaatgaatgtaattttatatttttttttttatttatttttttttttttttgaggttttttttagagttagttttaattagtaagttttaaattgattggttgggttaaatagggttggaagttgttgagttgttaggggttggatgagggttgagggaggatatagagtgagtagataaggttttatatattgggagatttggttgggttttaagagagggggttggtggtggtgtggttaagttttaaatgttggtttgaagttagtgtttaaagaaagggggtttttgagatagtttaaatggttttttttggtaagtgattttttagttttttttaagtgttaagggttttttttggatcgttaaagatcggagcggttaagttgtttttttattgaatttttttaattatatttatgtttttttttttttagttatttttatggtttaagttttgattataattagaatttagaggtaggtagaaggattttagtgttggagaggtgagtgaagtaaaaaagtttttatggtgtgtatgttgggacggaaaagtttgattttgggatataagttttaaggttttgttgttagatgaggtggagggagaagttagttttgaagtgtgtgttttggaagtgtttgtttgtaagttagagataatagttgtaaaaagtgtgatttgagggagttgaaaaatattgattttaaagtggggaagaagatgttgaaaagggaaggagttggagaaagttttagtttttatttatataaaagttaaagggttaaaattttggttggatttggatattttttaacgtttaaaattttggaaatttttataaagattattaattttttatttttatatttaatttatttaaaaagtttagttttttagttatattagttatatttttttttttttttttttttttttgagatagagttttattttgttgtttaggttgaagtatagtgtattaatttattttatggagtggagtggataatttattttatggattattattttattttgttagtggtatttttagaagtataaaatttttaaatttttttttttttttgaggtagagttttattgtgttttttaggttggagtgtagtggtgttatttttgtttattgtaggtttcgttttttgggtttaagcgatttttgtgttttagttttttgagtagttgggattataggtgtgtattattacgtttagttgatttttgtatttttagtagagatgggtttttgttatattggttaggttggttttaaatttttgattttaagtgatttattttttttttttttaaagtgttgggattattatgtttggtttggaaattattttgaaataattatagattagaggaagttgtaaaaatagtatatgaagttttgtgtattttttatttagttttttttaatggtgatattttatgtaattgtagtataaaattaaaattaaaaagttgatattggtatagtattgttaattggtttgtagattttatttagtttttattattttttatatgtatttatttgtttgtttgtagttttgtgtagttttatattttgtatagatttggataattattattataattaagatataaaatttattattataaaggaatttttttgtgttatttttttatgtttgtttttatttttttttatttttgttttttggtagttagtaatttggtttttatttttatagttttgttattttgagaatggtatgcgagtggaataatatagttttagtattttttgtttggagatagggttttattttattatttaggttggagtgtagtggtaagattatggtttattgtagtttttattttttgggtttaagtgatattttcgtttagttttttgagtagttgggattatagatttggttaatttttttattttttgtagagatgggggtttttttatgttgtttaggttggtttttaatttttgggtttaagtgatttttttgttttggttttttaaagtgttgggattgtaggtatgagttattgtgtttagtttagtattaatttttaatttaattaatttttaagtttttgattgaaatataagaagttttttaatagtttatttattttaatattgagtttatcgtattttttggatttttttagttttttttttttttttttttttttgatgtggagtttttgttatttaggttggagtgtagtggtgttattttagtttattgtaattttcgttttttgggtttaagtgatttttgtgttttagtttttggagtagttgggattataggtattcgttattatattcggttaatttttgtatttttagtagagatagggttttatcgtgttggttcggttggttttgaatttttgattttaggtgattcgtttgtttcggttttttaaagtgttgggattataggcgtgagttatcgcgttcggtttcgtttagttttttaatttttttttttatttacgatattattttttattttaatattttggttttatttttttttgagagaaatttatatgtttaaatttattaggttggtttagtacgtttttgtgtgttttttttttttttttgtttttttatttatagttaggttaattttgggtggtttttttttttttttttttttgatttttttttttgtggtggtgaggtgattttttaaatatttggagagaggaggttagaagtagatttttggtatttgattttagttttggattatagaagttagtggagtgggaatggagataggtagaagttgtaggtgtagataggaggtagtttgggttttaaaggtattttgagttgggtcgggggcggggggatttgggtagggagttagtagttttagttttgttttaattttgtaattttgtatttttatgttagtttttttttattgtttggggttttgagatattaaaaaggatggggagggtatggtgaaagtagaattttggtgttagttttgttgatagtatatgtatttttttatagtatttgtttagagatgtgttagtgttttggaggggatagttataggtgtagtattggaaaatagagggttagatttttaaatgtttgttaatttatttaaggtaaagattgttttagggtagtagagtaagaatttattttttttttgtttttaaagaagtataattttgaataatgaagtaggaaagatagaatataggaagaggaaggaggtaggatatttattggaatttttaagaaagggaaagagaagaaagaatcgtaagaatatgatagtgtttgaagggtagagataatattagaaatattgagaaatattttgagaaagattttaagtgtggtagagataagaatgatgataaaatagaatttgggatgagataaaattagatagtgagagagagaagggaagatggatagatgtatatttataagattaatattagtaagtaaggggagtaggaaggggaagtgggagtattcgaggtttttattatgttaaattattttttgtttttttttttggttttatttttgtatcggagttataaatagtagagagttggaaagtgtttttttatttttttgtttttgttttagtttgagggaaagggagaggaagagggataggttaatgggtttttgtggagattttattttagttttatttaggttttgttgagttagtttaggattttgtttttttttatttttttttatggataggaaatgtgtagttttgggacgggtttggtagttggggatattttttatatttttttgttttttgggtttagttttttttatttttgttttttttgatatttatttttttttttattgtttaattttttttttttgtaattatttttagtcgtttttttttttttttttattttattttttgttaattaattttttgtttttttttttttttttttattttttttttttttttatttttttatttgtttttcgtatttttcgagtttttttttttttttttgtttttttttttttgtttttttgaattttgacgatgtggttagtattgttgtggttattgtcgggttgggggcgggggatgggataggatgggggagggtagcggtttgattttaatagtagaaagagtgttttatgtgattatgggggaatagggagtattaagatgttacgttgtatttaggtttaggacggttttttttttattttttttttatttgtatatttttttttttaggttgttttttagcgtttttttaattttttattttttatttttttttttttgttttagtttttttttttttatttgtattttttttttttcgtattttaaggcgtcgtttttattattttcggggtggggatggggttgggggagaaggggaggagagcgtcgcgtaggggcggagtcggagacggtgttgggtttggggggcgtggtggtggggggttagtaaggttagtttttattttagttattagtttgggtatttttttggagacgggtttgggtttttatttgtcgcgggagcgaggggcggggtcggaggcggggtttgagtggcgttttcgggagaggaggcgggagtcggagtgggcgtcggagttgcggttgttgtagttgttttagtcggtgttggggcggcggggtggcggagcggcgggcgggcgggagggttggcggggcgaacgtttgggagacgtttgaaagattaacgagattttggagattagagacgcgtttggggggatttggggtttggggcgtgcgagattttttttgtattcgttgggagttcgcgtagggatcgttttatggtcggggttcggagtcgcgatttttggggggttttcgggatttgttatttttttggttttttgttcgtcgaattgttttttttacgggttgtcgtttttaatttggacgtgatgggtgttttgcgtaaggagggcgagttaggtagttttttcggtttttttgtggttttgtatcggtagttgtagtttcgattttagagttggtgagttatcgtattcgtttagagtcgttatgttcgagttatagatcgtttttttttttattttgtgggtttttttatttttttgttttttagttttattaagatttagattgtttatagatattttatattttaatttggagttttgttttatttggtttgcgtttgaagttgtatttttcggttttgagattagtattttgttttagggatgagttggaaagtaaggtttttgttttggtagcgaattattttttttttttgggttttttttttaatttgtatttttgatttagttttagggtttttggtttttttgttttttttaagggttgaattttttaagggagggagattgtttgtttttgtttagaatgggaggagatggaaaggatatagaagttgagggtgttatgagagggatgtatgtagggtagattttagaaataattttttgttagagtattgttatggatggaatgagggtagtagggtattggaaggttaggagagagtttttatttttgtggtttaagattacgggaagattgggagaggatttgtaggtttgttaatttgtagtaggtggtttggtgatagagagtggtagtaaattgaatttttaaagtattagtagtagtagtagtagtcgtagtagttgtagtagtgagagagatttaggaaggatgttggttaggttgttttttttttttttttttagtaaatttttaattttaggaattttagtagttgggaagggttaggaggagtaaggggtggaggataattttaattttttttaattagtttaggatttatgggagatggatatatttttgtgaggggtttgtgattggttatgttgtttgtatttttggtttttgttatatgtttgattgtaaaaagggaggttagaggtgaagaaagttttttatttgtttttgttagggggtttttttttttttaattagtgtttaagttatattaagtatttattattgggattaatgttgtttattgggattgttttttgtttttattgtcggtttgggggtagggggtagggataagagtttatttttttttatttgtttggggagtgggggtttagttttaatttttttttttttattatttttattatttggtagtagggtcggtggtttttaaaattttgggagagatagaaagtaacggattttatttttttttttgtttattatttgtttttttatttatttttgttttttttttttttttttttttttttttttatttgttagagttcgaggattggaggtttttttaggatatgttgaattttttaagttatttttaggtaaattttaggttatttttaatagtttggttttttgttattttttttttttttttgaaggtggtttttggtttcgttttttagagttaagttggggttttttttagagggtttgattgttttattttgtttttgttttagtagggggtgttttgttgttggggggcggggggtatgtgagaggttaggtatttgtttagtttttagtttttgagttgtaggtggtttgttttagtatttattgatgaaaaaaattttttgtttgttttgatgttttttagtttagttttgggatgagattttaaggtttaatttttgttgtgtggttttagttttatttattttttttaattgtaaaaaggatataaatatagtattattatatagggttgttgtgtagattaagagtttttaatatatataaaatgtttagaatagtgtatagttcgtagtgagtgttgtgaagtgttagtagtattgttatttttgtattgtgatttatagagcgttttatagagattttggatttaaaggtttggttagagggtttttttggttgagttagttttttaggttaagtattttttttagagggttatttagattgagaggggttaaagaggggttggatttgggttggggttttggagtgtgtggagaatcgagaagtgtagtggtcgtgggttatttttttgtttttatttagttgagtttttagggggtttttttgttttttagttgttaatatttttttttttttttttttgtttttttttttgtagtggttatattgtggttgtttagaagattggggtggttagggcgtatggtatgaagttaggaaggagtgtgtgtggttggattagaggtggagggattagagaggatgttgttgggtgtttttgttttattaaggatcgattggttttttttttattaagagcggattgggtatatttatgtatttagttttttttttttatatgggtttttttttttttttttatttttggtttttagaggagatgtgaatatagaataaggataatttatttgggtgtttagttatgtattgattagttgtgatattgggtatttttatgagtttataaaatgtgtgtgtttagtaaatatattttgatattttttatggggtaagtataaagatgaaaagatagtttcgatatttagagagatggttatttttatgtttggaggttgggggtattgttgatttgtttgaaggttgttatttatttatgtagggttgtattatttcgtttttttttttgtttagggtatttttatttttttattttttttttttttttttggggtggttttagtgttttagagataggttagttattgggtggagtgataaagtgttggagttaggtttatgtggatttgaattttagtattattgtttaatgtttttgagtgagtttttttatttgaaagataagaaaagaatttttattttataggattgttttgatgattaaatgatataatgtatgtgatttgtttattttggtgtttggtatatatgtggatagtgatgaatgttagttttttatatttttggtgtttagtttcggatttgacgttatagtaggtgttgaataaatatgatttttttgttttattagcgtttgatatagggtttggtatataatagatttttaataagtagttgaatgttaaatgtgtttttttttttttattattttttatattttttttttgttttgatattggttttgataagggatggtagttgttaagagatgaggaggagttgtgggaaggaagaatggttttttgttttttttttttattttattagagttggtatagtgttttatagatgtttgtttgtaatattgtttaatatggttttgggttttgttttttaggaagggagatggaggagaagagtgtgggagagaggcgttgaggtttgttttattgttatttttgagtttttttttttgtaaagagaggatttatggagttagttgggtgttagttattttattttattttcgtttttattttggtttgggggtttagttttaggggatttaggtagtttttatttttagtattgtgtttttttggggaagacggtttggttgtgattatggaaaattgttttgttaagaaagttgtagttgggaaagaggttgagggggaggtaggagagaagattgggtgggggtggaagggaaggagaaattatggatatggggagaaggaaggatggggaaggggatttaggatgtcgggaagagaatggggtagtattggaggtagaaggagaaatttgtttttatttttatgttagttagagtgattgatggaattttgggttggtatagtttttgggaggtggggtttttgttgggtttttgatgagggggtagtgggttcgtatttagttttttgtttggtttttgaagttggtttttgagttatattttgatgttagtttggggttttgttatttttgtttttagtatttttggtatttttggttgggttttaattggattgggttggggagtagggtagagtttggggatggggttaaggaggggatagggaaggtttatttaggaataggtgttgggaataggtagtttttttaaattagtattgttggtttggttgtttgggttggcgtgtatgtgtgtgtgtgtgtgtgtgtgtgtatttattgtgtatgttgattttttatttagatagtatgtatatgtaacgtgatgattgtatgattaagtatattaatttgtttttgttagggtttgagaaaattgatatttgttttttttttttagtttttgaatattttttttagtattgaggggttgggtttgggtagttttaatgagattgggttattttgatttttaatttttgtttttgtttttgtttttgttttattttgtagg

SEQ ID NO: 1058 - DNA, 9666 bp, Artificial Sequence
  chemically treated genomic DNA (Homo sapiens)
tttgtaagatggggtaggggtagggatagggataggagttagaggttagaatgatttaattttattagagttgtttaggtttaattttttagtattaaagagagtgtttaaggattaaagagaaggggtaaatgttagtttttttaaattttggtaaggataaattaatatgtttggttatgtagttattacgttgtatgtatatattatttggataagggattaatatatatagtagatatatatatatatatatatatatatatatacgttaatttaagtagttaggttaatagtgttggtttgaaagaattgtttgtttttagtatttgtttttgagtaggttttttttattttttttttggttttatttttaagttttgttttgttttttaatttagtttagttgaaatttagttagaaatgttaagaatgttgggagtaaaagtaatagggttttagattggtattagagtgtggtttagggattagttttagaggttaggtaagaggttagatacggatttattgtttttttattagggatttagtaaagattttattttttagaagttgtgttagtttaggattttattagttattttggttggtatggaggtagggataagtttttttttttgtttttaatgttattttatttttttttcgatattttgaatttttttttttatttttttttttttttatgtttatgattttttttttttttttatttttatttagtttttttttttgttttttttttagttttttttttagttataatttttttggtaggataattttttatgattatagttaagtcgttttttttaggggagtatagtgttgggaatggaggttgtttgggttttttggggttgaatttttaagttagagtgaaggcgggggtgaggtaagatgattgatatttagttggttttatgggttttttttttgtagaaggagagatttagaagtggtagtgggataaattttaacgttttttttttatattttttttttttatttttttttttggggggtaaggtttaaaattatgttaggtagtattatagataggtatttgtggggtattgtgttagttttgatggggtggagggggagggtagagagttattttttttttttataatttttttttattttttagtagttgttattttttgttagagttagtgttaagatagagaaggggtatagggagtagtagagaagagaagatatatttggtatttaattatttattgagagtttattgtatgttaagttttgtgttaggcgttggtgagataaggaaattatatttatttagtatttattatgacgttagattcgaggttagatattagggatataagaaattaatatttattattgtttatatatgtgttaagtattaggataggtaagttatatgtattatgttatttaattattagaataattttatgagataaggattttttttttgttttttagatgagaaaatttatttaaagatattaagtagtgatgttggaatttaaatttatatgggtttaattttaatattttgttattttatttagtgattgatttgtttttagaatattgagattattttagaaagggaaggagagagtggggagatgagggtattttgggtagaaaaggaaacggggtgatatagttttgtataaataaatggtaatttttaggtaagttagtagtatttttagtttttaaatatagaagtggttatttttttgagtgtcggggttgtttttttatttttgtgtttgttttatagggagtgttagaatgtgtttattgaatatatatattttgtggatttatagagatatttagtgttatagttggttagtgtatagttaagtatttagataagttatttttgttttatgtttatattttttttggaggttaaaagtagggaggaggggaggggtttatgtggaagaaagaagttgagtgtatagatatgtttagttcgtttttggtggagaagagattaatcgatttttagtggaataagagtatttagtagtattttttttagtttttttatttttggtttagttatatatatttttttttggttttatgttatacgttttaattattttagttttttggatagttatagtgtagttattgtagagagaaaagtaaaaaaaaaaaaaaaaaagtgttggtagttggggggtagagggattttttgggagtttagttaagtgaagataaaggagtagtttacgattattgtatttttcgattttttatatattttagggttttagtttaagtttagtttttttttggttttttttaatttgggtggttttttggggaggatgtttggtttggaaggttggtttagttagggaggttttttagttaagtttttggatttagaatttttgtaaggcgttttgtgaattataatataagaatagtaatattattaatattttatagtatttattgcgggttatgtattattttaagtattttatatatattaagaatttttaatttgtataataattttatgtagtaatattatgtttatattttttttatagttgagggaagtaaatgaggttggaattatatagtaaaggttagattttaaagttttattttagagttagattaaaagatattaaaataggtaagaagttttttttattagtgagtgttaaggtaggttatttgtaatttaaaagttagggattgagtaggtgtttggttttttatatatttttcgttttttagtagtagagtattttttgttggagtaaaagtagggtgaggtagttaggttttttgggaaaggttttagtttggttttgggagacggaattaggggttatttttagagaggagggggaaatgataagagattaagttattaaaaataatttagaatttgtttggaaatagtttagagagtttagtatgttttaaaaaggtttttagttttcgaattttgatagatggagaaggagggaggaagggagggagggagtaaaggtgaatgaggaagtagatggtaaatagaagaggagatgaagttcgttgttttttattttttttaaagttttggggattatcgattttgttattagatgatagggataatggaagaagaaagattagagttaggtttttattttttaagtaagtgaggagaaatgagtttttgtttttgttttttgtttttagatcgatagtagaggtagaagatagttttagtggatagtattgattttagtaatggatatttaatgtggtttaggtattggttgaagagagaaaagttttttagtaggagtaggtgagaagttttttttatttttggtttttttttttataattagatatgtagtaagagttaaggatataggtaatatgattagttataggttttttataaaagtatatttattttttatgggttttgaattgattagaaaaaattagaattgttttttattttttattttttttggttttttttagttgttgagatttttggagttggaaatttgttaaggaggaggaaggggagtagtttggttagtattttttttggattttttttattgttatagttgttgcggttattattattgttattagtattttgagggtttagtttgttgttattttttattattaagttatttattgtaggttggtagatttgtagatttttttttaattttttcgtggttttaagttatagaagtggaagtttttttttggttttttagtgttttgttgtttttattttatttatggtaatgttttagtaggaagttatttttggagtttgttttgtatgtattttttttatggtatttttaatttttatgttttttttatttttttttattttaagtagagatagatagttttttttttttggggaatttagtttttggaagaagtaggggagttagaggttttggggttggattaaggatgtaagttgggggaaaggtttagaagaaggagatggttcgttgttaagataagaattttgttttttaatttatttttaaagtaaaatattggttttagggtcgggaagtgtagttttagacgtaagttagatgaggtaaggttttaggttgggatgtgggatgtttgtgggtagtttaggttttggtggggttagaaaatagagaaatgaggaggtttatagagtggggagggggacgatttgtggttcgggtatggcgattttgggcgggtgcggtgatttattagttttggggtcggggttgtaattgtcggtgtagggttatagagaagtcgaagaggttgtttggttcgttttttttgcgtaaggtatttattacgtttagattgaaggcgatagttcgtgagaagagtagttcgacgagtagggagttaaaaaggtagtaaatttcggaggttttttaagggtcgcggtttcgagtttcggttatgggacgatttttgcgcgagtttttagcgaatgtaagggaaatttcgtacgttttaagttttaggtttttttaggcgcgtttttggtttttaaagtttcgttggttttttagacgttttttagacgttcgtttcgttagttttttcgttcgttcgtcgtttcgttatttcgtcgttttagtatcggttaggataattatagtagtcgtagtttcggcgtttatttcggttttcgttttttttttcggggacgttatttaggtttcgttttcggtttcgtttttcgttttcgcggtaggtggagatttaagttcgtttttaaggggatgtttaggttggtggttgggatggaaattagttttgttgattttttattattacgttttttaagtttagtatcgttttcggtttcgtttttgcgcggcgttttttttttttttttttttaattttatttttatttcgggagtggtggaggcggcgttttggaatgcggagggagagaagtatagatagaaagagaggggttgaaatagaggaaggagggtaagagatgagaagttgggaagacgttaaaagataatttgggaagagagatgtgtagatagagaggaaatgaaaggggagtcgttttgggtttgggtgtagcgtggtattttagtgttttttgtttttttatggttatatagagtattttttttgttgttgggattagatcgttgtttttttttattttattttatttttcgtttttagttcggtaatgattatagtagtgttagttatatcgttaggatttaagggaatagagaaaaagaggtaagaagagagagagaaattcgggagatacggggagtaaatggagaaatggaaaaaggaaaggaatagagaggaagaaagaagggtaagagattaattgataagggatggaatgaagggagaaaagaaaacgattggggatgattataggaagaggaaattaagtagtggggaggggagtgggtgttaaagaaggtaaagatgaaagagattggatttaagaggtagagggatgtaaagggtgtttttagttattagattcgttttaggattgtatattttttatttatgaaaggggatgggagggggtagagttttggattggtttagtaggatttgggtggggttgagatgggatttttatagggatttattggtttgttttttttttttttttttttttttaggttgggatagaggtaagggggtggggggatattttttaattttttgttatttataatttcgatatagaaatggggttagaaggagagataggaaataatttggtataatgggaatttcgaatgtttttattttttttttttattttttttgtttattggtgttggttttgtgaatatatatttgtttattttttttttttttttttattatttgattttgttttattttaaattttattttgttattatttttgtttttgttatatttggaattttttttagagtattttttaatgtttttagtgttgtttttgttttttaaatattattatatttttacgattttttttttttttttttttttttaaaagttttaataagtgttttattttttttttttttttgtgttttgttttttttattttattgtttaggattatatttttttgaaaataaaaaaaaagtgggtttttattttgttgttttgggatagtttttgttttggataagttaatagatatttggaagtttggttttttgttttttaatattatatttgtggttattttttttagagtattaatatatttttaaataggtattataaggaaatatatatgttgttagtagggttggtattaggattttatttttattatgttttttttattttttttaatattttagagttttagatagtagagaagagttgatatgggaatgtagaattgtaaaattaggatagaattgggattattgattttttgtttaggttttttcgttttcgatttagtttaaaatgtttttagagtttaagttgttttttatttgtatttgtagtttttgtttgtttttatttttattttattggtttttgtgatttagggttgaaattagatgttaagaatttgtttttgattttttttttttaaatatttgagaagttattttattattataggaggaaagattaggaaagaagagagagagaggttatttaaaattagtttggttataaatagaggggtaaaggagggaggggaatatataagagcgtgttagattagtttagtaaatttagatatgtagattttttttaaggagaaatgagattagaatgttggagtggaagataatatcgtaggtgaagagggaaattaagaaattagacggggtcgggcgcggtggtttacgtttataattttagtattttgggaggtcgaagtaggcggattatttgagattagaagtttaagattagtcggattaatacggtgaaattttgtttttattaaaaatataaaaattagtcgggtgtggtggcgggtatttgtaattttagttattttagagattgaggtataagaattatttaaatttaggagacggaggttgtagtgagttgagatggtattattgtattttagtttgggtgatagagattttatattagaaaaaaagaaaaaaaaaagaaattagaaggatttagagaatgcggtaagtttaatattaaaataaataaattgttagagaattttttgtattttagttaagagtttaggaattagttaaattaaaaattaatgttgagttgggtatagtggtttatgtttgtaattttagtattttgagaggttaaggtaggaggattatttgagtttaggagttggagattagtttgggtaatatagggagatttttatttttataaaaaatagaaaagttagttaaatttgtggttttagttatttaggaggttaggcgggagtgttatttgagtttaggaggtgaaggttgtagtgagttatgattttgttattgtattttagtttgggtgatagagtgagattttgtttttaaataaaaaatgttgaaattgtattattttattcgtatattatttttaaaatgataaaattatagaaatgaagattagattattggttgttaggggataaggatggaggggggtggggataaatataaaggaatagtataagggggtttttttgtggtgatgggttttgtattttgattgtggtggtgattatttaaatttatataagatataaaattgtatagaattataaataaataaataaatgtatgtaaaaaatggtgaaaattgagtgaggtttgtaggttagttaataatattgtattaatattaattttttggttttgattttatgttatagttatataagatgttattattaggggaaattgagtgaaaggtatataagattttatgtgttatttttataattttttttgatttataattattttaaaataatttttaagttagatatggtaattttagtattttgggagggagggaggtggattatttgaggttaggagtttgagattagtttggttaatatgataaaaatttatttttattaaaaatataaaaattagttgggcgtggtggtatatatttgtaattttagttatttaggaggttgaggtataagaatcgtttgaatttagaaggcggagtttgtagtgagtagagatagtattattgtattttagtttgggggatatagtgagattttgttttaaaaaaaaaaaaaaatttaaaaattttgtgtttttaaggatattattaataaagtaaaatgataatttatggaatagattatttattttattttatggaatagattaatatattgtattttagtttgggtaatagagtgagattttgttttaaaaaaaaagaaaaagaaaaagaaatgtggttagtatgattgagaaattgaattttttaaataaattaaatgtaaaaatgaaagattaataatttttataaaaatttttaaaattttagacgttgagaaatgtttagatttagttaagattttagttttttagtttttgtatgagtggaagttgaggttttttttagttttttttttttttaatatttttttttttattttgagattagtattttttagtttttttaaattatattttttgtaattgttgtttttagtttataagtaaatatttttagaatatatattttagggttaatttttttttttattttatttggtaatagagttttggagtttatgttttaaggttaggttttttcgttttaatatgtatattatgagaatttttttattttatttatttttttagtattggaatttttttgtttgtttttgaattttggttgtagttaaagtttgaattatgggagtggttgggaggaaaagaatataaatgtgattgagggaatttagtggggaaatagtttgatcgtttcggtttttgacgatttaaaagaaatttttaatatttgagaaggattgggaggttatttattaaagggagttatttggattgttttaagggttttttttttttgagtattggttttaggttaatatttggaatttagttatattattattaatttttttttttgaagtttagttagattttttagtatgtgaagttttgtttatttattttgtgtttttttttagtttttatttaatttttaataatttagtagtttttagttttgtttggtttagttagttagtttggagtttgttaattaaagttaattttgaaagagattttaaaagaagagggaaatgagtgaagaaaggagtgtggagttgtatttatttagtttaagggaaaataatttgagtaggaaatcgtaaggagaggtgagtagaaagagattttaaattttaagagttattttttagatagatatgtatgcgatttgtgtttatttttattaaggataagtgaagttgagttttaattgtagtagaaattaaggttagatagtgaataataaaggtttagaaaaagaatagatggaggataattttagagagattagatggggatattagatatagatattttatgttttttgtttagttttaggg

SEQ ID NO: 1059 - DNA, 6447 bp, Artificial Sequence
  chemically treated genomic DNA (Homo sapiens)
atatattttatagtgtttgaatttaaaaatttatattttttttgtaattttagagtaaaataaaagaatttggttggaattgttttatagagaattaaagaaattagtttgaattatttgattttaattgaatttttaaaagattgtttaatattttttaattattataagttagtttgtttttttttagtcgtttggtagtatagatgatagataattcgtttgaaaaaggtttttttagggtagtgatatttttttaggttgaacgggatttttttatcgtatagggagagtttgaagattttttttaattttttgtaaacgaatatagtttttttattttgttgtgttttaaatatttttatgttttggtttgtttgtttgtttgtttgtgtataaggatagggtattattttgtaatttaggttgtaggatagtggtttgattatagtttattgtagtttttattttttggatttaagtgttttttttattttagtttttcgagtagttaggattacgtgcgtgtattagtatatttggttaattttttatttttatttttagtagatataagggttttgttaagttgtttaggttggttttaaatttttgagtttaagtaattcgtttattttgattttttaaagggttgggattataggtgtaagttattatgtacggttaatattttttgttttttaatggtagtttaatttttttttttttgagatagttttatttttgttgtttagattggagtgtaatggcgtgattttggttttttgtaagttttattttttgggtttaagtaatttttttgttttagtttttcgagtagttgggattataggtatgcgttattacgttcggttaattttgtatttttagtagagatggggtttttttatgttggttaggttggttttgaatttttaattttaggtaatttattcgttacggttttttaaagtgttgggattataggtatgagtcgtggtgtttagtttattttttatttattttttattttttgagatggagttttgttttgttgtttaggttggagtgtaatggcgcgattttattttattgtaatttttgttttttgggtttaagttatttttttgttttagttttttaagtagttgagattataggcgtgtattattatgtttagttaatttttgtatttttagtagaggtagagttttattatgttggttaggttggtttcgaatttttgattttaggggttttgtttattttggttttttaaagtgttgggattatacgtgtgaattattgcgtttaatttttttaagtggtaaagttatatatttttattgtaaaaaaaaaaatgtagattatatagaaatgtataaattttattttatagagttaattattgtttaaagtatggttgtatattttttttaatttaataaatatatatatatatataattttatgtttattttttattgagatataatttatatattataaattattattttaaggtatataatttattaggtatagggttgtaattttagtattttgggaggttaaggagagaggattagttgagtttaggagtttgagatttgtttagatagtatagtgaaattttgtttttataaaaaatataaaaattagttgggtatggtggtatatatttgtagttttagttatttgggaggttgaggtgggaggattgtttgagttagggaagtcgaggttgtagtgagttatgattgtattattgtattttagtttgggtgataaaataagattttgttttaaaaatttaaaaaaaagaagtatagaatttagtgatttttaaatagatttataaaattgtgtaattattattatagtttatttttagaatattttattatttaaaatgaaattttatgtttattagtattcgttttttagtttttatttttttagtaagtattaatttgttttttgtttttttagatttgcgttttggatattttatttaacggagttagattatatgtgattttttttttgttggttttttttattaagtatatttttaaggtttatttatattgtagtatgtattagtattttattttttttttttttttgagatggagttttattttgttatttaggtaggagtgtagtggtacgattttcgtttattgtaatttttgtttttcgggtttaagagatttttttgttttagtttttcgagtagttggaattataggcgtgtgttattatattcggttagtttttgtatttttagtagagacggggttttattatgtcggttaggttggtttcgaatttttgattttagttgatttgtttgttttggttttttaaagtgttgggattataggtgtgaatcgttagtttgatttttttttataggtaaataatattatattgtatggttatattttattttgtttatttatttattagttgatagatatgtaggttgtttttagtttggggttagtgtgagttattatttatattgttatgagtatatatgtataagtttttgtacgaatatatgattttaatttttttgggtatatatttaggaggagaatttttgggttatatagtaattttatgtttaacgttttgtttttgttttttgagacggagttttattttgttgtttaggttggagtatagtggtgtgattttagtttattgtaatttttgttttttaggtttaagtaatttttttgttttagtttttcgagtagttgggattatagggcgtattattatatttagataatttttgtatttttagtagagacgggattttgttatgttgtttaggttggttttaaatttttgattttaggagtttttatgttagttttttaaagtgttgggattatagggatgagttattatgtttggtttatgtttaattgttttaaagaattgttgggttaggtgcggtggtttacgtttgtaattttagtattttgagaggttgaggcgggtaaataatttgagtttagaaatttaagattagtttgggtaaggtagagagatttttatgtttataaaaaataaaaaagtagttaggtgtggtggttcgtatttgtagttttagttatttaggacgttgaggtgggagaatgattcgagttcgtgaggttgaggttgtagtgagtcgagattatattattttagtttaggtaagagtgagatttttttttaaaaaaaaaaaaaaaaaaaaaaaaaaaaaaagaattattaaaatgttttgtatagtagttacgttattttatatttttgttagtaatgtgtattaggtttttagtttttttatatttttattaatttttattttttttgttttaaattttaattattaaagtaggtgtaaagggtattttattgcggttttgatttgtatttttttaatgattaatagtgttaagtattagtttatgtgtatgttggttatttatatgttattggagaaatgtttatttaaatcgtttgtttatttagaaatttaggtaggttggtttgagtgtagtggtgtttaaaattaatttttttttgagataaagttttattttgtcgtttaggttggaatgtaatggtgagattttggtttattataatttttattttttgggtttaagtaatttttttgttttagttttttaagtagttgggattataggtatgcgttattacgttcggttaatttttgtatttttggtagagacgggggtttttttatgttggttaggttggtttcgaatttttgattttaggtgatttatttgtttcggttttttatagggttaggattagaggtgtgagttatcgtattaggtcgtttaaaattaatggagtataattagttattaatatttttgttttttttttattttttttgttttatttgattagtttaaaataaataaatttaaaaaattgggtatagtggtttatatttgtaattttagtattttgggaggtcgaggtaggaggattatttgagtataggagtttaagattagtttgggtaatatagtgaaaaattattttaaaaaagaaaaattagttaggtatggtggtatgtatttgtggttttagttatttaggagtagaggtgggaggatcgtttgattttgggagtttaaggttgtattgagttgtgatcgcgttagtgtattttcgtttgggtgatagagtaagattttgttttaaaaaatttaaaataaaataaaaaaaattggttatttgtttttttattgttgaattataagagttttaaaaaatatattttggaaataaattttttattagagatatgatttgtaaatattttttttaattttttttttttttaaagataaagttttattttgtcgtttaggttggttttgatttttggttttaagagatgtttttatttttattttttgaagttttaaagggttggaattatagttagtgagttattgtatttagtttttaattttttagattttatattttagaattaaaatgggttaaatatattgttttgtaatttgtttttttttttaatagtagtttatgtatattttttaaggtttagagaaagtttttatttttttttcgttttattttttttttttttatttttttttattgttgtatagtattttattgtaattttgttattgtttattagattagttttttgttgagttttatagagtttttagttgggatgttagtgagaaattatgatagtagtggagattgttatttttttgatatgttgttagtttttggatgatgtgaaaatgtaagtaggtataggaaatgtttttaatttgtttatattttttttttgaatttttgcggttttataatttttgtaggtatattttttttttcgtttgttagtgttattagtttgttgtttttgtgagaaagtattattgtaagaggttaaagggtatgattattttttttttttattttgtttaggttgttagtaaattttacgggttttttgacgttgtttttggggttataggtttttcgagtgttggaaggatgaaggatttttgtattattgtgatggttatggcgttgttgtttgggtttttttttttcggtaggtaagggaggaggtaggggaagggatatgtgtttgtgattagagaaattgtagggtttggtgtagttggagtaaataaggagttgttttttaaaagtgggattggttttagggatatggggtttagggattttggaaggagaaaggggagagtggggaaataaaagaaataaataagtaaggggtggaggtaaagatagagaagggagtataagaaggggtagtgggttttttaaaaagatagatagggttaggcgcggtggtttacgtttgtaattttagtattttaggaggttaaagtgggtagattatttgaggttaggaatttaagatagattggttaatatggtaaaatttcgtttttattaaaaatataataaaattagtttggcgtggtggtataggtttgtaattttagttattcgggaggttgaggtatgagaattattttattttatgaggtagaggttgtagtgagttaagttcgtgttaatgtattttagtttgggtgatagagtaagattttgttttttaaataataaataaataaaaggtagatagttattgagtagttagagttgggaggagggtgttgggttttggggttatttttgcgcgttttaggtaagtttttttttttttttagttttatattttttatttaaataaatgaaggtttagtttttatgatattttaggatgttttgaattaaattttatgcggggagagaaagtagggcggaaaggatagttgggtgtgttagggcgtttgggtaggttgattgagggggaagggagttgggatttatagatgtttcgaaagattggttcggtggggtggggaggtagttttttagggattaggggagttataatttgagattgtgggaggaggcgtttgggttttatgatcgtaggagaagtgggtggtagaggcgtattcggttcgggggtatttttattttggtttttgtttgagaatttggttattttttgttttggggttttttgggtttgtttttttttttggagtttttaattttttatttttttttttttgtagagaggttaaacgggaagttgtatttttaggttttgggaagagtttttagagttttaggggggtcgggagttgttttttttatatttttagaagttaacgttttggagcggaagcgtagggtgcgggtggtttggggagcgatattcgggtgggtttgggatcggttatttgttgggtacgtgtaggggcgggggtttttcggtcgtagttgacgatttttgttttttttagt

SEQ ID NO: 1060 - DNA, 6447 bp, Artificial Sequence
  chemically treated genomic DNA (Homo sapiens)
gttgaggaaggtaagggtcgttagttgcgatcgagggattttcgtttttgtacgtgtttagtaggtggtcgattttaggtttattcggatgtcgttttttaggttattcgtattttgcgttttcgttttagggcgttgatttttgggaatatggaaggagtaattttcggtttttttagagttttgaaagttttttttagggtttgaggatataatttttcgtttggtttttttgtaaaaaaggaaggatgagaagttagaggttttagagagaggagtagatttaaggggttttaaggtagagggtgattaagtttttaggtagaggttaagatggggatgttttcgagtcgggtgcgtttttgttatttattttttttgcggttatggggtttaggcgtttttttttatagttttagattgtagtttttttgatttttggggggttgtttttttattttatcgggttagtttttcggagtatttgtagattttagttttttttttttttagttagtttgtttaggcgttttggtatatttagttgtttttttcgttttgtttttttttttcgtatggagtttagtttagagtattttagaatgttatggaggttgggtttttatttgtttagatgaagggtgtggggttggaaaggggaaaggatttgtttaaaacgcgtagaggtggttttagaatttagtattttttttttagttttagttatttaataattatttgttttttgtttgtttgttgtttaagagatagagttttgttttgttatttaggttggagtgtattggtacgagtttggtttattgtaatttttgttttatgggatgaaatgatttttatgttttagtttttcgagtagttgggattataggtttgtgttattacgttaagttaattttattgtatttttagtagagacgaggttttgttatgttggttagtttgttttaaatttttgattttaagtaatttgtttattttagttttttaaagtgttgggattataggcgtgagttatcgcgtttggttttatttgtttttttaaagaatttattgtttttttttatgtttttttttttgtttttgtttttattttttgtttatttgttttttttatttttttatttttttttttttttttttaagatttttgggttttatatttttaaggttaattttatttttagggggtagttttttgtttattttagttgtattaagttttgtagtttttttggttatagatatatgtttttttttttgtttttttttttgtttatcgaagaaaaagaatttagatagtagcgttatggttattatagtgatgtaggaattttttatttttttagtattcgagggatttgtggttttaggggtagcgttaggaggttcgtgggatttgttggtaatttagatagggtgaaagaggaaaatgattatgttttttggttttttatagtggtatttttttatagaggtaataggttggtgatattggtaggcggggagggaggtgtgtttgtaggagttgtgaaatcgtaggggtttagggaggaagtgtaagtaagttagagatattttttgtgtttgtttgtatttttatattatttaaaagttgatagtatgttagggagatgatagtttttattgttgttatggttttttattaatattttaattaagggttttgtaaagtttagtagaggattggtttaataaatagtggtaaaattataatggaatgttatgtagtagtgaaaaagaatgagggaaggaaaaataaaacggggagaaagtgagagttttttttggattttgaaagatgtatatgaattattattaaagaaaagagtagattatagaatagtgtatttaatttattttggttttaaaatgtaaaatttaaagaattggaggttgggtgtagtggtttattggttgtaattttagttttttggggttttaggaggtggaggtaagagtattttttgaagttaggaattaagattagtttgggcgataaagtgaaattttgtttttaaaaaaaaaaaaaattggagaaaatatttgtaaattatatttttaataagggatttgtttttagaatatattttttaaaatttttataatttaataataaaaagataaataattagttttttttgttttgttttaaattttttgagataaggttttgttttgttatttaagcgagagtgtattggcgcgattatagtttaatgtaattttgaatttttagaattaagcgatttttttatttttgtttttaagtagttgaaattataggtgtatgttattatgtttggttaattttttttttttgagatggttttttattatgttgtttaggttgattttgaatttttatgtttaagtaatttttttgtttcggttttttaaagtgttgggattataggtgtgagttattgtgtttagttttttaaatttatttattttaggttagttaagtgaagtagagggagtggagaaggaataaagatattggtaattggttgtgttttattagttttaaacggtttggtgcggtggtttatatttttaattttagttttgtgggaggtcgaggtaggtggattatttgaggttaagagttcgagattagtttggttaatatggagaaattttcgtttttattaaaaatataaaaattagtcgggcgtggtggcgtatgtttgtaattttagttatttgagaggttgaggtagaagaattgtttgaatttaggagatggaggttgtagtgagttaagattttattattgtattttagtttgggcgatagagtgagattttgttttaaaaaaaaattagttttaaatattattgtatttagattaatttatttaagtttttaaatgagtaaacggtttgagtagatatttttttaatgatatataaatggttaatatgtatatgaattgatatttaatattattagttattagagaaatgtaaattaaaatcgtagtgagatattttttatatttattttgatggttagagtttaaagtaaaggaaataagagttagtgaagatgtgaagaaattggaagtttggtgtatattgttggtagaaatgtaaaatggcgtgattgttgtgtaaaatattttgatggttttttttttttttttttttttttttttttttttgagagagggttttatttttgtttaggttggagtggtgtgatttcggtttattgtagttttaattttacgggttcgagttatttttttattttagcgttttgagtagttggaattataggtgcgggttattatatttgattatttttttattttttgtagatatgggggtttttttattttgtttaggttggttttgaatttttgagtttaaattatttgttcgttttagttttttaaagtgttgggattgtaaacgtgagttatcgtatttagtttaatagttttttaaaatagttaaatataggttaggtatggtggtttatttttgtaattttagtattttgggaggttgatatgagaatttttgaggttaggagtttgagattagtttgggtaatatggtaaaatttcgtttttattaaaagtataaaaattatttgggtgtggtggtgcgttttgtagttttagttattcgagaggttgaggtaggagaattgtttgaatttgggaggtagaggttgtagtaaattaagattatattattgtattttagtttgggtaatagagtgagatttcgttttaggaaataaaaataaaacgttaaatatagagttattatatgatttagaagttttttttttaggtatatatttaaaagaattgaaattatatgttcgtataaaaatttatatatgtatgtttatagtagtatgaataatgatttatattagttttaaattggaaatagtttatatgtttattagttgataaatggataaataaaataaggtatagttatgtaatgtaatattatttgtttgtaaaaaagaattaggttggcgatttatatttgtagttttagtattttgggaggttaaggtaggtaaattagttgaggttaggagttcgagattagtttggtcgatatggtgaaatttcgtttttattaaaaatataaaaattagtcgggtatggtggtatacgtttgtaattttagttattcgggaggttgaggtaggaaaattttttgaattcgggagatagaggttgtagtgagcgaagatcgtgttattgtatttttgtttgggtgatagagtgagattttattttaaaaaaaaaaaaaaagtagagtattggtatatgttataatatgagtaagttttgaaaatatgtttagtgaaagaagttagtaaaaaaaaagttatatatagtttgatttcgttaagtgaaatatttagaacgtaaatttagagagatagaaagtaagttggtgtttgttggggaaatggaggttagggagcgagtattaatgggtatagggttttattttaggtgatgaaatgttttggaaatagattgtggtaatgattgtataattttgtgaatttatttaaaaattattgaattttatattttttttttttaaatttttgagataggattttgttttgttatttaggttggagtgtagtggtgtaattatggtttattgtagtttcgatttttttgatttaagtaatttttttattttagttttttaagtagttggaattataggtgtgtgttattatgtttagttaatttttgtattttttgtagagatagggttttattatgttgtttaggtaggttttaaatttttgggtttaattgattttttttttttagttttttaaagtgttgggattatagttttgtgtttggtgaattgtatattttagaatggtgatttatggtatgtgaattgtattttaataaaaaataaatatgaaattatatatatgtatatatttgttaaattggaaaggatatataattatattttaaatagtggttagttttgtaaaatgagatttatatatttttatatggtttgtatttttttttttataatgaggatgtataattttattatttaaaaaaattaggcgtagtagtttatacgtataattttagtattttgggaggttaaggtgggtagaatttttgaggttaggagttcgagattagtttggttaatatggtgaaattttgtttttattaaaaatataaaaattagttgggtatggtggtgtacgtttgtaattttagttatttgggaggttgagatagaagaatagtttgaatttaggaggtagaggttgtagtgagatgagatcgcgttattgtattttagtttaggtaatagagtaagattttattttaaaaaataaaaaataaataaaaaataggttgggtattacggtttatgtttgtaattttagtattttgggaggtcgtggcgggtggattatttgaggttgggagtttaagattagtttgattaatatggagaaattttatttttattaaaaatataaaattagtcgggcgtggtggcgtatgtttgtaattttagttattcgggaggttgaggtaagagaattatttgaatttaggaggtggagtttgtagggagttaagattacgttattgtattttagtttgggtaataggagtaagattgttttaaaaaaaaaaaaattaaattattattaaaaaataaaaaatattggtcgtgtatggtggtttatatttgtaattttagttttttgggaggttaaagtgggcggattgtttgagtttaggagtttgagattagtttgggtaatttagtaagatttttgtgtttattaaaaataaaaataaaaaattagttaagtgtgttggtgtacgtacgtagttttagttattcgggaaattgaggtaggaggagtatttgagtttaggaggtagaggttgtagtgagttgtgattaggttattgttttgtagtttgggttatagagtgatattttatttttatatataaataaataaataaataaattaaaatataaaaatatttaaaatataatagagtgaaggaattatattcgtttataagaaattgggaaggatttttagattttttttgtgcggtgaagaaatttcgtttaatttggaaagatgttattgttttgaggaagttttttttagacggattatttattatttgtattgttaggcggttggaaaaggataagttggtttgtggtaattagaaggtattagatagttttttgaaaatttagttaagattagataatttaggttgatttttttgattttttgtagagtagttttaattaaatttttttgttttgttttgaaattataaaaagagtataagtttttagatttaaatattatggaatgtgt

SEQ ID NO: 1061 - DNA, 6696 bp, Artificial Sequence
  chemically treated genomic DNA (Homo sapiens)
tttgattttaggtgatttatttatattagttttttaaagtgttgggattataaacgtgagttattatgttcggttagtaatttgtttaattatatattttttataagtttttttttttttttttttttttttttttgagataaggttttattttgttgtttaggttggagtgtagtagtgtgattatggtttattgtagtttttaatatttgggtttaaaatgtttaagggatattttgcgaagtgcgtttttagggagatagtttgattttttatatttgtttgatatatattaatgtttaattaattaattatttatttaattaaaaaaatttaagagacggggttttattatgttgtttaggttagagtatagtgtatggtggtatgattatagtttattgtaatttcgattttttgggtgtaagtgatttttttgttttagttttttgagtagttgggattatatgtgtatattattatattagataattaaaaaaaaattttttttaagagatagaatttttttatgttgtttaggttggttttgaatttttgggtttaagcgatttttttattttggatttttaaagtgttggtattataggtagtgagttattgtgtttggtattagtttttttttttttttatttttttattagtgttttcggaattattttttagataaattatttatatttgaagttttgttttagagtttatttataggggaaattaagttaagattttattaagagtggggatgggggataggtaggagggaatagttaatagtttatagatatgtttttatttacggttattaggttaggtgtatatttggtggtggtttattgagaaagtttttgtaggttggatagttagtttgagattttgtttatgtttttatagagagtggatttttggttattgtttagggtaaggaggggtttttacgtttgagttcgagtagtttttatagtggttagagtgtgaaaattttttttaaagtaaatttagttgatttattaaattttttttcgggtattttggttggtatttttttattttgggtttatgatttcgttcgttttttttttagtttttttatttgttaataaatataggtaatttgttgttttaaattatttattggtattttttatgattatgagttttttttttgtataaaggtttttttttttttttttttttgagatatggttttgttttgttgtttaggttggagtgtagtgttgaggttatagtttattgtagttttaaatttttgggtttaagtgatttttttgttttggttttttatagtattgggattataggtatgagttattgtatttagtttatataaatgttttaagtataaatgatatagaaaagaatattaaagttattttgtagtagattgaatataattataaattttttttattgggaggtgggatttgtgttttttttgtttgaatgtggatgagttttgtgattgtttgattaatggaatgtggtgtagatgatttggcgttagtttttagattaagattttagtagtttggaaatttttgttttttgtttgttggaatatttgtttttgaagtttagttattatgttgcgagaagtttaagttatatggagagggtacgtgggggtgtttaggtgatagttttaattgagtttttagtttacggttaattgttagttgtgggagtgatttattttgggagtttagtttaattgagttttggattattttagttttggttgtgattcgattgtaattatgtgagagatttcgttgagaattgttgaggttaggagatttatagatacgcgagagattataatatgttgttgtttttaattatgaagttttggagtagttcgttttgtagtaatagatattggaatatatttgtaatttttttattttggagataacgattattaatatttggtttttttgtatatatatatatatatatgatttatttttgtatgtatgtatttatttatttaattttaattttttattttttgaaattgagttaagttttattgtttaggttggagtgtaatggtgtaattttagtttattgtaatttttattttttaggtttaagtgatttttttgttttagttttttaagtaattaggattataggtgtttgttattacgtttggttaattgttgtatttttagtagagatggggttttattatgttggttaggttggttttgaatttttaattttaggtgatttttttattttagtttttcgaagtgttgggattataggcgtgtttgtatatattatatgttttgtttatatatattttagagatagggtttggttttgttttttaggttggagtgtagtggtgtaattatattttattgtagttttaatttttttggtttaagcgatttttttattttagtttgttgagtagttgggattataggtgtgtattattatgtttagttaatttttaaatatttttttgtagagttagggttttgttgtgttgtttaggttggttttgagtttttgagtttaaatgatttttttgttttggttttttaatgtgttgagattataagtaggagttattatatttggttatatataaaaattataaatagataatttttaattaaatgtatataattttaattgttttttttttttttagttagtaagtatttttttttatttagttatcgggaaagtagaattagaggtaaaagaaaatgtgttgaatggtgaaattttgtttttattgaaaatataaaaaattagttaggcgtggtggtaagtatttgtatttttagttattcgggaggttgaggtaggagaattatttgaattcgggaggtagaggttgtagtgagttgagattacgttattgtattttagtttgggcgatagagggagatttcgttttataaaaaaaaaaaaaaaaaaaaaagaaaatgtgttgagaaagagtgaaaaaaattattggtttgagaattatattggcggttatataaaggtgaggtttgtgttttatgtatgtgtggaaggatatttatttttttgtgtttttgaaaatagaattaaaagtgatagatataggggagggtaaggatatattatcgagtgaagtattattgaattatttttttgtggaatatttaggtttttttagttttttatattaataataatgttgtaatgaataagtttgtaaatatatatatatatatatatatatatatatatatatattttttttttttttttttttttttagagataagagttttgttttgtcgtttaggttggagtgtagtggtataatttttgtttattgtaattttcgtttttagggtttaagtgattttgttgttttagttttttaggtgggattataggtgtttgttattacgtttggttaatttttttgtttttttagtaaagatgaggttttattatgttgggtaggttggttttaattgttgattttaagtgagttatttcgttttagttttttaaaatgttaggattataggtatgagttatcgtatttagttaagtttgtatatatatttttgattatattttttaattatttttaggataaattattagaagtgaaaatttttgggtgaagagtttgaggtttttatatatatatatatatatatatatatatatatatatatataaaaataggttggatgtagtggtttatatttgtaattttagtagtttgggaggttgaggaaggaggattatttgagtttaggaggttgagaatagtttgaataatatagtaagattttgtttttataaaaaatttaaaaaaaattagttggttatggtagtatgtgtttgtagtattagttattcggaaggttgaggtaggaggatcgtttgagtttaggaggttgattgaagttgtagtgagttgtgattatattattgtattttagtttgggtaatagagttagattttgtttttaaaaaaagtataaaataatatttaaaaagtattaggtatgtttgtatttgagttgtttttgttgatggttataaatgaggatagttttggttgaagggcgtttttatttttatgggttgaaggagggatattttgtaaagtgtgtttttaggaagatatagagttttattttttatatttgtttgatttgtattaatgtttgtttatttatttatttaattttttttttgagatagagttttattttgttatttgggttggagtgtagtggtattattgaggtttattgtagttttagatttttgagtttaaataatttttttgttttagtttttggagtagttaggattataggtatgtgttattatgtttggttaattttttaaatgtatttttttgtagagtcggggtttttttatgttgtttaggttggagtgtagtggtgtgattttagtttattgtagtttggatttcgggtttaagtaatttttatattttagtttgtttagtagtaggggttataggcgcgtattattatgtttagttaattaaaaatatttttttgtagagatagggtttttttatgttgtttaggttggttttaaatttttaggtttaagtaatttttttgttttggttttttaaagtgttggtattataggcgtgagttattgcgtttggttcgtattaatgtttagaatacgaattttaggaggtaggttaagtttatttagtttgtttatatgtttgggttaatttaagaaataagtgggtgataaatggtattttttggatagtggtattgattttgaaagtttgggttaggaagttggggaggaagggtgggtaggttgtgggtagttttgggcggaagattaggtagggttatgtgtttattgagttttcgttttttttttttgaatttttgatagatttttgttttttatttttttttttttgtttttttttgttttggtggtttttttgtggttttttagtggtgtttgtaatttttggtttatttttttttaggttttggttttttttagttatggtttttagagtttttttgttaataggtgtatgggggtggggtgggggattttgggtggggaggagggtaatttttgggtttgttataaatagagggtttagaatatgtaggagttagtttggggagaggtaaaggggatttggggaaggagaaagggtttaagaagaagtagggagaatagttagatttagataggttggttagggaagtttggatgaatgattatatttatggattgtgtaaggttgtttgtcggtttttttgttttatatatgaggagacggaggtttagggaggagaagtgatatggtttagggtgcgtagtaggtgtgagattttttttttgagtgtttttttttggatttttttttattatttttattttgttttcggttttattttttaaggtttcgggtgtaaatgtttgttgaatgattgatgaatgaaaatgatttgagtttgttattttttatgtttatatgttgtggaaaatgaaattttttttaaaagggaaggaaatatttgagagttgtataggaaggaaattatttaattaagaatgtatagaaattttattgttgggtaaattatcgttgtgatattgggggaagaagttatttaggtgtttagaagggaggttggaatttagagtaggattggacgtgttttacgacggtggtttttaggttaggagttagtaaatagtggtttgggggttcgatatggtcgacgatttgtttttgtataatttgttagttagagattgaagatgaatattgataatcgatttgatgatagggagtattatttttaaagaattttatttgttttatttgtaaattcgtattataaataaattgtatttaattattatgtttgaaatttttttaatgataaatttgtggaaaagtattttttgttttgttatataagtatttgtataatatattttattagttttttggtttgtaaaatttaaaatttattatttggttgtttatagaataagtgtgttaattttcgttttaggttaatagagttggatttgggaggtagatatttggatgttgggttagttagggtgatcgaatggatgggaaagggaatggagtaggaagatatgttgttatttttttttttttttttgatatagggtttttttttgttgtttaggttgtagtgtagtggtatgattatggtttattgtagttttgattttttgggtttaagtaatttttttattttagttttttgagtattattatattcggttaattttttattttttgtagagatggggttttattgtgttgtttaggttggttttaaatttttgagtttaggtgatttttttacgttagttttttaaattattgggataataggtttgagttattatatttagttattgtttttttttaaattattattagtttttgttttttttttgtatttaattttgagataggatttttttttgttgtttaggttggagtgtagtggtataattagggtttaagtgatttttttgttttagttttttaaagtgttaggattatagtttttaattggtatgttatttttttttgtttgattttttttttattttttttttagt

SEQ ID NO: 1062 - DNA, 6696 bp, Artificial Sequence
  chemically treated genomic DNA (Homo sapiens)
gttaaagggagaatgggggaaggattaagtagaggaaagtagtatgttagttaggggttgtagttttagtattttggagggttgaggtaggaggattatttgagttttgattgtgttattgtattttagtttgagtaatagagagagattttattttaaaattaaatataaaaaaaaaataaaaattaataataatttaaaagaaagtaatggttgggtgtggtggtttaggtttgttattttaataatttaagaggttgacgtgggaggattatttgggtttaggagtttaagattagtttaggtaatatagtgagattttatttttataaaaaataaaaaattagtcgggtgtagtggtatttaggaggttgaggtgggaggattgtttgaatttaggaggttaaggttgtagtgaattatgattatgttattgtattatagtttgggtaatagagaaagattttgtattaaaaaaaaaaaaaaagatagtagtatgtttttttgttttatttttttttttatttattcggttattttaattaatttagtatttagatgtttgttttttaggtttagttttgttagtttggggcggggattagtatatttattttgtaaatagttagatagtaaattttaggttttgtagattaagaggttgatagaatatgttgtataagtatttatataataagatagaaaatatttttttataaatttgttattagggaaattttaaatataatgattgagtataatttgtttgtaatacgggtttataaatgagataaatagaattttttgggggtggtgttttttattattaaatcgattattagtgtttatttttaatttttagttggtaggttgtgtaaaaataggtcgtcggttatatcgggtttttaggttattgtttgttgatttttgatttaagaattatcgtcgtggggtacgtttagttttgttttgaattttagttttttttttgagtatttaaatggtttttttttttagtgttataacgatgatttgtttaatagtgaagtttttatatatttttaattagataattttttttttatgtagtttttaagtattttttttttttttgaggagaattttattttttataatatataagtataaaaggtaataaatttaaattatttttatttattagttatttaataaatatttgtattcgggattttggaaaatagaatcggaggtaaagtggagatggtgagaggggatttaggaggaagtatttaggaaaggggttttatatttgttgcgtattttgggttatgttattttttttttttgggttttcgtttttttatgtgtgaagtaaggggatcggtaagtagttttgtatagtttatgaatgtggttatttatttaggtttttttggttagtttgtttgggtttagttgttttttttgtttttttttgaattttttttttttttttaaattttttttgtttttttttagattgatttttatatattttgggttttttatttatgatagatttaaaagttatttttttttttatttagagttttttattttatttttatgtatttgttaatagaaggattttgagagttatggttggaaggagttagaatttggaaggaggtgaattaggggttgtaggtattattgaggaattataaggaagttattaaagtaaagaagggtagaaaaggagaagtaggaggtagaagtttattagagatttaaaggaagagggcggaggtttagtgagtatatagttttgtttggtttttcgtttaggattgtttatagtttgtttattttttttttttagttttttgatttaaatttttaaagttaatattattatttaaaaggtgttatttgttatttatttgttttttgggttggtttaagtatatgaataagttgaatagatttagtttgttttttggaattcgtgttttaaatattaatacgggttaggcgtagtggtttacgtttgtaatgttagtattttgggaggttaaggtaggaggattgtttgagtttgggagtttgaaattagtttgggtaatatagagagattttgtttttataaaaaaatatttttaattagttgggtatggtggtgcgcgtttgtagtttttgttattggataggttgaggtgtgagaattatttgagttcgaggtttaggttgtagtgagttaggattatattattgtattttagtttgggtaatatagggagatttcgattttataaaaaaatatatttaaaaaattagttaggtatggtggtatatgtttgtagttttagttattttagaggttgaggtaggaggattgtttgagtttaggagtttgagattgtaatgagttttaataatgttattgtattttagtttaggtgatagagtgagattttgttttaaaaaaaaaattaaataaataaataagtaaatattaatatagattaaataagtgtaggaggtaaaattttgtgtttttttgaaaatatattttgtaaaatgttttttttttagtttatggaaatggaagcgttttttagttagagttgtttttatttgtagttattaataaagataatttaagtataggtatatttggtgttttttaaatattattttgtgttttttttagagatagagtttagttttgttgtttaggttggagtgtagtgatgtaattatagtttattgtagttttaattaattttttgggtttaagcgatttttttattttagtttttcgagtagttggtattataggtatatgttgttatggttagttaattttttttaaattttttgtagagataagattttgttatgttgtttaggttatttttaattttttggatttaagtgattttttttttttagttttttaaattgttgagattataggtgtgagttattgtatttagtttatttttgtgtgtgtgtgtgtgtgtgtgtgtgtgtgtgtgtgtgtgtaaaggttttaagttttttatttaagaatttttatttttagtaatttattttaagaatagttaagaagtgtagttaaaaatatatgtataaatttggttgggtgcggtggtttatgtttgtaattttagtattttgggaggttgaggcggggtggtttatttgaggttagtaattgaaattagtttgtttaatatggtgaaattttatttttattaaaaagataaaaaaattagttaggcgtggtggtaggtatttgtaattttatttgggaggttgaggtagtagaattatttgaattttgaaggcggaggttgtagtgagtagagattgtgttattgtattttagtttaggcgatagagtaagatttttatttttaaaaaaaaaaaaaaaaaaaaaaaatatatatatatatatatatatatatatatatatatatttgtaagtttgtttattgtagtattattgttaatatgaaaagttgaaaaaatttgaatattttatagaggaatggtttaatgatattttattcggtgatatatttttatttttttttgtgtttgttatttttaattttgtttttaaaggtataggaaaataggtatttttttatatatatatggaatataaattttatttttatgtgatcgttaatgtgatttttaagttaatgattttttttatttttttttaatatatttttttttttttttttttttttttttgtgaaacggagtttttttttgtcgtttaggttggagtgtagtggcgtgattttagtttattgtaatttttgtttttcgagtttaagtgatttttttgttttagtttttcgagtagttgagaatataggtgtttgttattacgtttggttaattttttgtatttttagtagagatagggttttattatttaatatatttttttttgtttttagttttattttttcgataattagatggaaaaaaatgtttgttggttgaaaaaaaaaaaagtaattaaaattatgtatatttggttaaaaattatttgtttataatttttatatatagttaggtgtggtgatttttgtttgtaattttagtatattgggaggttaaggtagagggattatttgagtttaggaatttaagattagtttgggtaatatagtaagattttgattttataaaaaaatgtttaaaaattagttgggtatagtgatgtatatttgtggttttagttatttaataggttgaggtgggaggatcgtttgagttaaggaggttgaggttgtagtgagatatgattgtattattgtattttagtttggaaaatagagttagattttgtttttaaaatatatataggtagggtatgtaatatatataggtacgtttgtaattttagtatttcgggaggttgaggtgggaggattatttgagattaggagtttaagattagtttggttaatatggtgaaattttatttttattaaaaatataataattagttaggcgtggtggtaggtatttgtaattttagttatttgggaggttgaggtaggagaattatttgaatttgggaggtggaggttgtagtgagttgagattgtattattgtattttagtttgggtaatagagtttgatttagttttaaaaaataaaaaattaaaattaaataaataagtatatatatataaaaataaattatatatatatatatatatgtaggaaaattaaatgttaatagtcgttatttttaagataggaggattataggtatgttttagtatttattgttgtagagcgagttattttaaaattttatagttaaaaatagtagtatattataatttttcgcgtatttgtgaattttttggttttagtagtttttagcggggttttttatatgattgtagtcggattataattagggttagagtaatttaaagtttagttgggttgggtttttaaaatgggttatttttatagttggtagttggtcgtgggttaggagtttagttggggttgttatttgggtatttttacgtgttttttttatgtggtttgggtttttcgtagtatggtggttggattttaagagtaagtgttttaatagataggaagtagaaatttttaggttattaaggttttgatttggaaattggcgttaagttatttgtattatattttattgattaggtagttatagagtttatttatatttaagtaaaggggatatagattttattttttaatgggaggaatttgtggttgtatttaatttgttataagatgattttaatatttttttttatattatttgtatttaaaatatttatataggttgggtgtagtggtttatgtttgtgattttaatgttgtgggaggttaaggtaagaggattatttgagtttaggagtttgaggttatagtgagttatgattttaatattgtattttagtttgggtaatagagtaagattatgttttaaagagaaaaaaaaaaaaagatttttatataaaaaaaagatttataattataaaaaatattaatagataatttaaaataataggttatttgtatttgttagtaggtaaagaagttgaggaaaggacgaacgaagttatgagtttaagatgagaagatattaattagggtgttcggggaggagtttagtagattagttgggtttgttttgggaaaagtttttatattttggttattatgggggttgttcgaatttagacgtggaggtttttttttgttttgaatagtggttaagggtttattttttgtaaaaatataggtaagattttagattggttgtttaatttgtagaggtttttttaatgagttattattaagtgtgtatttgatttggtgatcgtgggtggggatatatttataagttgttggttgtttttttttatttgttttttatttttatttttgataaaattttagtttgattttttttataagtggattttgagataaggttttaagtgtaagtaatttatttggaaggtgatttcggaaatattggtgggaaagtgaggaaaagaaggagttaatgttaggtataatggtttattgtttgtaatattagtattttgggagtttagagtgggaggatcgtttgagtttaggagtttaagattaatttgggtaatataggaagattttgttttttaaaaaaaatttttttttaattatttagtgtggtggtatgtatatgtagttttagttatttaggaagttgaggtaggaggattatttgtatttaaggggtcgaggttgtagtgagttatgattatgttattatatattgtattttagtttgggtaatataataagatttcgttttttaaatttttttaattaaataaataattaattaattaaatattaatatgtattaaataggtgtgggaaattaaattatttttttgaaaacgtatttcgtaaaatgttttttggatattttgagtttaagtgttggaggttgtagtgagttatgattatattattgtattttagtttgggtaatagagtgagattttgttttaaaaaaaaaaagaaggaagaaagaaagagtttataaaagatatgtaattaaataaattattggtcgggtatgatggtttacgtttgtaattttagtattttgggaggttgatgtgggtggattatttgagattagg

SEQ ID NO: 1063 - DNA, 16724 bp, Artificial Sequence
  chemically treated genomic DNA (Homo sapiens)
ggttggttttagttttttgggtttaggtgatttttttattttagttttgtaaaatagtggggatatgttagttattattaagttcgtggataatggaattaatttttaaggtttgtaagttttgaggatataaagataataaggtgtagtttttaagagaagttttttttggagataggttgacgtttaatataagtaatgaaagaagaataggaaatagttattttaaggatattgtgtatgtttgtatataatagaaggatggaggtttgtggaaaatggttataggtagaattaatgttgtttaggaagatggagttttttgagtaaagatagtattttggagaaaagttaagttatttaatatggttaaagtttttttgtgaggtgggaagtgttaagaaatgagagttgagagtatgataatgtataagattattttgaggagaattgtagtgatttaagaatagagatttagggaattttagtattgaaggggtagtttaggaaatatggtttagaaaggtaataagtttattgtttgttttttttttttttttatttatttaaagagtagaagtgttggttagaattttttttgatatagattagataggaaagggtagtattgggagtggaagtggttatgggggtgaagagagaataagttagtttttttaataaatagttaagagaggagtgataggagtgagttagataagtaaatagtaataaaaattttagggtagggtttagtgggttaaagtttttagagaaattgagagtagaagaagtagatttttgaagtttttatgggttattaattgaattttttttgaggttttttgagagagataaaatttgaaattttttttaaattatggattaagtttttttgtttgtagagatagagttgcgtgaagttttggtttgattatggttattgaaggatttgttggatagatattaggggaattaagagagtgaaataatagttataaaaatttacggtaggagaattgtttgaatttaggacgcggaggttgtagtgagttgatatggcgttattgtattttagtttggtgatagagtgatattttgttttaaaaaaaaaaatttattattgttattatgttaaattattagttttaaaagtattaatggtaataagaattgtttaattttaagagatagatatagtattattttttttttttttttatagataagaaaattgaggtatagattggttggattgatttttttagggttatataattagtagttggtaaagttaggaatggaatttaggtgttttattttatagaaattattggaattaagatttttattaaagtatagggtagtagaggataaaatttaaagtataaattttttttattatttaatattttattttttaagaaaaggattatatttaatgaatatttaatgtatatatagaagttttttttttaagttggaaaattgttataatgtagtttaaagagtagtgttatgggggtaggggaggggtattattattttttcgtagattaaaatatttttttttttgttttatgtatatagtattaggtgtaatgtggattttgaattagtattagttgaattgatatgttttataatataatttgtaaggtattgtgtgagtggttgttcgagtatggttatataaagagatgtttgtatttataattttaagtttttaaagttattgggttagtttgttttatagttttttaattgaaatgtatgtttgtttttttttgttgttagatagtttcgttttgttatttaggttggagtatagtggtttataatattataatatttcggtttattgtagtttttgtttttcgggtttaagtaatttttttgttttagttttttgagtagttgagattataggtatatattattatgtttggttattgtttttttttttttgagatggagttttattttgttatttaggttgaagtgtagtggtacgattttggtttattgaaatttttgttttttaggtttaagtgatttttttgttttagttttttaagtagttgggattataggtgtttgttattgtatttagttaatttttgtatttttagtagagataggtttttattattttggttaggttggttttgaatttttgatatcgtgatttatttattttggatttttaaagtgttgggattataggtgtgagtgagttattgcgttcggttaatttttgtatttttagtagagacggggttttattgtgttggttaggttggttttgaatttttgattttaggtgatttatttatttcggttttttaaaatgttgggattataggtatgagttatagtgtttggattatttgtttttttaaaaaaaataaattttttgatttttaagattgtttatttaaaataaatttataaagaatggtttaatagtaagtgtttttagtaagttgtagttttatttgggggtgtgttgtttatttaagttttggtgggtgtatatgtgttgttatttcgtgggtttttttttttttttggtttttttatatttttttattttattttggtttgtcggatttttgttttgcgattagaagttgaggagtgggagatttattggatttagttagagtttaaatttttttgttttttttatttggatggatttttaggtagattggttgttatgtttttaagatataaaagattttttgggtttatgtatatatattaatagtttttttggtgtattaggaaagaaggtgagaaataagttgtatttgtatttatgtgtaaggatttgtgtaggatttttttttttaattagtaattttttttaggtagatgttagattatgttttgtaaaatatgttaaaggttttgttgtatattttttagttaaatttaaaaatggaaatatttaatgtattttttttttgagatggagttttattttgtggtttaggttggagtgtagtggtattattttagtttattgtagttttcgtttttcgggtttaagtaatttttttgttttagttttttgagtagttgggattgtaggcgtatgtcgttacgttcggttaattttttgtattttagtagagacgggattttattgtgttgtttaggttggtttcgaattttcgagtttaggtaatttgtcggttttagttttttaaagtgttaggattataggtatgagttatttcgttcggttttttttttttttaaatatagggttttgttttgttatttaggttggagtgtagtggtaggtttatgatttattataatttggaatttttgagtttaagcgatttatttatttgttttagttttcggtatagttgggattataggtatgtattatatttttagttaatttttaaatttttgtagagatgaggtttttttatgtttttttggaattttcggttttaagtaatttttttgttttagttttttaaagtgttgagattgttagtatgagtatttggatttggtttaataaatattataaattcgaattaggtattttatttttatttatatatatatttttttataggattatttgatagttattaatgtatattatgattgagttttaatagttattttgggaaaatagaaattattgttttagtatttatttgtaagttgtaagtttatataatgtatttaaattttattttgtttaatagattttgtagtatatgaaatatttgaaatatggaagagttatttttttgggtattttgtttatttcgtttgttatttatttattgattggatattttattgatcgattattatttgtttggtaaggtgttagaaataagaatattaagaaaaaggttaaggtttttgtttttaaggtttttttttttagtttagtgttgttaaggtttgatgaaatatattagtggtaaataagtacgcggggttttattttatcggtgtgcggttttttttttagttttgaaattatgtttatttaaatattttaaattaataaattagtgtttttaaattatataatcgtagttaataaattgggaataaggtttcgattattttgatttgatttaaaacgattattgttaattttttgttttgcgaattttttttttgattattaagttaagttttatatattttatttgtaagaggttatgttggttttttggaaattcgtaattaagtttagtgtttgtggaatggagtgtaattaacgattattaattaatagggtttcgttcgtgagagtttgttaggttaagtagtagaaatacgagaaattgataaaaagttttttttatttttaaataatagtcgtacggaagttttcggcgggataagggaacgtgggtgtttttgttattttcgtggacgcgggtagattgggacgttggatcgtattttttcgttttcgtttttacgtttttttaggtgtttagtttgaggttttcgtttaggagcgttgtcgttgatttaggtttaggagttgggggtttttgtatagacgtttaggtttcgggataggcggcgattgtatttacggaagtacgttgagtttttttttgtagaagggcgtttttttttttttatttttttttttagttttatagtagtttttcgggtcggttttttttttttttaggtttttttttagtgtcgtcgcggtttttaggtttgaggtgcggcgtttatttcggtagtttttagttttagacgttgcgtggagcggcggagtcggagggaagtaaaggatcgtttgcgttgttgttttcgtttcgcgcgttttgcgtttttcgtttttggcggtcgtttcgaagtttagtttttttgtttgtttcggagttgtttcgggttagtcgagaagagagcggtcggtaagtttgggcgcgcgtaggcggcgggtcgcgggtattgggcgtttcgttggggcggggggaggtggttatcgttttcggtttggcgtttcgcgcgtatttcggcgatggttttttcgtcgcggcgacggttgcgtttcggttttcgcggtttttcgttttttttttcgggatttttgttatttttgtgtcgcgtttttaatttagacgtggatagttttgtcgagtattttggtttcgagggaagttatttcggtttcgtcgtggattttttcgtgtttagcgcgttttcgtaagtggtcgtatttggaattggagtcggtttttttttttatcgcgcgtatttatttagcgtttttttattgggattgattttcgagagatttcggcgtttgtttgttttatttattttattttttagagtggtttatattttgggtggaggaaatatttggggaaatgaattttttttggtatttattatttagttatatttcgttttttattttttaaaattggttaggggtagcgggagagttttgaagtagatttgtgtttaaaaatcggggaaagtgggaaattaataaaggttggttttgtcggatttttcgttttttgtgttagtgtcgaggatttggttaatattattttcgaattttttttttttttttattagttaggttttttggtagtttttttttgttttataggtttaacgttcgttttttttagtttttttaaataagtttttttttatttttttcgtttttgtttgattttgtttttttttattttttttgtagatattttgatgatttaaaatgattatattgttttattgaatttattgtgttttatttttgggattgttagatatttgtatatttgaggttgaatagatgaattgaatgtgttatttgttttttttatagtgatttattatttaggttattgtttagaaggaataagggtgtttgttgagtttttattcgttgtaggttatttgaatattgtagtatttaataatttagttatgtttttaagttgttaacgtttcgcgttgtaagggtcgttaggatttataatagttattgttattattgtgttagaaattgttttcgattttattgaatgttgatattatttttattattttatttttatgttagcgttaggagtattgttttaatgaatgttgattgtttttttaatgatgtttaaattttgtttttaagagagaaattgtttttagggtgttttttaaacgtttagattttgtaataatatatttttgtttttatattttttgtataagatattttttcggggtgaagtggaggaaaattttgacggttagtacgtggataggattattttttattatatatatgtttaatttgagggtggttttaatggttttttatgattgttaggatatttagtagaatttagttttagtgtttttttgaatgttattgagtattatttattttggtaataatttttgtagtaatatatagattagatgtagttaatggaaattttgttagtggagatattattttatgtagtaagtttagttttatttgttgttagtagttatagtgttttttgtgagatttggagtatagattttttaatatgataaaaataattattatttaggtaatatttattaattttatattttatttagttattttagttagtattatttttttatttattgtttttaattataggggtgaatattaaacgttatttttaaatatttttgtttttagatatttttaagtgtatatttttatgagatagaatattttagttgtttttaagggtttaatgtgagatataatttgtagagaaattttaatgattttgaaaatatatgtttttagttaaaaattagtatttaaatattttaggttaggtatagtggtttatatttgtaattttagtattttgggaggttaagatgggtagattgtttgagtttaggaatttgagattaatttgggtaatatggtgaaattttgttattataaaaaaatataaaaattaatcgggtatggtggtgtatatttgtaattttcgttttgcgggaggttgagatgagaggattgtttggaaagttgaggttgtagtgaatggagattgtgttattatattgtggtttgggcgatagagagagattgttttagaaataaaaataaaattaaaaataataaataataataataataaaataaagttgatggtagtgttttataatgttattgttaattttttagtagtgttttgagtttagtgtaagataaatgagaggttgataaattttaagtgttttttttttttttatgaaaaatgtagtgatgttgaattttttatgatatttgttattgttgattataaattagggtgattaatttttggttagttattataattaatgaatgtgttatgattttataggtttatatgattttatttatagatttttaatgataaagtaaaattgaatttgggtttggttgtatataatattttgaaatatttattagtaattttgttatcgatagattatagagttttaggtataggtaatttaaaaaatggaaattaattttgaattttttttttttttttttttaaataaaacgtatataaatataggtttttatttattgagttttttagatttaataaaaatttatgtaaaattttgttgaattttttagaagggtattttaaatttaataagtattggaatttaaggtatttgggatgttatttttaatattattagttggatttattgttatttggtattattataaatttttaaaagaaaaaaagttatataatgaaaaagtatttgttaatttaagagcgttttttttttgaggggagaaggatttgtgaggagtagtggttgtgacgtttatttttgttgttttttttagttttggtgtttatatattttggggaagttgtagaattattttatgtttaatttttttttttatagaaaattattattgaattatttgtatagtttatagttttgttgtgaaaattaatgaattaatatttattaaagggaaggataaagtattaagtaaaatgttaaggcggttttttaaaaaattattttagaaatgagttaggttcgaagtaaaaatttataaatatagtgatttttaaaattatgaaaaaatattcgtattttgtttttttttttataagtatttatttatgttatgttgtaaaatttatataaaatttaaagattgtatgtaggttaataattagagttatattttttttgtggagattaattggaaaaattaaaaattatattttaggtttaattataatgatgatattttattttggtaaatatattttataatttgttaagtatttatattttattttattttatagtttatattatcggggggaagtaaggggaagtagatatatttatttttatagatgaggaggaaatggaggtagaatcgtttgtagtttagttatttgagtaggttggtgtgagtagagggtaaggaagggaaggattcgaagatagggtgtaaaatttaaattttatttttattaatttaaatattgaatttttaaagaaaataattgaataattttaaaatttattttttaaatatatgttatatagtttttattttatgtatttttttattttaaaataatgttataatgaatgatattggatttttgtttttttttttattaaacgttaatggagttttattttatagttggtaatgtgtagatgtgtatgttttagaagtagaaggttttttaatggtttttagttttaattttatgtttgtaatatttggaaagttttttaaataaaatttttgttttggttgtattttaaatttaaaagtagatttttgatttgatattttagtggtttggtttgtgaattatttttcgttgattagtttgttttaatttaatttgattaaaaagtttttattaagagatgttagttgtatttttgtttttattaatgttggtattattttttttgttattttggaaatatttttatattttttttttttatgttttatttttttgtgttttttttattttattattttaatattagttagtgattagttaataggtagaagtttttagaaattttttttttttaaggtttttttgattttatttttgttttttattttttattttagtgtagttatgataagtatagttagtggtatttaggtttttttttatttttttgtttattatttggtttttaaacgtgtagaatattttgtttgtttttatttattttatttttttgtaatatttttttttattttggtattttgttgtaaaaatttttataataaagtttttattgttagtaagaaagtttaaatcgtttaatatggattaaggttatttgtaatttgttttaatttgtgtgtatttttaaaattttatgtattatttttatttttattattttaattttttttataatattttataaaatgatgttagtttattttttataaattttagagtagttttgattatattggttgattttttttattataaataatatatatgtatattaggggatataaaattaggttataattttgttatttagaaagtaaattttatattatttttgattaaggatatatgatgttttatagagtattatgaaagataagggaaaatatgtggaaattgtagttattgtttttgttttatagtagttgttgattggtatttttgttttttttttgatttaaaaaagtattttttaaaaaatgaaaagtaaatttgaaattggaattgtagttttgaaataatatttagtattattttatatatatttatttttatatatatgtatgatagttttttagaagttttttttggtgaaggtttattggttaatttagagttagttaaatatattaaatatgttttattttagaaaggttagtgttgaaagtagataaataagttagtttatttggagggtttgaaaaatggatttgttattgtttggtaggttgtttttttttggttgttaaggttatatttcgtgaattaattgttttttaagtatagtttggatagggagtgtatttaaaggttatttttttgattggtttttttgagttttttgtttgttttttttttattgttttttttgatatttttttttttgtatcgtttttttttttttttttttttgttttttgttttttttttttttttttttttttttattttttttttttttttttatttatttttttgtttttttttttaaatttaattttttatattttagtattttttggtatggatgtaaattttaattttgaagttttagagagttatttaatggtagtgtttttagttattaaaaaaaaaaatgttgaggatggggattttgatgatgtttttggatatattttttggagggaaatggagtttattaggagagagttgcgggtataggaaattaagttatttagttttagatttatattgttaattagtgaaaatttttgttaattttattttattttgtgtattttttttatttcgttattattgataagaaatgtttaagttggtttttttattttttttttttttttttttttttatttgagttaattatttgattattaatggttttttgaaaatattgaggaaagaaaagtttttttaaagatagaatttaagttttatattttttatttttttagggaataatttattaatggtattaattgtttttaggacgaagatgataattaaattttattattttgtattttcgtggtgttttagattttttaagtttgtatttatttattattatttttagaaagtttttttttaaagtaattatagtgggtattgttattgttattcgatagaagggaatagagatttaaagttattgttttaattgatttgtagtgtttgtaaattttaattttaaattgtttttattagatagtgttgtttagattataaatattttttttttggtttgttagtttttttattttaattaagttgttgtatatttttattagttatttttagatgaaatttaagtaataattatttttatggagtgttttattaattttgttttttgtagtatgtgttgttttttttttttttttgagatggagttttgttttgttgtttaggttagagtgtagtggtataattttggtttgttgtaattttcgttttttggatttaagtaatttttggttaatttttgtatttttagtagagatggggttttattatgttggttaggttggttttgaatttttgattttaagtgatttttttgttttggttttttaaagtgttaggattataggtatgagttatcgtgtttggtttgtgttgttttttattttttaatttttttatatagtattttttattattttgtatttagttttttatgtaagtattttttttttattatatagttttttcgtaagattttaatatatgtttaaggttattttattttttttatttttttattgttttttttaaaaaatttaaatattttaatgataattttaatatcgagatggtattttggatgaaaaattttattagttttttttttttataaatttagtatgtagatattgatatattttttttatattattttgttatttttgtagtattttattagtatgtaagtttgtatatgaaggtatgtttaggaaaatttaatgaatatttatttgtatatttgattattattattttatgtttataatgtgtagatagtttgatgaaaagtaataggtttgtttttggtattatttaaggaatttatgttatgtgttgttaatagagtggtgtttttatttagagaatgtttttattgggttttttttttttgtttttgttgaaggtttttttttaataattttcgagttttttttgttttatagtgttaagtaaagaaagtatttgaaatttaaaattaagtagagatgttatataaggaaattgttttaagggtaatttaaataattggatgtttaatagaggatgttttttgtatttttgaggggtttagacgtagtggaaatgatttatttatatatggttattttaagattgagatatagttattgaatttattttgttattttattgtttatttaaattttttttgagtttttataatgtggtaggtgtaaaagatgaattagagtattttatatttaaagaagtaatttattataaggtaggtagaatagttttgattaaaaagttataaaatatattgtaagataggggtttttaattttcgggttatggattagtattagtttatagtttgttagggattatgttgtatattaggaagtgagtagtaggagagtgagtattattatttgagttttgttttttgttagattagtggtggtattagatttttataggagtaaattttattgtgtgaattttgttgtgaagtgtgtatgtaagggatttaggttatatgttttttatgagaatttaatatttggtgattcgagttggatagttttatttcgaaagtatttttttttatgtttagggaaggaaaggttggggattattgttgtgagttattatttgaagataatttagaagtgatttttgtttgtaggtttttaggtaaagtttgagaattagtttttttattttgatgtagaatttggtatgatttataatattaagaacgtgtatatatttgtgtttgtattatttttattaggattattgtggtaatgttttaagtaagtattatttaagatattgatttttaaaagtaaatttatttgaattgtttttttgttttagtatgtatttaaaaattatttaattttgatgaaaaggggtagttgtgtgattttggggttaaattttagattcgtagaaaaaaaattgtatatgtaataaatttatatattataatttatatatatatatatatatatatatatatatatatatagagttttattgtgttaattaattttgttttagaaaaagaatcgatggggttttgatgacgagttgtttttttagttatgggaggtggggatttttttatttatagtatttttttttttttttttttgagatagagtttttttttgttgtttaggttggattgtagtggcgtaattttggtttattgtaatttttattttttaggtttaagtgatttttttgttttagtttttcgagtagttgggattataggtttatgttattacgtttggttaatttttatatttttagtagagatggggttttgttatgttggttttaaatttttgattttaagtgatttgtttgttttagtcgtttaaagtgttgggattgtaggtatgagttattgtgtttaattttttttttttttatgaaagatttttgttgaatgaaaattaagtttattttttatttagaattattttgtcgtgatgggagagagttaatattggtgttttattgatgttagatatgattgtatggagttttattaaatagggcgtggtttggttgggagttacgtttttattttgaatttgtggatttttaagataagtgttagaaagtaggattttttgtaattttgtaattcgtatagttagtttttgtttattgtagatgagatttggtagttattatttagaataagaaattgattttaaaagtttaagtgaatgtattttatatttaagatgtatattcgttttaattttataaaaaggtgaaaagtaattgtaaatgttttttttgttagaataatttaagtgatttagtatttaatgaaataaaatgattatggtgatagtattttaggattgtttttgtttgtttgtattttgttttatttttttttatattttaattagttttttgagattaaagataaaaattttttttattttattttttttttttttttgatttttaaatgttgttgtttttgagaatttatttattgttttttttttttcgacgttttttttggttgaataattttaattgtgttttgatatagtatattgttttaggtagggttttagattataattggatgatttatagatattttaaataaatatattaataattgaatttatggtttttttgtaaatattaattttattttattttttgagatagggatttattgttttatttaggttgtttgtttattttgtagtatttgtaattatagtttattgtagttttaattttttgggtttaagttatttttttgttttaggattttagttttatttttaaagttgggattataggcgtatgttattatatttagtgaattgttttattttttgtagagatgggggttttattatgttgtttaggttagttttgaatttttgtaagtatttaatttgttttttgtttttttgttttttaggttttttttttattaatgtatttaagaaggaaatttaggtggtatttttgaatgtttttttttttatatttaggtttttagcgattgttgttgtattttagatgtttttttttatttgttatttatttttttatttatttttttattgtagattatatttatttgttttttgagttgcggttagttttttgttttttttgttttattttttttttttttttttttaatgttttttttatagggtataatatttagttttttttagtagatgattttattttttttaaaaaatttagtggttttaaatgaattttgggataaaatataaagtttaattatggttaaaaggttttatttgatttagttattgttaggttttttgattttattttgtgttattttcggtttgtttttttttttagttatatttttttttgtagtttttggagatttaatttttttttgttagggtttttttatttttgttttatatattttttttatttttttattttattttttttatttttattttttatttttttttatttttaatatataaatgtttttaggtattttttttttgattttgtatattttaatgttgtggtgagttttttagaaataatttttttgtttattttatttaaaagagaatttttttttttattttttaaagatgatttttttagagagatttttttttatttagaggaaatttttttttttttatttttagagataattgttttgtttaaagaaggttttttttttttatttttaaaaattttttttagttaattgtttgtttatttggtaggatttgtaatagtaatttatttattggttagttttttgtttttaagggaatgtaagttaaatttttttattaagagtaggaattagttaagtatagtggtttacgtttgtaattttagtattttgggaggttaaggtaggtagattatttgaggttaggagttagagattagtttgattaatatggtgaaattttgtttttattaaaaatataaaaattagttaggcgtggtggtgggcggttgtaattatagttatttaggagattgaggtaggagaatcgtttgaattggggaggtggaggatatagtgagttaagattatgttattgtattttagtttgggtggtaagagtaagattttgttttaaaaaaaaaaaaaaaggtagaaattaaggttgttttagttatttggtatttttagtatttaggattttgttttatgtagaggaagtatttattttatattttttatgaatgaatagaaaataataaaagaaaatatttttttaaaattaaaaattttatttttgattattgtgtttttggtttattttattttaatgataaagaaattgaatagtggttttaatttttgattaagaattgattagattaattttgtgataagaaattttttattaaatagttaattattaaaaaaaattaagtttaggtaatgtggcgagattttatttttatagaaaatttaaaaaaaaaattagtttagtatggtggtatatgtttgtagttttatttgtttaggaggttgaggtaggaggatcgtttgagttaggagttggaggttgtagtgagttatgattgtattattgtattttagtttgggtgataaagtaaaattgtgttttttaaaaaaaaaaaatagaataaaataaaaattatagtaatatttttaatgtaagataatttttttaaatgggaaaattatatttataattatattttggaataatttatttagaatatttttttttttgtttaatatttagaatatagaaaatgtatagtaatttttttatatacgtatatgtatatatatatatattagaatattaaaataaaatttttttgtttttaggtagtatatatttttaagagttttattgagatatgtgatatataataaattgtatatatttaaagtgtatgattgatttgtataaatttttaaatgaatgtaattttgaatttgttttataaagttattaggaaaaataaattatattaaataatgtatgtatgtaagagattattaaatgaataatgaagattatgtttttagtgaatagtaaatggttttaaaaaatatttatagataatattaagagaatgattgttttttataaattagaagatattgtttatattttgttttatttaaattttggtttgtcgtttttgtattttagt

SEQ ID NO: 1064 - DNA, 16724 bp, Artificial Sequence
  chemically treated genomic DNA (Homo sapiens)
gttaaaatataaaagcggtagattaaagtttaaatgaaataaagtgtaagtaatattttttgatttatgaggagtaattatttttttgatattatttataaatattttttaaaattatttgttatttattgagggtataatttttattatttatttggtagttttttgtatgtatatattatttgatatagtttattttttttgataattttataaggtaagtttagggttatatttatttaggaatttatgtaggttaattatatattttaaatatgtatagtttattgtatgttatatattttagtaaagtttttaaaaatgtatgttgtttagaggtaggaaagttttgttttggtgttttggtgtgtgtgtgtgtgtatgtgcgtgtgtgagagaattattatgtattttttatattttgaatgttgagtaaaaaaaaaaatattttaagtaaattattttaaagtataattataaatatgatttttttatttagaaaaattattttgtattagaaatattgttgtaatttttattttattttattttttttttttaagagatatagttttgttttgttatttaggttggagtgtagtggtataattataatttattgtaatttttaatttttggtttaagcgatttttttattttagttttttgagtaggtagaattataggtatatgttattatgttaagttaattttttttttaaattttttgtaggggtggggtttcgttatattgtttaggtttaattttttttaatagttgattatttaataaaaaattttttattataagattaatttaattaatttttggttaaagattaggattattatttaatttttttgttattaaggtaaaataaattaaagatataataattaggagtaaaatttttaattttaaagagatgtttttttttgttgttttttatttatttataaaagatatgaagtgagtgttttttttatataaagtaaggttttaagtgttagagatattagatgattaaaataattttggtttttgtttttttttttttttttgagatagagttttgtttttgttatttaggttagaatgtaatggtatgattttggtttattgtattttttatttttttagtttaagcgatttttttgttttagttttttgagtaattgtgattatagtcgtttattattacgtttggttaatttttatatttttagtagagatagggttttattatattggttaggttggtttttaatttttgattttaggtgatttgtttgttttggttttttaaagtgttgggattataggcgtgagttattgtgtttggttgatttttgtttttaatggaggaatttagtttatatttttttagaggtaagaaattagttaataaataaattattattataagttttattaagtaagtaaataattagttgagagagatttttgggaatagggagaggagattttttttagatagagtagttatttttaaggatgagaggggaaagattttttttaggtaaaggaaagtttttttaaggaaattatttttaaagaatggggaagaaagtttttttttagataaagtagatagagaagttatttttaaggaatttattataatattaagatgtataggattagaaggagggtgtttaggagtatttgtgtattgaggatggaggggagtggggggtggggatgagggaagtggaatgaagagatggagggaatatgtgaggtagaggtagaaagattttggtaagaaagaattgaatttttaggagttataaagaaaggtatggttgaaggaggggataagtcgggagtggtataagataaggttaaggagtttggtaataattaagttaaatagggttttttggttatggttaaattttgtattttattttaaggtttatttgaagttattgagttttttaagaagaatgaaattatttattaaagaaaattaaatgttatgttttatggggaaagtattaagggagagggagaaaaaaatggaataaggaaagtaaaggattggtcgtagtttagggagtaggtgagtgtgatttgtagtaagagggtgggtggaaagataggtgatagatggaaaaaaatatttggagtataatagtaatcgttggaggtttgaatatgagagaaaagatatttaagaatgttatttagattttttttttgagtgtattgatgggagaaaagtttagagagtagagaagtagaaggtagattaagtatttataggagtttaagattagtttaggtaatatagtaagatttttatttttataaagaataaaataatttattgggtgtggtggtatgcgtttgtggttttaattttgggggtggagttggggttttgagataggaggatggtttgagtttaggaggttgaggttgtagtgagttgtgattataagtgttataaagtaagtaaatagtttgggtgaaataatgagtttttgttttaagaaataaaataaaattagtatttatagaaaaattatgaatttaattattaatatgtttgtttgagatatttgtgagttatttagttgtagtttgaagttttgtttgagatagtatgttgtattagaatatagttggggttatttagttaggggaagcgtcgaaagaggaggggtaatgagtgagtttttagggataataatatttaggagttaagaagagaaagaagataaagtaaaaaagatttttgtttttaattttaagaaattgattgaaatataggaggaaataaagtaggatataggtagataaaaatagttttaaaatgttattattataattattttgttttattaaatattaagttatttaaattattttggtaaaggaaatatttataattgttttttatttttttgtgaaattagaacgaatgtatattttaaatatggaatgtatttatttgaatttttaaaattaattttttattttgggtagtagttgttaaattttatttatagtagataaaagttggttgtacgaattgtagggttataaagaattttgttttttgatatttattttaaaaatttataaatttaaaataaagacgtaatttttaattaaattacgttttatttaatagagttttatgtagttatatttggtattagtaaaatattaatgttggtttttttttattacggtaaaatgattttgggtagaaaatgaatttagtttttatttagtaaaagttttttataagaaaaaaagaggttgggtatagtggtttatgtttgtaattttaatattttgggcggttgaggtagatagattatttgaggttaggagtttgagattaatatggtaaaattttatttttattaaaaatataaaaattagttaggcgtggtggtatgagtttgtaattttagttattcgggaggttgaggtaggagaattatttgaatttgggaggtggagattgtagtgagttaagattgcgttattgtagtttagtttgggtaatagaggaaaattttgttttaaaaaaaaaaaaaaaaaaatgttatgagtaagagagtttttattttttataattaagagagtagttcgttattaaaattttatcggttttttttttagagtagagttggttaatatagtgaaattttgtgtgtgtgtgtgtgtgtgtgtgtgtgtgtgtgtataaattataatatgtaaatttattatatatataattttttttttacgggtttaaaatttgattttaaaattatataattatttttttttattagaattaaatgatttttgagtgtatattagaataaaagaatagtttaggtaagtttgtttttgagggttaatattttgaatagtgtttgtttgggatattgttatagtagttttaatgagagtaatataagtataggtatgtatacgtttttagtgttgtagattatattaggttttatattaggataggagaattggtttttaagttttgtttggaaatttataagtaaaaattatttttgggttgtttttaaatagtagtttatagtagtggtttttaatttttttttttttggatatagagggggatgttttcgggatgaaattgtttaattcggattattaggtattaggtttttataagaagtatgtaatttagattttttgtatgtatattttatagtagggtttatataatagggtttgtttttatgagaatttaatgttattattgatttgataggaggtagagtttaggtggtaatgtttatttttttgttgtttattttttgatgtgtagtatggtttttaataggttatggattggtattggtttatggttcgagggttggggatttttgttttataatatattttataattttttggttaaaattattttgtttattttatgataaattgtttttttgaatgtagggtattttaatttattttttgtatttgttatattataagaatttaagaaaagtttaaatggatagtggagtaataaagtaaatttaatagttatgttttaattttaaagtagttatatataaataagttatttttattacgtttgaattttttaagaatgtagaaagtattttttattaaatatttaattatttaaattatttttaaaataatttttttgtgtaatatttttatttaattttgggttttagatattttttttatttggtattataagatagagagagttcggaagttattaggagaaggtttttaataaagatagagaaaaagagtttagtaggagtattttttgaatgaaaatattattttattggtagtatatagtatgagttttttgaataatattaggaataagtttgttgttttttattaggttatttgtatattataggtatgaaatgatggtaattaggtgtataaatggatgtttattaagtttttttaagtatatttttatgtgtagatttgtatattggtgaaatgttatagaaatggtagaataatataaaaggaatgtgttaatatttatatgttaaatttgtgagggaaaaaagttgatgaagttttttatttaaaatgttatttcgatattaaagttattattaagatatttaagttttttaaagagaataatgaagagatagagaaagtaaaatgattttagatatatgttaaagttttacgaggaagttgtgtagtgaaaaagaaatatttgtatagaaaattgggtataaggtgataaaagatgttatataaaaaaattaaggaataaaaagtaatataggttaggtacggtggtttatgtttgtaattttagtattttgggaggttaaggtaggaggattatttaaggttaggggtttaaaattagtttggttaatatggtgaaattttatttttattaaaaatataaaagttagttagaaattgtttgaatttaggaggcgaaggttgtagtaagttaagattgtgttattgtattttagtttgggtaatagagtaagattttattttaaaaaaaaaaaaaaagtaatatatattataaaaaataaagttaataaaatattttataaaaataattgttatttgaattttatttaagaatgattaatgaaagtgtataatagtttaattagggtaagagaattgatagattagaaaaaaaatgtttgtgatttaagtagtattatttaatggaaatagtttggaattaaaatttataaatattgtaaattaattgaagtagtaattttgaatttttgtttttttttatcgaatggtaataataatgtttattgtaattattttaaaaagaaattttttgaaggtgataataaataaatgtaaatttagaaaatttgaaatattacgaaaatataagatgatgggatttaattattattttcgttttgaaaataattgatgttattaataagttattttttagaagagtagaaaatgtaaaatttaaattttgtttttaaaagggtttttttttttttagtgtttttaaagggttattaatggttaagtgattaatttaaatgaagaagaaaaagagaaagaagggtagaaaagttagtttaaatattttttattaatggtggcgaggtggggagaatatatagggtgaggtaaggttgataagagtttttattgattagtagtgtaaatttgaagttgagtgatttaattttttatgttcgtaatttttttttgatagattttatttttttttaaaaagtatgtttaagaatattattagaatttttatttttaatatttttttttttaatgattggaaatattgttattaaataattttttgggattttaaaattaaggtttatatttatgttaagaagtgttaaaatataaaggattgagtttgggagagaggatagaaagatggatggaaaggaagaaaagagatagaggaaaggaaaaagagaggaaggataagagatagaaaaagaaaaaagagagagcgatatagagggagaggtattagaggaggtagtgagagggagatagataagaggtttagaggaattaattaggaggatggtttttggatgtattttttatttaaattgtatttgaagggtagttgatttacggaatgtgattttgataattaaggaggggtaatttgttaaataatgataagtttattttttaaattttttaaataaattaatttgtttgtttgtttttagtattgatttttttaagataaagtatgtttaatatatttagttgattttgagttgattaatgagtttttattaaaaggaatttttgaaaaattattatatatgtatatagaaataaatgtgtatgaaatagtattgaatgttattttaaagttataattttagttttagatttattttttattttttaaaaaatgtttttttgaattaaaagaaaaataaaaatgttagttaataattattgtaaaatagaagtagtaattataatttttatatatttttttttgttttttataatgttttatgaaatattatatgtttttaattagaagtaatataggatttgttttttaaataataaaattatagtttagttttatgttttttaatatatatgtatattatttatgatgagaaaaattagttaatataattagagttattttgaagtttataaaaaatgagttggtattattttgtaaagtgttgtgaaaagggttaaaatggtaagagtagaaatggtatatgaagttttaaaaatatatataggttgggatagattgtaagtgattttaatttatgttaagcggtttggatttttttgttggtaatggaagttttattatgaaaatttttgtaatagaatattaggatgaaaaaggatgttatagaaagataaaatgaatagaaatagataagatgttttgtacgtttaagagttaaatgatgggtagagggatgggggaggatttgagtgttattgattatgtttgttataattatattgaaataaggagtagaaagtagagatggaattaagaaaattttaaaaaggaagaatttttaggagtttttgtttgttgattaattattgattgatattaaggtggtgaagtaggagaaatatagaaaaatagaatatgagagggaggaatatgaaagtatttttaaggtgatagagaaaatgatgttagtattaatagaaatagaggtgtaattaatattttttggtgaagattttttagttaaattgagttaagataggttagttaacgagaaatgatttataggttaggttattggaatattaagttagagatttatttttagatttaagatatagttagggtaagagttttatttaaaaggttttttagatattgtaaatatgaagttaggattgagaattattgaaggattttttgtttttaaggtatatatatttatatattgttaattgtaagataaggttttattagcgtttaatggggggaaaggtaagaatttagtgttatttattatagtattattttaaaataaagaaatatataaaatgagaattgtataatatatatttgaagaatgaattttaaaattgtttagttattttttttaaaaatttaatatttgaattaataaaagtgggatttgaattttatattttgttttcggattttttttttttttattttttatttatattaatttatttaaataattagattgtaaacggttttgtttttattttttttttatttgtaagaatgagtatatttgtttttttttattttttttcggtggtgtgggttatagaatgaaatgagatataagtgtttagtaaattataaaatatgtttattaaaataagatgttattattataattaaatttaggatgtaatttttaatttttttaattagtttttataagaaaagtatgattttaattattagtttgtatataatttttaaattttatgtaagttttataatatagtataaataaatgtttatagaaaaaaaaatagaatgcgaatgtttttttataattttgaaaattattatatttgtgaatttttatttcgaatttgatttatttttggagtgattttttgaggggtcgttttaatattttgtttagtattttgtttttttttttaataaatattgatttattaatttttataataaaattatgaattatgtagataatttaataataattttttataaagagaaaaattaggtataaaataattttatagtttttttaaggtatgtggatattaaaattggaaaaagtaataggagtggacgttataattattgttttttataaatttttttttttttagaagaaaggcgtttttgaattgataaatatttttttattatgtggtttttttttttttaaaagtttatggtaatattaaataataataaatttaattggtaatattggaaatggtattttaagtattttggattttaatgtttgttaaatttaaagtgtttttttagaaaatttagtaaaattttatataaatttttgttaaatttgaaaagtttagtaagtaaaaatttgtgtttatatacgttttgtttaaaaagaaaaaagaaaaaaatttaaggttggtttttattttttaagttatttatatttagagttttgtagtttatcggtaataaagttgttgatgaatattttaaaatattatatgtaattaaatttaagtttaattttattttattattaaaggtttatgagtgaagttatgtaaatttgtgaggttataatatatttattgattataatgattggttaaagattagttattttggtttgtaattagtagtagtaaatattatgaagagtttaatattattgtattttttatggaaaaaaaaaaaatatttaaagtttattagttttttatttattttatattaaatttagagtattgttgaagaattaatagtaatattgtaaaatattgttattaattttattttgttgttgttattgtttgttgtttttgattttgtttttgtttttgagatagtttttttttatcgtttaggttatagtgtggtggtataatttttatttattgtaattttaattttttaagtaatttttttattttagtttttcgtagagcgaggattataggtgtgtattattatgttcggttaatttttgtatttttttgtagtgatagggttttattatgttgtttaggttggttttaaatttttgagtttagataatttgtttattttggttttttaaggtgttgggattataggtgtgagttattgtgtttggtttgaagtatttaaatgttaatttttgattgaagatatatatttttaaaattattagaatttttttataaattatattttatattgaatttttgggagtaattaaaatgttttgttttatgaaggtatatatttgaaagtatttggaaataaaaatgtttaaagataacgtttggtatttatttttgtggttaaaaataataaataaaaagataatgttgattaaaatgattaaatggaatgtgaaattggtaaatgttgtttaaataatgattatttttattatgttggaaaatttgtgttttaggttttatagaaagtattgtaattgttaataataaataaaattaagtttgttatataaaataatgtttttattaataaagtttttattaattgtatttaatttatgtattgttgtaaaggttgttattaaaatgaatgatatttagtaatatttagaaaaatattaagattaaattttgttgagtgttttaatagttatagaaaattattgagattatttttaaattaggtatgtgtgtagtagaagatggttttatttacgtattaatcgttaaaatttttttttattttatttcgaagggatattttatatagaaaatatggaaataaaaatatgttgttataaggtttaagcgtttagaaggtattttaagaatagttttttttttgaaaataagatttaaatattattaaaaaaatagttaatatttattaaaatagtatttttaacgttaatatgggggtggggtggtgagaatgatgttagtatttagtaaagtcggagataatttttaatataataatggtaataattgttataaattttgacggtttttgtaacgcggaacgttggtaatttgaaaatataattgaattattaaatattgtagtatttaaatgatttgtagcgagtgaaaatttagtaaatatttttgttttttttgaataatgatttaaatagtgaattattataaaaagaatagatgatatatttaatttatttgtttaattttaaatgtgtaaatgtttgatagttttagagataagatataatgaatttaataggatagtatggttattttaagttattagaatgtttgtaaaaggagtaaggagaaatagaattagatagaggcggaaagagtgggggagggtttgtttagggagattgaaaaggacgggcgttaagtttgtaaagtagaaaaaggttattaagaagtttaattggtagaggagaaaaagaagttcggggatgatattgattaaattttcgatattggtataggaggcggggagttcggtaagattagtttttgttgattttttatttttttcgatttttaagtataggtttgttttaaagttttttcgttgtttttaattaattttaagaggtgagaagcggggtgtaattgggtgatgggtattaaagggagtttatttttttaaatattttttttatttaggatataaattattttgagaggtaggatgggtgagatagatagacgtcgggatttttcggaaattaattttaatggagaaacgttgggtgggtgcgcgcggtgggggagggggtcggttttagttttaagtgcggttatttacgaagacgcgttgggtacgaagaaatttacggcgaagtcgaagtaatttttttcggggttagagtattcggtaggattgtttacgtttaggttgaaggcgcggtatagaggtagtaggagtttcgagagaagaagcgggaggtcgcggggatcgaggcgtagtcgtcgtcgcggcggaaaagttatcgtcgaagtgcgcgcgggacgttaagtcgggagcggtagttattttttttcgttttagcgaggcgtttagtgttcgcggttcgtcgtttgcgcgcgtttaaatttgtcggtcgtttttttttcggttagttcgggatagtttcggggtaggtaagagggttgagtttcggagcgatcgttagggacgaggggcgtagagcgcgcggggcggggatagtagcgtagacggttttttgttttttttcggtttcgtcgttttacgtagcgtttgaggttggggattgtcggggtgagcgtcgtattttaggtttgagagtcgcggcggtattgggaggagatttggaaggaggaggagtcggttcgggaggttgttgtggagttggaggaggaagtgggggaggagaggcgtttttttataggggagagtttagcgtattttcgtgagtgtagtcgtcgtttgtttcgagatttgggcgtttgtgtaggggtttttagtttttgagtttgggttagcggtagcgtttttggacgaaggttttaggttgagtatttgaggaggcgtgggggcgggggcggggagatacggtttagcgttttaatttattcgcgtttacgggagtagtaagggtatttacgtttttttgtttcgtcgggaattttcgtgcgattgttgtttaaaaatgaggaaagttttttattagtttttcgtgtttttgttgtttagtttggtaggtttttacgaacgaaattttgttaattaatggtcgttaattatattttattttataaatattgaatttaattacggatttttagaaagttagtatagttttttgtaagtgaggtatgtaaagtttaatttagtagttaaagaaaggattcgtagggtaaagaattggtagtgatcgttttaaattaagttagaataatcgaagttttatttttagtttgttagttgcggttgtatgatttagaaatattgatttgttgatttaggatgtttggatagatataattttagagttggaagaaggatcgtatatcggtgaaataaggtttcgcgtgtttgtttgttattggtgtgttttattaagttttgataatattggattgagagagagggttttgaggataggaattttgattttttttttagtgtttttatttttagtattttgttaagtagatagtagtcgattaataaaatgtttaattagtgaatgaatagtagacgaaatgagtaaagtgtttagagaagtgatttttttatattttaagtgttttatgtgttatagaatttgttgaataaggtgaagtttaagtgtattgtgtggatttataatttataagtaagtattggaatagtaatttttgtttttttaaagtaattattaaaatttaattataatatatattaataattattaaataattttgtgaaaggatatgtatataaatgaaagtgaaatgtttaattcgaatttgtaatatttattggattaggtttaggtgtttatgttggtaattttagtattttgggagattgaggtaggaggattgtttgagatcgggagttttaggggaatatagggagattttatttttataaaaatttaaaaattagttgggagtgtggtgtatgtttgtagttttagttatgtcggaggttaaggtaggtagatagatcgtttaggtttaggagttttaggttatgataagttatgagtttgttattgtattttagtttgagtgatagaataagattttgtgtttaaaaaaaaaaaaggtcgggcgaggtggtttatgtttgtagttttagtattttgggaggttgaggtcggtaaattgtttgagttcgggagttcgagattagtttgggtaatatagtgaaatttcgtttttattaaaatataaaaaattagtcgggcgtggcggtatgcgtttgtagttttagttatttaggaggttgaggtaggagaattgtttgaattcggaaggcggaggttgtagtaagttgagatggtgttattgtattttagtttgggttatagagtgagattttattttaaaaaaaaaatgtattaaatatttttatttttaaatttgattaaaagatatgtagtaaaatttttggtatgttttataaggtatggtttagtatttgtttgaaagaaattattgattgagagaagaaattttatataaatttttatatataaatgtaaatatagtttattttttatttttttttttaatatattaaagaggttattgatatgtatgtataaatttaaagggttttttatattttaaaaatatgataattagtttatttggaaatttatttaggtaaggaagatagaagagtttaaattttggttagatttagtaagttttttattttttaatttttgatcgtaggataggggttcgatagattaaggtggagtgaagaaatgtgagaggattagggaaaagaagaagtttacgaaatgataatatatgtatatttattaaaatttgggtgaataatatatttttaaatagggttataatttattgaaagtatttattgttgagttattttttatgagtttattttgaatgagtagttttgaaaattaaggaatttgttttttttaaaaaagtaaatagtttaggtattgtggtttatgtttgtaattttagtattttgggaggtcgaggtgggtggattatttgaggttaggagtttaagattagtttggttaatatagtgaaatttcgtttttattaaaaatataaaaattggtcgggcgtagtggtttatttatatttgtaattttagtattttgggagtttaaagtgggtggattacgatgttaggagtttaagattagtttggttaagatggtgaaagtttatttttattaaaaatataaaaattagttgggtgtagtggtaggtatttgtaattttagttatttgggaggttgaggtaggagaattatttgaatttgggaagtagaggttttagtgagttaagatcgtgttattgtattttagtttggatgatagaatgagattttattttaaaaaagaaaaaatagtagttaggtatggtggtgtgtgtttgtaattttagttatttaggagattgaggtaggagaattgtttgaattcggaaggtagaggttatagtgagtcgagatattgtggtattgtgggttattgtgttttagtttgggtgatagagcgagattgtttaataataaaaaaaagtaaatatatattttaattaggaaattatgaagtagattaatttagtggttttagaaatttggggttataaatgtaggtatttttttgtgtgattatgttcgagtagttatttatatagtgttttgtaaattgtattgtagaatatgttaatttagttagtgttgatttaaaatttatattgtatttggtattatgtgtatgggatagagaaaagaatgttttagtttacgaaagaatggtggtgttttttttttatttttatgatattattttttgaattatattataatagttttttaatttaaaaggagaatttttgtgtatatattaagtatttattgaatataattttttttttagaaaataaaatattagatagtaaaaagaatttgtattttgaattttattttttattattttatattttagtaaaaattttgattttagtggtttttgtaaaataaagtatttgggttttatttttggttttgttaattattagttgtatgattttggggaaattaatttaattaatttgtgttttagtttttttatttatgaaagggaaaggggagtaatattatgtttattttttagaattgaatagtttttgttgttattaatatttttaagattaatagtttagtatggtagtaataataaatttttttttttgaaataaagtgttattttgttattaggttggagtgtagtggcgttatgttagtttattgtaattttcgcgttttgggtttaagtaatttttttgtcgtaaatttttatgattattattttatttttttagtttttttagtgtttgtttaataggttttttaataattataattaaattagggttttacgtagttttgtttttgtaaataaaggaatttagtttataatttaagaggaattttaaattttattttttttaaagaattttaaaggagatttagttaataatttatgggaattttagaaatttgttttttttatttttaatttttttggagattttaatttattaaattttgttttggaatttttgttgttgtttgtttgtttaatttatttttgttattttttttttggttgtttattagggagattgatttgttttttttttatttttataattatttttatttttagtgttgtttttttttatttgatttgtattagaaaagattttggttagtatttttgttttttgggtgaatgggaaagaagagaaggtaggtagtaaatttgttatttttttgggttatgttttttaaattatttttttaatgttaggattttttaagtttttgtttttgaattattgtagttttttttagggtgattttatgtattgttatgtttttaatttttattttttaatattttttattttataaaggagttttagttatattaaataatttaatttttttttagagtgttatttttgtttaaagggttttatttttttgggtaatattagttttgtttgtaattattttttataagtttttatttttttgttatatataaatatatataatgtttttaaagtggttgttttttattttttttttattgtttgtattaggcgttagtttgtttttaagaaagattttttttaggaattatattttattgtttttgtatttttagagtttatagattttaggaattaattttattgtttacgaatttaataataattaatatatttttattgttttgtaaggttgaagtgggagaattatttgagtttaggagattgggattagtt

SEQ ID NO: 1065 - DNA, 8196 bp, Artificial Sequence
  chemically treated genomic DNA (Homo sapiens)
gtttaggaggtagaggttgtagtgagttaagatttcgttattgcgttttagtttgggtaatagagtgagattggttaaaaaaaaagtgaacgtgggttgggcgcggtggtttatgtttgtaattttagtattttgggaggacgaggtaggcggattacgaggttaggagatcgagattattttggttaatatggtgaaattttatttttattaaaaatataaaaaaaaaaaaaatttgttaggggtggtggcgggtgtttgtagttttagttatttcggaggttgaggtaggagaatggggtgaatttgggaggcggagtttgtagtgagttgagatcgtgttattgtattatagtttgggcgatagagcgagattttgttttaaaaaaaaaaaaaaagtaatgtagggtaggggatgggatggtgagggttttattttagaatgataaagagataaaataattaaatgtaataggtggtatggattggatttaaatttaaaaggaaatttttataatagatattttggagttaattaagaaaatttgaatatggattgaattatatattatttaatggagatattatttttttaggtgtgaaaaggggtcgggtttagtggtttatatttgtaattttagtattttgggaggttaaggcgggtagattatttgaggttaggagtttaagattagtttggttaatacggcgaaatttcgtttttataaaaaatataaaaatttagttgggcgtggtggtatgtatttgtagttttagttattcgggaggttgaggtagaattgtttgaatttagaagatagaggttgtagtgagtcgagattgtattattgtattttagtttgggtaataagagtaaaattttgttttaaaaaaataaaggggggtattgaggttacgtgggggattgtttttgagagatatatgttggagtgtttaggatgaaatggtaggataagtgtaattttaaatttaaaaatatataaatgtttaataaatatataaataaatatagtaaaatattatttttgagtttagttggtaaaaatacgggtgatttttgtatttttttaattttttggggtatggtggtttacgtttgtaatttttgtattttgggaggttgaaacgggaggattgtttgagtttaggagtttaagattaatttgagtaatatggtgaaattttgtttttataaaataaaaattaaaaatttatttaggatttgtggtatatatttgtagttttagttatttaggaagttgaggtgggaggattattggagtttaggaggttgaggttgtagggagtttcgatcgtggtattgttttttagtttaggtagtagagtaagattttgttttaaaaaagagggggtttattgagtaattttttggttttgaggagaaaataaattttaggattttgtatcggagaggtttttgtttttagtttgaatatgtggttgatgcgggttttttagataggttattggattttttttattatatattttttgtttatttattttttaatttgtttttttataaaataggtgttaatttattaataagtaatgtatatttttaagtataagaataggggtttagggttgggcgtaatgatttacgtttgtaattttaatattttgggaggataaggtagacggattatttgaagttaggagtttaagattagtttggttaatatggtgaaattttatgtttattaaaaatataaaaattagttgggtatggtggtgcgtgtttgtaattttagttatttaggaggttgaggtaggagaatcgtttgaatttaggaggtagagttgtagtgagtcgagattgtattattgtattttagtttggacgatagagtgagattttattttaaaagaaaaaaaaaaaaaaagaatagggttttagttagtatttatttcgagaatatttagtttattttggagatttttggtttgaattgggagtgaaggaagtaggtcgtagttttcgtttattttggtatttttagtatttggtataggagtttattaattgtttataaaatgaataaataattgaattaatgaatgaataagtttgatttattggaggttatatgaggagtgtaggggagtggaggagtaataatttaaggtttttgggttcggttttgttttaggggttttattttttttgtagagtttaggaagttttttatgagttaattttattttggttttaaggttgtagagatagtggggtttattttagttttataaaatttatatgtaggttgggagtagtggtttacgtttgtaattttagtattttgggaggttgaggtgggtggattatttgatattaagaatttgaaattagcgtggttaatatggtgaaattttaattttgttaataatataaaattagttaggcgtggtggtgtgtatttgtgattttagttattcgggaggttgaggtaggagaatcgtttgaatttaggaggtaggggttgtagtgagttaggatcgtattattgtattttagtttgggtaatagagtaagattttattttaatgataataataaaaaaaattatatgtaatatttaaatttttggggttagtaatttatttgggaatttagtgtaagttaaggttttttttttagtaaatttatattttgaaattagatattttttaaagtttgtataagatttgagatggtttagggattttttattgttaagtttatatgcgggttttaggtaatgaattttaggatttcgagaagttaaggaagtttatggtttattttatttagtgagatttttttgggttgatatttcgttttttagttgttatagggttttaggttttttagttatttttagaagggtttgtaatgaagagaggaaggggttgttgagtttagtggtttggggtatcgttagttttggatttgggttttttttaggaagaagttttagtttttatttatagtggggtgtatatgattttttagttttttaatgggtgttgttggtagatttaggttttttaggtaagttgtttttggtcgttttttgagtttttgttttatgtttttgttttttggggtggataggtatttgttggagtgatttaggtttatagggtatttgtgttggtttgatatatatagatttgagtgttttaattaaattgggattttttttatattgtttttaaatttaggagtaagtttttttgaatattttttttgtgtagaatagtttttagatgattaggaaaggtggcgatttatatatttgtaattagtatttttgtaattattttgagaggtagtagtggaggaatttgtttatagatgatagtatggaggtttagggaggttgtgtgattattttatttatttaattatttttttattgagtatttgttatgtattaggtatggtgttaggtgttagagagtagttgtttttggagttatagtttaatagtgtggcgagatttttaaatattattttaaattaatgtggtaaatgttatgtaaaagttatggtttaagggttatggggatatataaattaatttggggtgtggagaggttaaggaaggttttttagtacgtggttggtgtaacgtttttaaggataagaaggataaattgggtttaatgttatgggaagggattagtttgttgaaaaagtacggtggtttgaaatcgtatggtttggatagtgttgtgttagtagtttggtgttgtttggtattgttggttagtaagtttagagaaaaatggagttttggttgggtatggtggtttacgtttataattttagtattttggaaggttaagacgggtggattatttgaggttaggagttcgagattagtttggttaatatgatgtattaaaaatataaaaattagtcgggcgtggtggcgggtatttgtaattttagttattcgggaaataggtaggagaagcgtttgaattcgggaggtagaggttgtagtgagttaagattgtattattgtattttagtttcggcgatagagtgagattttatttaaaaaaaaaaagagagagaaaataaaaagaaaaagaaaaatgaagtttttttttgatttgaatattcgtggtaagtagtggtaatggagagattgtttttagaggattgacgggagggaggggttagttttgtaattagtttgttaagaataattgtaataaggtatcgagtgttaatttatgttaggtcggtattgatttttttagggtattattgtttatattgtaaggagatttaagtagtttgttgaagggtgtatcgaggattcgattttttttcggttttttttttggatataacgtgaggttaggggttggaggttgagaggatttcgtgaattgtagagtagagttgggacggggagttaggtttttcgatcgggtcgggggtattttttgggtttatgtttcgcgttggtacggagagcggggaggggggtacgcggttgacgatcgtcggggtagtagtagtagtatagttcggcgttggttagcggtttagagtcggggtagggagggttttcgtgcggacgggggttaagaggtcgtttttagttcggggtagttcgcgtattcgagtttggagttcggagtttggaggggtggggaggtttcgcgtttagggtcggatcggagggagagggagagcggtggtttttttttcggttttcgtcgttagtcgatcggggcgttgggcgggcgcgcgggagtcgtagtttttttcggggggcggattcggtttcggcggcggtatttagtttttgtttcgataggtgcgcgtcgcgaaggaatgtagtcggtttgatttattagcgttttttttttatttgcgcgttcgttttataaagcgttgttcgtttcgtttttatttttttaattttcgcgttcgttttcggatagtttttgttcgttcgcgcgttgtagttttattttttagcggtagtttaggcgcggagggagcgagttcgtttcgaggtaggtttaggacgggcgtatagtagtagtcgaggttggtcgggagagggtgagtgttcgttttagttgggtagtcgcgtaggggagttggtcgggtagggtcggtggtttttgttttttttttttttttttgaaggttgataggtttcggtttttttgtttacgttgcgtaggataggtgtttagttttttcggggtgcgtcgggggtagttggtagttaaggggtagggtagttagagaagggtggtgtttattagatttttaggttagaggagcgttttgggtgcgtttgcgggagaagtgggtagaggttagtggttggtagtttttttggttgggtttttttagggtttgtaaagaaggtggagtagatattagtttgagtgttgggtttagtttattatggcgtatttaatgataaattaatatttttgatttttatgtgaaatttcgttttttttaatattggtttttatttttaaaagttattttgagaggtagacgttatttcggttttaggtagggtttgttttatgcggtgttatagtttatttggggttggggagtttttgatttttttttttttttggttaagtataggtttgttttttttttaaagttagttttaggcgtttttttttaggaagttttataggttttatttattagttttagggttgtgtttaatattgttattttttgtagtattcgtttttttttttatggtttagtttttggggtggttttttggttgggattggggttttggggtttttggtgatttttaggagtagggatagggttttttttttgtttttatggttttgttatattttgaggataaggattaggtataggtggtatggttgttgttgttcgaaatagagttggtagtgaaggtttggagtttttattttgggggttgagggaaggatagtaggagggataggaggggaggtatgtttgtttattcgattttgattttttagggagatagaatagttaagggtttggggtttttagatttttggttagttgtttttttggggcgaggaagggtttgggtttttgaggggaggagatgtgatagcgggagaggatagtggataggagtaggtgtgtttagaggggtttttaggggttgggatgggggttaggggagttttgagtttgtgggtgggtgggtatggtttgtgtgtgtgtgtgtgtgtgtgtgtgtgtgtgtgtttttgtgggggggaaattgtttgtgttgtagtgtgatggtatttagggtggtagttatatattttagggatttgttggtatataaagtcggggtagtttggtggggttcgggtcgtttggagagtaggtgttttgagcgttgggtttagtttatcgtgatatatttaatgataaatataaatttttaatttttatgggaaatttcgttgtttttaatattggtttttatttttaaaattttttaaataaatgaagttaaatatttttgggtgtttcgttaattttttaattgttattttgtagtttttgcgtggaggttgttatggaggttaaaggtagggtttgtagagtaggttttgttttggtttttttagtgttgttcgcgggatggggaagttttatagttttttgtgtttggttttttatttgggaaacgggtagaatgaaattatttttcgtcgggtttttgtgttgagtaatttttttcgtgaagttttgggtttatatggtagttatagtgtgggaattagtattgtttgaggggttgtggttagggatagtgggaggaagagttgggtttagttttttaggtttgtatttgtttgtgtaatgatgtttgggaggtttgagtttgtagtttgtattgtgtagtatgtgggtgtggcggttatatttcgaggttgtaaggaagttatttttttttaggaattttgttgtttttattttttttttgttggtttagggttgttttttagtttttgtgttataataggtttgatttgtatgtgttggcgttgttgtggttttttttaggttgtacgttttagaagtaggttacgtttttttgtttttggtttgagaagggtttttttagtatttcggggattttagtttttagattttggggtggttattgttttagaagtcgggttgagataggatttaatggggagggttcgtgggtagggtagaggtttgggtttttgggagatttggttttagagaaagaggcgcggtgtttatttttgtttcggttttgtaggtttggatggttttgtcgttagtttttttttttgtttaggttttaggttgagtattttttagagggttttagggatgtttagttttgttttgaaggtcgttgaggatttaggatggtttaatattgaatttatagtcgttggggacgttttgaggggagttatagtgtgtgtgtatgttttattttgggttaatttgtgaaagggtgaatagtttaggggtttagaaaatttaattttggggtaggtagaggtataggggagggtagatgatttagattttattttgatgggtcgggtagttattgtagaatttaattcggtgtagtaagttattgcgggtagttgtggtttagttttaggttttagatattgggaggggttttttttttttcggttgtgttatttttattaaagggtaagtgggttaggatagaaggagtaggaggtagagttgcggtttttttttagggaggtatttttattggatgattttgttatggttaagtttgatttaggtttattgggagttaaaaggtaaagaagaataaatttatatttgtttttagggagtttagtgttgagaggtttggtattgggataaattcgtaaattagagtttttgagggttggagggggtttttcggggtagggtataggttattgtagggatggtacggaatagggtagcggaaaaggtaggagttcgaggtttagggttttgtttttggcggttgggcgtttttggttatattgttggtgtttagagttttagtttttatagttgtgtagcgagaggaagttgacggtatcgattatggttgtggaggttttatgtgttaattgttgttgttttgtagg

SEQ ID NO: 1066 - DNA, 8196 bp, Artificial Sequence
  chemically treated genomic DNA (Homo sapiens)
tttgtagaatagtaataattgatatatgaggtttttatagttatggtcggtgtcgttagttttttttcgttgtatagttgtgggaattgaggttttgagtattaataatgtgattaagggcgtttagtcgttagaggtagggttttgggtttcggatttttgtttttttcgttgttttgtttcgtgttatttttgtagtggtttatgttttgtttcgggaggttttttttagtttttaaggattttggtttgcgagtttgttttagtgttaggttttttagtattgggttttttgagggtagatgtgggtttatttttttttgttttttagtttttagtgagtttgggttaggtttggttatgatagggttatttaatgagggtgtttttttgagagggggtcgtagttttgttttttgttttttttgttttggtttatttattttttggtgagggtggtatagtcgggaggagaggggttttttttaatatttggggtttggggttgggttatagttgttcgtagtggtttattgtatcgggttgggttttgtagtgattgttcggtttattagggtggggtttgaattatttgtttttttttgtatttttgtttgttttagagttaagttttttgggtttttgagttgtttatttttttataagttagtttagagtgagatatgtatatatattgtggttttttttaaggcgtttttagcggttgtgggtttagtattaaattattttaagtttttagcggtttttagggtaggattggatatttttgaggttttttaagagatgtttagtttgaagtttggataagaaaagaggttggcggtagagttatttaggtttgtaaggtcggggtaaaggtgagtatcgcgtttttttttttagggttaggttttttaggggtttaagtttttgttttgtttacgggttttttttattgaattttgttttagttcggtttttggggtagtggttattttagggtttgggggttggggttttcgaggtgttggagaagttttttttaggttaagggtaggaaggcgtagtttgtttttaaggcgtgtagtttggaggaggttatagtagcgttaatatatgtaggttagatttgttgtggtatagggattgggaggtagttttgagttagtagggaaagggtggggatagtagggtttttagagggaaatgatttttttgtagtttcggggtgtagtcgttatatttatatgttatataatataggttgtaggtttaggttttttaggtattattatataggtaggtataggtttggagagttgagtttagtttttttttttattgtttttggttatagttttttaggtagtgttgatttttatattgtgattgttatatgagtttagggttttacggaggagattgtttagtataggagttcggcgggagatgattttattttgttcgttttttagatgagagattaggtatagaaggttgtggaatttttttatttcgcggatagtattgggagggttaggatagggtttgttttgtaggttttgtttttaatttttatggtagtttttacgtagaagttataaaatggtagttagagggttggcgaggtatttaagagtgtttggttttatttgtttagaaagttttaaaagtaggagttaatgttagaaataacgagattttttataaaagttaggaatttgtgtttattattagatgtattacgatgggttgggtttagcgtttaggatatttattttttaggcggttcggattttattaggttgtttcgattttatgtattagtaggtttttggagtgtgtgattgttattttgaatgttattatattgtagtataggtagttttttttttatagggatatatatatatatatatatatatatatatatataggttatgtttatttatttataggtttagagtttttttggtttttattttaatttttggggatttttttgggtatatttgtttttgtttattattttttttcgttgttatattttttttttttagggatttaggttttttttcgttttagagaggtagttggttagaagtttggggattttaggtttttggttgttttgtttttttgagaaattagggtcgagtagatagatatatttttttttttgttttttttgttgttttttttttagtttttaggatggagattttaagtttttattgttagttttgtttcggatagtaataattatgttatttgtgtttggtttttgtttttagggtgtggtaaggttatgggggtagaggagaagttttgtttttgtttttgggagttattaggagttttagagttttagttttagttagagggttattttagaggttgagttatgggaaagagggcggatgttgtaggaggtggtagtgttgggtatagttttggggttggtgggtgaggtttgtagagttttttgaaggaaggcgtttggggttgattttgggaggaaggtaggtttgtgtttggttaagagaaaaggaaaattagggattttttagttttagatggattgtggtatcgtatagagtaagttttgtttggagtcgggatggcgtttgttttttagggtggtttttaaaagtaggagttaatgttagaaagaacgaaattttatataaaagttaggaatgttggtttattattagatgcgttatgatgggttgggtttagtatttaggttggtgtttattttattttttttgtaaattttggaggggtttagttagaagggttattagttattggtttttgtttatttttttcgtaggcgtatttaaggcgtttttttggtttggaggtttgatgggtattatttttttttagttgttttgttttttggttgttagttgttttcggcgtatttcggggaggttgggtatttgttttgcgtagcgtggatagagggatcggggtttgttagtttttagggaggggaaggggagataaaagttatcggttttgttcgattagtttttttgcgcggttgtttagttggggcgggtatttattttttttcggttagtttcggttgttgttgtgcgttcgttttggatttatttcggggcggattcgtttttttcgcgtttgggttgtcgttaggagatggggttgtagcgcgcgggcgagtagggattgttcgagggcgggcgcgggggttgggggggtggggacgaggcgggtagcgttttatggggcgggcgcgtaggtaggaaggaggcgttggtgagttagatcggttgtattttttcgcggcgcgtatttgtcggggtaggagttgggtgtcgtcgtcggagtcgggttcgtttttcggaaagggttgcggttttcgcgcgttcgtttagcgtttcgatcggttagcggcgggggtcgggggaggagttatcgtttttttttttttttcggttcggttttgggcgcggggtttttttatttttttaggtttcgggttttaggttcgggtgcgcggattgtttcgggttggaggcggttttttagttttcgttcgtacgggaattttttttgtttcgattttgggtcgttagttaacgtcgggttgtgttgttgttgttgtttcgacggtcgttagtcgcgtattttttttttcgtttttcgtgttagcgcgaggtatgggtttagggagtgttttcggttcggtcgggaggtttgatttttcgttttagttttgttttgtagtttacggggtttttttagtttttaatttttaattttacgttgtatttagagggagagtcgaggaagggtcgggttttcggtgtattttttaataagttatttaaatttttttatagtgtgaatagtgatattttggagaggttagtgtcgatttggtatggattggtattcgatgttttgttatagttgtttttaataagttggttatagagttggtttttttttttcgttagttttttgagagtagtttttttattgttattgtttattacgggtgtttaggttagagaagggttttatttttttttttttttttgttttttttttttttttttttttagatggagttttattttgtcgtcgaggttggagtgtagtggtgtaattttggtttattgtaatttttgtttttcgggtttaagcgttttttttgtttgtttttcgagtagttgggattataggtgttcgttattacgttcggttaatttttgtatttttagtatattatgttggttaggttggtttcgaatttttgattttaggtgatttattcgttttggttttttaaagtgttgggattataggcgtgaattattatgtttagttagggttttatttttttttaggtttattggttagtaatgttaaataatattagattgttggtatagtattgtttaaattatgcggttttaagttatcgtgtttttttaataggttggtttttttttatgatattgagtttagtttattttttttgtttttgaagacgttgtattaattacgtgttagagagttttttttgatttttttatattttaagttggtttatgtgtttttataatttttgggttatggtttttatatggtatttgttatattggtttgaaatgatgtttaggaatttcgttatattgttggattgtgattttaagggtagttattttttagtatttagtattatgtttggtgtatagtaggtgtttaataaaagggtggttgagtgaatgggatggttatatagtttttttgagtttttatgttgttatttgtaaatagatttttttattgttattttttagagtgattgtaggggtgttggttgtaaatgtgtgagtcgttattttttttggttatttgagagttgttttgtatagagaaagtgtttagagaggtttgtttttggatttgggaataatgtggaaggagttttagtttggttgaagtatttagatttgtgtgtgttaggttagtataagtgttttgtggatttgagttattttagtaggtatttatttattttaaaaaatagaaatatggagtaggagtttagagaacggttaaaaatagtttgtttgaggggtttgggtttgttagtagtatttattagagaattagggggttatatatattttattgtgggtgggggttgaggtttttttttagagaagatttaggtttagagttggcgatgttttaggttattgggtttagtagtttttttttttttttattgtaaatttttttgaaaatgattagggggtttggagttttgtagtagttgagaggcgagatgttaatttagggaggttttattaagtaagataagttatgagtttttttggtttttcggagttttggggtttattatttggagttcgtatgtggatttggtagtggggagtttttgaattattttagattttgtgtaaattttgaggagtatttgattttagaatgtgggtttgttgggaggggagttttagtttatattggatttttaaataggttattggttttagaagtttaaatattgtatgtgattttttttgttgttgttattgagatggagttttattttattgtttaggttagagtgtagtggtgcgattttggtttattgtaatttttgttttttgggtttaagcgatttttttgttttagtttttcgagtagttgggattataggtgtatattattacgtttagttaattttgtattattagtagagttggggttttattatgttggttacgttggttttaaatttttgatgttaagtgatttatttattttagttttttaaagtgttgggattataggcgtgagttattgtttttagtttgtatgtgaattttataaaattaaaataaattttattatttttgtagttttagggttagagtgaggttggtttatagggggttttttaggttttgtaagagaggtgaggtttttggaataggatcgagtttaaggattttggattgttgtttttttatttttttgtattttttatgtggtttttagtaggttagatttgtttatttattagtttaattatttatttattttatgagtagttaatgagtttttatgttaaatgttggggatattaagatgaacgagaattacggtttgttttttttatttttagtttaaattaggggtttttaaagtaggttgagtattttcgaggtaggtgttagttgagattttatttttttttttttttttttttttgagatggagttttattttgtcgtttaggttggagtgtagtggtgtaatttcggtttattgtaattttgttttttgggtttaagcgatttttttgttttagttttttgagtagttgggattataggtacgtattattatgtttagttaatttttgtatttttagtagatatggggttttattatgttgattaggttggttttgaatttttgattttaggtgattcgtttgttttgtttttttaaagtgttgggattataggcgtgagttattgcgtttagttttgagtttttatttttatatttgagaatgtatattatttattggtagattggtatttgttttataaaagaataagttaaagaataaatagataggggatgtgtggtggaaagagtttagtgatttgtttggagagttcgtattaattatatgtttagattgggggtagaggttttttcggtgtagaattttggggtttgttttttttttagagttaaggggttgtttaataggtttttttttttttgagatagggttttattttgttgtttaggttggagggtagtgttacgatcgaggttttttgtagttttaattttttgggttttagtgatttttttattttagttttttgagtagttgagattataggtgtgtgttataaattttggataagtttttaatttttattttgtagagatagagttttattatgttgtttaggttggttttgaatttttgggtttaagtaattttttcgttttagttttttaaagtgtaaggattgtaggcgtgagttattatgttttaaaaagttgaaagaatataaaaattattcgtatttttattaattagatttaagaataatattttgttgtatttatttatatatttgttaaatatttgtatatttttaaatttgaagttgtatttattttgttattttattttaaatattttagtatgtattttttaagaatagttttttacgtaattttaatatttttttttatttttttgagatagaattttgtttttgttgtttaggttggagtataatggtgtaatttcggtttattgtagtttttgttttttgggtttaagtaattttattttagtttttcgagtagttgggattataggtgtatgttattacgtttagttaaatttttgtattttttgtagagacggggtttcgtcgtgttggttaggttggttttgaatttttgattttaggtgatttgttcgttttggttttttaaaatgttgggattataggtgtgagttattgagttcggtttttttttatatttaaggaaataatgtttttattaaatgatgtgtgatttagtttatatttaaatttttttagttgattttaaaatgtttattataaaggtttttttttgaatttgagtttaatttatgttatttattgtatttgattgttttgtttttttgttattttaaaatagaatttttattattttattttttgttttatattattttttttttttttttgagatagagtttcgttttgtcgtttaagttgtagtgtagtggtacgattttagtttattgtaagtttcgttttttaggtttattttatttttttgttttagttttcggagtagttgggattataggtattcgttattatttttggtaaattttttttttttttgtatttttagtagagatggggttttattatgttagttaggatggtttcgattttttgatttcgtgattcgtttgtttcgtttttttaaagtgttgggattataggtatgagttatcgcgtttagtttacgtttattttttttttagttagttttattttgttatttaggttggagcgtagtggcgagattttggtttattgtaatttttgttttttgggt

SEQ ID NO: 1067 - DNA, 5300 bp, Artificial Sequence
  chemically treated genomic DNA (Homo sapiens)
ttaggggtttaagatagttaaatttgggttgggatttgattgtaattttagtgttttgggaggttgaggtgggaggatcgtttgaggttaggggtttaagattagtttgtgagaattttatttttataaaaaattagaattaaaaaaaaattagcgattgggcgtggtggtttacgtttgtaattatagtattttgggagtttaaggtaggtagattataaggttaggagtttgagattagtttggttaatatggtgaaattttatttttattaaaaatatagattagttgggtatggtggtggatgtttgaaattttagttatttgagaggttgagatacgagaatcgtttgaatttagaaggtagaggttgtagtgagtcgagattacgttattatattttagtttgggtaatagagtgagattttgttttaaaaaaaaaaaagaaaagaaaattagttaggtatagtggtatatgtttataatattagttatttgggaggttgagttgggaggagattgtttgagtttgggagttttaggtagaagagagttatgattacgttattgtattgtagtttgggtaatagagtgagatagatattgatttttaaaaaaaagaagatagttaaatttgtttgtgtttaagttaagaagttttgggttaggttattgttaagtgttttttttgtttatttgtttttgaaggttttggttttttgatttttagtttagtatttttttttcggcgtttagttttttgttttaggtttggttggatgtggggagtgttttgggtagcgttgagttttcgtgtgtttttttttatttaggtggtggttgtggtgatggatatatttattgatatggagtttttgtgtgattttatggaggttttaagtcggcgtggtgtttttgtgtatttgttttttgtttaggagtatttgaggtattttttggagatgtgttataagatggattttaatggggagtatttgtcggttagtgaggattaggggtagtaattaggggtgtgggcggggagttagggagggtaggggagttagtgggtggttagttagtattggggggtattgggagtggggggtgggtttttttagttgtttggggttagagattttatggggtagagatatggtttgagttttatttttttaaggttatttttaatttatttttatttagaatatgcgtgtgcggagtacgtgtggggatatatattgtagtaaggttggtcgtcgttttacggggtaggttttggagaagttcgtttttattgattgtgagtaagtggtggcgggtagttataggtgagtaggtacgaggaggtaaggggggtttggggttgtattattggttggtagttttgagtttttttttatttattttttttttcggatacgggttgagtatttgttatgtgttaggtattatgttaggtttaggggagggtgtcgggggtatcggttttggaggagtttattttaggggaatgattattttaatatttttggtatagaaaatgattatgtttattggaattggagtgattttagggaattttttttaagtttatttgatagatggggaagttggggtttttatgaggttatatattaagtagggttagggtaagtatagattttggagttggagttttgtttttcgttgtgagttttcgtggtggtggggtttgggtttagcgtgttggattaggtatgtatttttggttgtgatttttgtcgatttttaggattttgtattttgttttttgatttttttgtttttttgtttttagttttatttggttttgtagttaggtttatattagtatggtgttgtagttgaggggtcgtatcgtggaagattttgatcgggagtttcgttgtttgtacgttgagtcgtagtttgtggagggtttttgtggcggtgaggattcgttgttttttcgggtattgcgttttttttttgtggttttagtttttaggtttgatgttttaagttttacgtcgtttttgttttttagtattagttttagtagtattaagtagttatcgtttatgggtcgttttttttatttcgttttattaggaggtggtgattgtagtgatacgggtgtggtgttttcgtttttgggttttgttcgtcgtgaggttagtggttagttttttttatatcgttaattgttagattttaattacggttttttttttgggttttatagggttaatttcggtaagttaggggtatatttatggttttagtttttttttgtttttaattataatagtattagttttttaattttggtagtggggttatttttgttttttcgttttcggttttttttttagttttatcggggtgttttagttttgtttcggtttttagagaatgggtttttaggaagttaagagtttagttttttgcggggtcgatgggtatttggtataattttggagatagtggaggagaaggagaagaaggtatttttaagttagagtcgtggttagttggatttttttgtttttttttttagagttcgagaagtgggagattttgattttggggttatttttaatttaggtttttttcggtttggcgagtaggttttagaggataggaggttgtttttaagttaggtcgatagttagttggattttttgtttcgagttttgggtattgggggtgtttttgagttgggtttttttagatttggtgatcgggttttggaggataggaggttgtttttaaattaaagtcgtggttaattagattttttgatgtagtattttaaggtttagggttttagagtgttttttgaaattaattttttagttagatttgttagacgggtattagatgagcggcggtagattttggggtatagttagttggattttattataaagttcggtttatttcgtggtgaggggtttgggtttaatggtttttcgatattaagttttgttcgtacggttggagttgggtttggggatgagaaacggttaattttgggttatagtaagttggattttattattaagtattattagttgtacggggttaggtagggaattgagtttgggggttttaagggtggttattttaatggtggtaatagtgatttggttagggatgagaaacggttgattttgggttatagtaaattggattttattattaagtataataagtttaagtttaagtagtttcgaagtcgttttgagttttagttaaaggattggtatcgggggtgtattggtaagggtaggttttttttttgtttatcgagattttggatttgtttaggttttagattggggaagggaggtgtttagaaatttaggttagatatattttttgggtttaagatttttgtgtatatatatatatatatatatatatatatatattttaattagtatttttttgaatttaggttgtgtttttagttttgtgttgggtttgtagagttgataggtgggttatatttagatttggggatagaggtgaaatgtataagttgttggagaaggggttagagttatattaagttaaaggttaattagttatagagggtgttagaaaataaagggtagagagttttggagaaggtggagtagttagaaaatttttttagaggagatggaggtggtttttgagttaggttttgaaggatggggaggttttggatagagggaggagagagttagaaaaatttttggtagagagaattaggtgaaagagatgttttaaagaggattgagtgggtttgaggtgaatgagtgaggaagagtagagtatgtggatattcggaaatatatatatatatatattattattattattattattattgtcgtcgttattattttgttgagttattattattattattattattgtcgtcgttattattttgttgagtgttttttgaagtataggttgtgataggttgtgggttatttttttgaatttattatttattcgggatagtaaatatgatatatattaataaaggtagattttattgtgaattatagcgtttggtgtattttgaattttgaggagttatgggagggatacgttgggggaatgggaagggtattatttaggttaattatggggaaatttttggaggagggtgaatgtcgaaggaggaattgggggagtttaggggttttaagttattattgtgatattttgagagaattcggggtttttgtagattttataaaatgtgggttaagtttattttgtttaagtgtgtagtagggtttttggtttttattattattttggggatagaagttggttgttgagtgagtgatagaggtcgtgcgagaggtatatcgtggaagttaattagtatttatatttttgtttattttggatttttttttagtttttttttgagtttttgtttttttagtttttttttttttttagtatttgtagtttggttgttttttcgtttttggttgcgttttttttttagtttcggtttggtcgtatttttgttttttggaattttttttatgggtagttttttttagtttattcgtttttagttttttattttattcgttagtattttatttttttgttgggttttagatatggatttttgttttttaaggtatagttggatttatttttttttttaaatttgtttttttttcggttttatttttattaatatttttattattaattttttcgcgagatatttttggtttttttttttttttatgttttataatcgattagtcggaggtttaggtcgatgatagtttttaaaaagtttttgaatgaataatgaatgaatgaacgcgagtaggttaggcgtggggttaggcggggtcgcgtttagatcgttcgcgattatagagttcgtcggaggtcggaggtagaggggttggatgcgtggcggggagcgtcgggttttttcggaagtttttttggacggaagtggaaacggaaatttttttagggagtttaaggtatagtcgtcgcgtgcggagtttgttattggttatttggtaagttggtgtgaggggaatttgggagggttagtttcggttttgggtcgggaggggtgggggttagaggatttagggtcggaggttttggtgggggtttagtgggcgggattcgaggacggaggggtcgggaggtcgagaggggcggggtcgcggcggggtttgagggacggaggtcgggatatttgggaaaggattcgtcggttttgaattttcgttttcgtcgtttttagg

SEQ ID NO: 1068 - DNA, 5300 bp, Artificial Sequence
  chemically treated genomic DNA (Homo sapiens)
tttaggggcggcggaggcgggagtttaaggtcggcggatttttttttaagtatttcggttttcgttttttaggtttcgtcgcgatttcgtttttttcggtttttcggttttttcgttttcgggtttcgtttattgggtttttattagaattttcggttttgaattttttggtttttatttttttcgatttaggatcggagttgatttttttaggttttttttatattagtttattaagtaattagtaataagtttcgtacgcggcgattgtattttggattttttaaaaaggttttcgtttttattttcgtttagggagattttcgggagagttcggcgtttttcgttacgtatttagtttttttattttcggttttcggcggattttatggtcgcgagcggtttgggcgcgatttcgtttggttttacgtttagtttgttcgcgtttatttatttattatttatttaggagttttttaggagttgttatcgatttagattttcggttggtcggttgtgaggtatgagggagaggaggggttaggagtgtttcgcggaagggttgatgatggaggtattgatggaaatgaagtcggaggaagggtaggtttggggaaagggatgagtttagttgtgttttgagggatagaagtttatgtttggagtttagtaggggagtggagtgttgacgaatgagatgaggggttgaagacgggtggattagaagaggttatttatggagagagttttaggaggtagaagtgcggttagatcgaggttggagaaagagcgtagttagagacggaaaggtagttaggttgtaggtgttggagagaggggaggattgaggaagtaggggtttaggaaaaggttggaaaggggtttagggtgggtaaggatgtgggtgttggttggtttttacgatgtgtttttcgtacggtttttattatttatttagtagttaatttttgtttttaggatagtgatgggggttaagggttttgttgtatatttggataggatgaatttggtttatattttgtagaatttgtaaaagtttcgggtttttttaaaatgttatagtggtaatttggagtttttggatttttttaatttttttttcggtatttatttttttttaggggtttttttataattggtttgaatggtgttttttttatttttttaacgtgttttttttataattttttaaagtttaggatatattaggcgttgtgatttataataaagtttgtttttattgatgtgtattatgtttattatttcgggtaagtggtgagtttaggaaaatggtttataatttgttatagtttgtattttaagagatatttagtaagatgatgacgacgataatgatgatgatgatgatgatgatttagtaagatgatgacgacgataatgatgatgatgataatgatgatgtgtgtgtgtgtgtgttttcgggtatttatatattttgtttttttttatttatttattttagatttatttagttttttttagggtattttttttatttgattttttttattaaaaatttttttaatttttttttttttttgtttaaaatttttttattttttagggtttggtttaaaggttatttttattttttttaagaaagttttttgattattttattttttttaggattttttgttttttgttttttaatattttttgtaattggttaatttttaatttgatatggttttgattttttttttagtagtttgtgtattttatttttgtttttaggtttgagtgtgatttatttgttagttttataggtttagtatagggttggaaatatagtttagatttaagaagatattagttagggtgtgtgtgtgtgtgtgtgtgtgtgtgtgtgtatataagaattttgagtttagagagtgtgtttgatttgggtttttagatattttttttttttagtttgggatttgagtaagtttagagtttcggtggatagaggaggggtttgtttttgttagtgtattttcgatgttagttttttggttaggatttaaagcggtttcggagttgtttgaatttggatttgttgtatttagtgatgaggtttagtttgttgtgatttagggttagtcgttttttatttttgattaggttattgttattattattgagatggttatttttgggatttttaggtttagttttttgtttggtttcgtgtaattgatgatatttggtgatgaggtttagtttgttgtggtttagggttagtcgttttttatttttagatttagttttagtcgtgcgagtagggtttgatatcgggagattattgggtttaggttttttattacggaatgggtcgaattttgtgatgaggtttagttggttgtgttttagggtttgtcgtcgtttatttggtgttcgtttggtaggtttggttgaggagttggttttaaggggtattttggaattttgggttttggggtattgtattaggaggtttgattggttacggttttggtttagggatagttttttgttttttagggttcgattattaggtttgagggaatttaatttaggggtatttttagtatttagggttcgggataggagatttagttggttgtcggtttggtttggggataattttttgttttttggggtttgttcgttaggtcgaagggggtttgagttgggggtaattttagagttagggttttttatttttcgggttttggggaaggggataaggagatttagttggttacggttttgatttggagatgttttttttttttttttttttattgtttttagggttgtgttaggtatttatcgatttcgtagggggttgggtttttggttttttgggagtttattttttgggaatcgggatagagttggggtatttcgatggaattggaggaggggtcgggagcgaggaagtagaggtgattttattgttaaggttaaggggttggtattattatggttgagggtaggggaggattgggattatgggtatgtttttagtttgtcgagattggttttatagagtttaggaggggagtcgtggttagggtttgatagttggcgatgtagggagggttggttattggttttacggcgggtaggatttagggacgaggatattatattcgtattattgtaattattattttttggtagagcgaggtaggaggagcgatttataagcggtgattgtttgatgttgttgaggttggtgttggagggtagggacgacgtggggtttgggatattaggtttgaaggttagggttatagggggaggacgtagtgttcggggagatagcgggtttttatcgttatagaagttttttataggttgcgatttagcgtatagatagcggaattttcggttaaagttttttacgatgcggttttttagttgtagtattatgttagtgtgggtttggttgtaaagttaggtgaagttgggggtagagggataggggggttaggaggtaaagtgtaggattttgggggtcggtaggagttatagttaggggtgtatatttggtttagtacgttagatttaaattttattattacgagggtttatagcgaggggtagagttttaattttagagtttgtgtttgttttagttttgtttagtgtgtgattttatggaggttttaatttttttatttgttaaatggatttgggggaggttttttgaagttattttagttttaatgggtatagttattttttatattaagggtattaaagtaattatttttttagagtgagtttttttagggtcgatgttttcgatatttttttttgagtttggtatgatgtttggtatatggtaggtatttagttcgtgttcgaaggaaaggatgagtggagggaagtttagagttgttagttagtgatgtagttttaggttttttttgttttttcgtgtttgtttatttgtaattgttcgttattatttgtttatagttaatgaggacgaatttttttagggtttgtttcgtgaagcggcggttagttttgttgtagtatgtgtttttatacgtgtttcgtatacgtatgttttaggtggaagtaggttgggggtgattttgagagagtgaggtttaagttatgtttttgttttatggggtttttaattttagatagttaagggaatttattttttatttttagtgttttttagtgttgattggttatttattggtttttttgttttttttgatttttcgtttatatttttggttattgtttttggtttttattgatcggtaggtgttttttattgaggtttattttgtagtatatttttaggaagtgttttaggtgtttttgggtaaggagtaggtatatagggatattacgtcggtttgaggtttttatgaggttatatagaagttttatgttagtgaatatgtttattattatagttattatttgggtggggggaggtatacgaaagtttagcgttgtttagggtattttttatatttagttaaatttggggtaggaaattgggcgtcgggaaaagagtattggattgaaaattaggaggttagagtttttaagagtaagtgaataggaagggtatttagtagtgatttagtttagggttttttaatttgggtataggtagatttgattgtttttttttttttaagagttagtgtttgttttattttgttgtttaggttgtagtgtagtggcgtgattatagtttttttttgtttagaatttttaggtttaagtaatttttttttaatttagttttttaagtagttggtattataggtatgtgttattatgtttggttaattttttttttttttttttttttgagatagagttttattttgttgtttaggttggagtgtagtggcgtgatttcggtttattgtaatttttgttttttgggtttaagcgattttcgtgttttagttttttaagtagttggaattttaggtatttattattatgtttagttaatttgtatttttaatagagatggagttttattatgttggttaggttggttttaaatttttgattttgtgatttgtttgttttggatttttaaagtgttgtgattataggcgtgagttattacgtttagtcgttagtttttttttaattttaattttttgtagagatggggtttttataagttggttttgaatttttggttttaagcgatttttttattttagttttttaaagtattgggattatagttaaattttagtttagatttgattgttttgaatttttag

SEQ ID NO: 1069 - DNA, 5822 bp, Artificial Sequence
  chemically treated genomic DNA (Homo sapiens)
ttttatgtagtttttttttgttttgggtttttgtttttatgtagttgtcgagtttttttaatattgattttggaagtattttattttttttaattttatgtgttttttttatatattttgttagttttattttttattattaaatttttgattttttatttgtattttttattttagattttatatatatagaaatagaggtaagtaatttatttggtttggttaaggagatatagtttttatttggggattttataggatgttggtattttatggattgatagtttatgggataggtagggtcgttattttttatagtagggtggatgtggtattttttaaaagaggatattaggtattttttttaggaagtaaggttatgttttttcggtgttttgttttttggtataaattagttagtagttttaaggtgtaaatagagtggatagatatttttttataatattattatattttatattgttttaaatttttttttgttttttttttacgttgtattttaagtttttttttagttttcggtataatttaagtagggaatatatttttttttttttaattgtattatttatttttttaaattatttttttatttatttatttgtttatttaatatttatgaagtatttgttttgtaattggtgaaatattagataatgaagatttaaaatttatttatatttttaatataaatattaattgattatttataaagtgttaggtattgtgttatttgttaggaatagaaagatttttgagatatagtcgttgtttgatatatagtaagaattgaataaatatttgttgagtaaaggtaattattttgataattataagtagagtaaaaatggttattttggggaatgtttataggaggggaggtttagagaaattaaaaagtgttttttgtagatattaatgtttatattgagatttggagggtaagttgaattagttaagtgagaggtatgagaggtaatttaaggtttgtaggaagaataaatggtttgtgtgaaggtttgaaaattagggagggtgtgtattggaggggtagttatgggggatagagaataaattaattagtgtgattatgattttaggattgagatggaagtttttatgtgggatggtataagtttatttaaatatatggttaaattgtggttttagagttttaggattttgttgttgtttgtatttggttgttagagggatatgaggatgatttagaaggggtatgtattatttttatttatattttgttggtaagagttggttgttgggatttttttagttgtaaaataggttaggagaggtagtttaattgtgtttttaggaaggagagattgttggtggtagttagaattatggagagtttttagggattggtatatttagagttgggtagttatttcgatttagtttttttagagtgtttgttagcggttgttagggaggtttatgggtagataggtaatttaagatttggggaaatttttggagtttagggtagtatttgttagtttaaggtagttttgtaggatgtaagatttttttttttaaagtgaggtttgaaagttgtatgtttagtttttagataaaggtggattttgtgtgggaaattgttaagaattatgaagggtttgggtttttatttgatttgtaagttgataagttagtttgttatggatttgtgggtattgatggagatatgcgatgtttgtattatagaaaaagaattttttaattatttttttttttgaagaattttttaatttatagtaattgtagtggttagagtgttagtatatttttttatagttttttaatattattttttataagatgatataaaagaaagaggtgatttttgtatatgtagtaagatgtgttataagagaagaattttgagtttagggaaattgaattttttataatgggtagtaaataggtttattttttgttttgtaggttgatattgtttttattttttaaagttgtaagtaatttttttttttttttaaagagggatattgtttgtatttttaaaggtcgtttattttataaatattttggaaaagagagtttagaaaaaaggtagttaggttttttgtttgtaagatgtgtagaaatgtgagagatatttgaatttgttttttaataaagataggtttttttttagtaagatgaagtgttttttagatagaagttttttttattaaatttttttttttttgatttatagatatttagaggttttagggtttagtttttagagtttttttttatatatattcgttttttggagggattttatttagttatatatttttgaatattattagttttatatttttaaatttatgttgataattttaaatttatagtttgttttttgatattgtttatatttttagatttagatattaaatttgtttatgtggtatttttatttggttattttttagttattttaaatttattatgtttttgatttttattttttatatgaaatttgatttttttttaatgtaattttttttagtaaaatgtattatttagttagtataatgtatttatgttagatagaaattttttttttttatgtttatatttaatttattagtatagtttagttttaaaatagattttgaatttgattattttttttttttgtattataaatattttagttttagttacgattatttttgtttttgatagagatatgtattttttttttgttttatttattttttaattttgtcgtatatatttttatttttttagtagttagtgtggtttttttaaaatgtaaattaaatagtattatttttttatttttaattttttagtgatatataaggtatagaataaaatttaaggttaagattatatatgatttgatttttgtttttaaatttgattattttttttttttttttttttgtattttatttgtttttgaaaatatttgttattgggttgttttaggtttttatagttagttgtgttgttaaagttatttagggtttttttagatgttagttggttagggaaattttttttgattattttaaagaaaattatatatttttttgtttttttttttttttatttagatttatgatttatagttttgggtattgtttgattttagaagtttatttttttgtattgttttttagtttagaatatatgttgtatggattaaaaatttggttgtgtttattgatgtagtttttgttttaaaaataatatttgatagaaagtaaatgtttaagaagtatttgttgaatgaatgaataatgaatgaataatagttaatattggatttttaaaatgataataatagagatataaataatttgtggttcgattttttttttttaagttaaattaattaattttatataaatttttttttaaaatgtatattttttaattttttaataattttggattgttatcgtaaaatttttgttatgtttttttagttttttggatatgatggagtttaaaattgaatataatataggtttttgagaaaagtttaggtagtttataattagtttttttttttttttggttttttttttttaattattttattttagtttttatttttgtgggtatatagtcggtgtatatatttatgggatatatgagatgttttggtataggtatgtaatgtgtaataaatattttatggaaagtggggtatttatttttttaagtattttttttttgtgttataaataatttatttatagttttttagttatttttaaatgtagaattaaattattgttgattatagttcgtttttttttgtttataggttttatatgtttatttaggaatgttttttgaaaagataatttttttagatataagtttggttatagaaaagtttttttaaggttagtagtttttagagtgacgaagtgagaattcgatttttatttgtttatagattttataaattttaaaatatttttttgaagaatattttgggggaaaaatataaaaaattttatggatttagttatagattatatatattttgaattgttatttttttatttaataaataaatattttttatgtgttaaattatgagttagaggttggaatagtatattgtatagagaatttggtttttagtttgagggatttagaattttgggtattattatttttgtttttattattgttgttattagtgttttttgagatatttttattttgattttttttgatttttatatattatgattatttttaatataattttaaaataagaattttatatttatggaaaaatatattttatttaatttgaaaaaataaggaaatagtgttttgttttttttagtttttttttttatttattgtaagataataattttttttttttagggttcgttttaattttttgtaaaggatttagtaatgaaatattaaaattttaggtatttttattaagtttattttttattttttttatatatagtttatatgttttatttaatttttattttttatattaaattaaaattatttttaaaatgattatatttttattgttgttgtgattttttattgattaatattttattaaagatattaattttttttaggatgtagagagatttatagaatttatattaaaatttttattgaatgaatttttttatttttttggtgattgtatatttgttttttttataaggagaataaggaagtaaattatgttgaagttgtttttaaatatagtttttttgttttatttgtttaggtagtttttgtttttattttagttttaatgaaaattttttaatttatattttaagtttttttttaaagtagtgtaagtagtatttaaaatgttatattttaagaaagaaagattttaacgatatttagcgttggttttgtaacgttgaaggtaatttattttttaatcggtttgtatagtaagaattgaaacgaatggggattgaattgttttgtttgttttttttatttttaggaaggaatgattacgtataaggtaagatttgcgttttttgatatattattttcgtggtatgtttgataaatttgttatttggtttagaaattagatttgaagttatgttttatttgatttgttttattgtttttttgtgattgagtgaatattttaataaattatagataaatatcgggtagtttttatagtgaatgttttaggtttaaggtaaataaatataaaggttgtataggtattttaatgaggagaattaaataatattattgtttaatggaatttagtgttagtatgataattatttttgaaatttttttattttattttattataagattttttatttaggagtaataattttgaaagagaaagaggatttattttaaaaatagaaataatttgtttaagaaagaagtattttttaatggttgtaagtaatttttaaaaattaaagtggtatatattggttaagaataataaataggataattttatatttgtgaatttttatattttaagaaaaaagagtatgataattttggtttataagatatatataatttttaatatatatatatatattttatatgtgatagatgtaaaatataaatttttatgtgaattgttaatatttcgaggattgattttggatattaaattaaattttgatgttgttttgtttaagtaatgtaagagttattagttttataaatggaatgattgaaagtgtatttaatttttgtattttgttgggtttaaatttagg

SEQ ID NO: 1070 - DNA, 5822 bp, Artificial Sequence
  chemically treated genomic DNA (Homo sapiens)
tttaggtttagatttagtaagatgtagggattaagtatatttttagttattttatttatgagattgatggtttttatattatttgaataaaataatattaaagtttagtttagtatttaaaattagttttcgaaatgttagtaatttatataaaagtttgtattttatatttattatatgtaaaatatgtgtatgtatattaaaaattatgtatgttttataagttaaaattattatgttttttttttttaaaatgtgaaagtttataaatataggattattttatttattatttttagttaatgtgtgttattttaatttttaaaaattatttgtaattattaaaaaatgttttttttttaaataagttatttttgtttttgaaataaatttttttttttttttaagattattatttttaagtggaagattttgtggtagaataaaatagaaaagttttaaaaatggttattatattggtattaagttttattgggtagtaatgttatttaattttttttattaaaatgtttgtgtaatttttgtatttatttattttaagtttagagtatttattgtgggaattgttcggtgtttgtttgtaatttgttaaagtgtttatttagttataaaagagtaatggaatagattaaataaaatatgattttagatttagtttttgaattaaatgataggtttgttaagtatattacgaaagtaatatattagagaacgtaggttttattttgtacgtgattatttttttttagaaatagaaagaataggtaaagtagtttaatttttattcgttttagtttttgttgtgtagatcgattaaaaaatgaattatttttagcgttataagattaacgttgaatatcgttaaagttttttttttttgaagtataatattttaaatattatttatattgttttgaaaagaaatttgagatataagttagaaagtttttattaagattgaaatgaaaatagaggttatttggataggtaaagtagaaaagttgtgtttaaaagtaattttaatatgatttatttttttgttttttttataaggaaggtaggtgtataattattaagaaggtggggaaatttatttagtagaaattttggtgtaagttttatgagtttttttgtattttagagaaagttaatatttttagtgaaatattgattaatgaaaagttataatagtaatagaaatatagttattttaaaaataattttaatttaatgtaaagaataaagattaaataaagtatataggttatatatgaggaaagtaaaaaatgagtttaatgaaaatgtttgagattttagtgttttattgttaaattttttgtaaaaaattgaaacgaattttgaaaaagaaaaattattattttatagtaaatgagaaggaaggttagggaaagtaaagtattgtttttttatttttttaaattagatgaaatatatttttttataagtataaaatttttattttaaaattatattggaaataattataatatataaaaattaaaggagattaaaataagaatgttttaaaagatattgatgataataatgatgaaaatagaaatgatggtgtttaagattttgaattttttaggttagggattaagttttttatgtaatgtgttgttttaatttttagtttatgatttggtatataggagatatttatttgttgagtgaaagagtgataatttaaaatatatatgatttatggttaaatttatgaggttttttgtattttttttttagggtgttttttaggaaggtgttttgagatttgtagagtttgtgaatagataaggatcgaatttttatttcgttattttagaaattgttgattttagagagatttttttgtggttaggtttatgtttgaggagattatttttttaaggagtatttttgggtaagtatgtgaaatttgtaaatagagggaaacggattatggttaataataatttaattttatatttaaaaataattaaaagattataaatgggttgtttgtaatataaaggagaaatgtttgaggggatggatattttattttttatgaggtgtttattatatattgtatgtttgtattaaaatattttatgtattttataaatatatatatcgattatatatttataaaaataaaaattaaaataaaataattaaaaaaaaaaaattaaagaaagagagaaattaattatagattatttaggttttttttagaagtttatgttatgtttaattttgaattttattatatttaagaagttggaaaaatatggtaagaattttgcggtaataatttagaattattgaagaattggaagatatgtattttgagagaaaatttatataaaattagttgatttaatttgaagaagaaagatcgagttataaattgtttgtgtttttgttattgttattttaaaaatttagtattaattattatttatttattatttatttatttaataagtattttttgggtatttattttttgttaaatattatttttgaagtagaggttatattagtgaatataattaagtttttgatttatgtagtatatattttaggttggagggtagtgtagggagatagatttttaaaattaggtagtgtttagggttatgaattataagtttgggtaaaaggaaagaggggtaagggagtgtgtgattttttttagaatagttagggagggtttttttgattaattggtatttgagagagttttagatgattttgataatatagttaattatgaaggtttgagatagtttaatggtaggtgtttttaagggtaagtggaatataagaagggagagagagagggtaattagatttgagggtagaggttagattatatgtagttttgattttgaattttattttatattttgtgtattattggaaagttgaaagtagagaaataatattatttaatttatattttagaagaattatattggttgttgaggaagtgaaaatgtatgcggtaagattggaaggtgaatggggtaagagaggaatgtatgtttttgttaagaatagagataatcgtggttgggattaggatgtttgtggtgtaggaggagggggtgattagatttaagatttattttgaaattggattgtgttgatagattggatgtgaatatgaaagaaagaggtttttgtttggtatagatatattgtattggttgagtgatatattttattgagagggattatattgaggaagaattaggttttatgtggaggatgaggattaagaatatggtaagtttgagatggttagaagataattaagtgaagatgttatataggtaggtttgatatttaggtttggaaatgtgggtaatgttaaagagtaaattgtaaatttgggattattagtatgggtttaaagatatgaggttgatggtgtttagagatatgtggttgaatgagatttttttaggaagcgaatgtatatagggaagagttttgaggattgagttttggggtttttagatatttgtagattaagaggagaaggatttagtaaaggaagtttttatttaaagaatattttattttgttaaagaggaatttgtttttgttggaagataaatttaagtgttttttatatttttgtatattttataagtagaggatttggttgttttttttttagatttttttttttaggatgtttataaagtgaacggtttttgaaaatatagatagtgtttttttttagggaaaaggaaaaattgtttatagttttggaagatagagatagtgttaatttgtagaataaagagtaggtttgtttattgtttattataaaaggtttagtttttttaaatttaaagttttttttttataatatattttattatatgtgtaggagttattttttttttttgtgttattttgtgggaaatggtattggggaattgtgaaagaatgtgttgatattttgattattgtaattgttgtgaattaaaaagttttttaaaaaaaaaaataattaaaaagttttttttttgtgatgtaggtatcgtatgtttttattagtatttataaatttatgataagttaatttgttagtttgtaagttaggtaaaagtttaggttttttatagtttttgataattttttatataaaatttatttttgtttggagattgaatatgtaatttttaaattttattttggaagaaaagattttatattttataaaattgttttggattgataagtgttgttttgggttttagaggtttttttaggttttgagttgtttgtttgtttatagatttttttggtagtcgttagtaggtattttagaggagttggatcggggtggttgtttagttttggatatgttaatttttggaaattttttatggttttagttgttattaataattttttttttttgagaatatagttagattattttttttggtttgttttgtagttaagaaaattttaataattagtttttgttaatagaatatgagtggaagtggtatatattttttttagattatttttatgtttttttgataattagatgtaggtagtaataaggttttagaattttaaaattataatttgattatgtatttaaatggatttgtgttattttatataaagatttttattttagttttagaattataattatattgattgatttattttttgttttttatggttgtttttttagtgtatattttttttaatttttaggtttttatataaattatttgttttttttgtaggttttgggttgttttttatgttttttatttggttaatttagtttgttttttaggttttagtgtaaatattagtgtttgtaggaaatattttttggtttttttaggtttttttttttgtggatattttttagaatagttatttttgttttgtttgtaattgttaaaatagttgtttttatttaataaatatttatttaatttttgttatgtattagatagcgattgtgttttaggaatttttttatttttagtaagtaatataatgtttggtattttgtaagtagttaattaatgtttatattgagaatatgggtgaattttaagtttttattgtttagtattttattagttataaagtaggtattttatggatattgagtaaatagatgagtaaatgaaagaatggtttaggaaggtaaataatataattaggaaagggaaaatgtgttttttgtttgggttgtgtcgaaagttgagaaaaagtttaaaatgtaacgtaaagaaaaggtaggggggaatttgagataatataaagtataataatgttatgaaagaatatttatttattttgtttgtattttgggattgttggttaatttgtattaaggggtaagatatcgggaagatatagttttgttttttaaggagggtgtttggtgtttttttttggaaagtattatatttattttgttgtggagggtggcggttttgtttgttttatgagttgttaatttatgagatgttagtattttgtaaagtttttagatgaaaattgtgtttttttagttaagttaaatggattatttatttttgtttttatgtatgtagaatttgaaatgggaaatataaatggaaaattaggagtttggtaatgggaggtgaggttggtaggatgtatggagagagtatataaggttggagggaatgaggtgtttttagagttaatgttaggaggattcggtagttatatagaggtagaagtttaaggtagaagaaagttatatgggg

SEQ ID NO: 1071 - DNA, 5406 bp, Artificial Sequence
  chemically treated genomic DNA (Homo sapiens)
ttaaaaggagtgtttagcgtaaatgtgattaggttaattgtgtttgttagttggtaattagggaagttaggattttatttttttatatagattgggagatatgagttttatttttatgatgattatattttaaaggaatggattttaggtttttgagaaagatatttttaggttgtaggaaatatataggtatatattttagagggatagaggaaggatttgtaattgtagttttttaaagttagtgttttagaggttatatattatgatttatatttaattttagtattttgagaggttaaggtgggaggattatttgagattagtttacgaaatatagtgagatttttttttttataaaaaatttttaaaattagttgggtgtggtggcgtatgtttgtagttttagttatttgggaggttgaggtgggagaattagttgagtttcggaggttgaggttgtagtgagttatgattttgttattgtattttagttgagtgatagagtgagattttgttttaaaataaataaatttttaaaaaggaaggatgttttgatatgttataatatggacgatttttgaggatattatgttaaataaaataaggtagttatagaggataaaagtatgatttcgtttatgtgaggtatttgtagtagttaaagttatagatttagaaagtagaatggtggttgttagttgttggagagaggagggaattggtggttggtgtttaatgggtgtagagttttagttggggaaaatgaaaaagttttggagatggatggtggtgatggatgtaaaatatgaatgtatttatgttatcgaattgtatttttaaaaatggttaaataataaattttatgttttgtatattttattataataaaaaattatggtatattgtttttgtaattttagttatttaggaggtcgaggtatgagaattacgtgaattcgggaggcggagattgtattgggttaagattatgttattgtattttagtttgggcgatagagtaatattttttttaaaaaaaaaaaaaaaaaaaaaaatttattatttattttatagatatttagtaagggtttattagtttggatttggaggataattatgaataagatagataagggtttgtttatgtggggtttattgtcgaagagggagacggttatgtatattaataagttatttttgttaattgaggttagtattgtttagaaaagtcgttaggtttagtttggttatttaggagaggttgttttaagtaagtatcgtatgagtggaagtttaaataaaaatttttttaggtagaggagtaatatgtgttaagatttagtggatttattttgtgattttatttttatatcgtaatgtgaattttttgaggacgaggttaggtttgtttgttttaatattttaaatttagtaggtataaatgaaggaattgtcgtttgttgaatgaatgaatggagaagtatttgtttatttggatttaaaagaagtttttgtagttgaagttgagagatttagaggggttatgggttaggtgatatagaggggttagtaggggttatattatttaggatagggtgtgcgagatagggaaaggtttgcggtagattgatttttttaaatggtgattttggttgttgtttggagtagagtagaaggaggagatgagtcgtttaaatgagggatgagggtagtttgaattaggtggtgacgggggatggggagagaagttaatggattagagggatatttagagggtgggaggtggggtaggtggttaaggagattgaggtatttaggatgttatttagttttttggtttggatggttaattagatggcggtggttttgattggagtggataatagggggaagatttggtttagtaacggggtgtggggaggaggagataaaggttaggagtttagtttggatatattagatggaggggttgtgggtatattaagtagatagttggttgtgtgtgggtggcgtttagagtaggtttgggtttatgtgttgttttatcggtattagtagtatagttatattttttatttttaatttttagtaattatagttgttttttgtttattttggtttttattttttatatgtatatggtgggttaacgtttttttttttgtattatgaggataatagtaataataatatttgttttttgtggggagttgtgagtagtaaatgaattcggacgtgatgttaagaagtatgataggtataggttatagttagttttttttattttttgtttattttttttttgtgtaaatatgtttttagtattttatatggattaggtttggtgttagttattttttaatagtttagttttgaatttattatatttttgtttaaaatattttaagtattttttatttaaaaggttaattatttttagatttttgcgttagttggttttaattttttttttagttattttttttattttttttattagtttttgtttttattttagatatttttatttttttatagtatatattttatttgttcgtttgttttttttttttttttttttcgtttttttttttttaagtattgtttttttttttaggtattttatttaggaatttttttttaatttttgtaggagatgagtttttgtttttttaaatttttatttttttagttttttattattttttgggatttagtgggttttttttgatttgtttgattttttttttttttgatattagtttattgaatatagtagggtatttaggtttttgtatggtggttttttagtgtttggtattgtgtttaatatattgtagggtttggtcgatattggtgtaggaaataagtagaattttaaatgtatattgttatgtcgatttagttttttttttataaaggttagaagataggttagaaggtgatcgtggtttaaggataataaattttttttagaagttgttttgtgagataaagtttaggataagtaaatagagattagtgagggttttgggttttttttttttattagggttatagtagttagtatattttaatttaggttatagattagattggttaggggttttgtttgtttagtatgttgtggtttttggggaatagggtgggtttggtaataaaaaaataagaaattgtaggtgtaagatgggtttttgggaatttttgtttttaggatttttaagtttgtttttttgttattatatgatggttttgggttttagagtttgagagatttggtttgaatttttgttttgttttttggtatggggttagtgttttaggaacgttgcgaggataaaattagataataaagggtttagaggaatgtatgatataaatgagttttcgattatgaaaatatgttatttatttttagtttttttttatttgttaggtttttttgtttaggtgtaggaacgaggaagtttatttttgttttttttagaattgggtaagaattttagagaggtgaagtaattggtttaaagcgtagattttttattatgttttatttcgatcgtttagattgtttttgatagagttaatattaggttagtattgtgagaattattagtatggttggatgttatatattttttaagttatcgtgtttgtttttttggttaaagtatgattgaaaagtgtgttgatgttgaaagaattttgaaatagtttgggtaataaagtgagattttgttttttttttttttttttttttttttttttttttttttttttttttttttttttgttttttttttttttgtttttttttttttttttttttttttttttttttggagatagtttcgtttcgttatttaggttggagtgtagtggtataattttgtttttttgtaattattattttttaggtttaagttatttttttgttttagttttttgagtagttggaattatagacgtatgttattatatttggttaatttttgtatttttggtagagatggggttttattatgttgtttaggttgggttggaatttttggttttaagtgatttgttttttttagttttttaaagtgttgagattataggtatgagttatttcgttcgattgaaattttgttttaataaaaaataaaaataattagttgggtgtggtgttatatttttgtggttttaggtatttagaaggttgaggtgggaagattagttgagtttgggaggtcgaggttgtagtgagttaagatcgtattattgtattttatttgtgcgatagagggagattttgttttaaaaaaaaaaaaaaaaaagaaatttgaaagtaaagtttggtcgggtttagtggtttatttttgtaattttagtattttgggaggttgaggcgggtagattatttgaggttaggagttcgagattagcgtggttaatgtggtgaagtcgtttttattaaaaatataaaaattagttgggtatggtggtgtgtatttgtaattttagttattcgggaggttgaggtaggagaattatttgaatttaggaggtggaggttgtattgagttaagattttgttattgtattttagtatttaagattaaaattttattttaaaaaaaaaaaagtaaagtttaatgaagtttagaaatttatttttaattgttgttttttgttatatgttatcgtgttattggtgttgttttgtgttagttcgaggatgagatgagttattcggggatttttatagtttatataggttaagcgtagttttatatagagggatatggtttggagttttattagtagtttaattatttagagttgggaatttttttgaggtaaaaagtttttattgttaaattttgatttttttaaatgtgttaggttgatgtaaaagttattgcggtttttgttattaatatttgtttgtattttgtttaatgtttaatttatgtttatttagtattgtattgattattggtttgattgaggtgatagggtagtaggagttttagagtatggacggtgttatggggtttcgggggttgttgttgtgtatgtatttggtatttttttttattttgtaggttatgtttgttttgggttcggttataggtaggtttaagagtagcgaggtatatggttaagtttatagggtagaaataggtagttgaatttggatgaggtttcgggcgggatataagatttttatttaaggggttagggttatttttattatttttattatttttgagtggagaggtgattttttagtattattaaggaggtgaagttaaggggtagaggatataggttgtgttttatttttatttttgaattggtaggtcggtggttttttgagttttttttttatatttgattttgattttgttttgtaga

SEQ ID NO: 1072 - DNA, 5406 bp, Artificial Sequence
  chemically treated genomic DNA (Homo sapiens)
tttgtaaaataaaattagggttaagtgtgagaggaaaatttaggggattatcggtttgttagtttagggatgggagtggaatatagtttgtgttttttgttttttagttttatttttttggtggtgttgggaggttatttttttatttagaagtggtggaggtggtgggggtgattttggttttttgaatgggggttttgtgtttcgttcggggttttatttaggtttagttgtttatttttgttttgtgggtttagttatatatttcgttgtttttggatttgtttgtagtcgagtttagggtaggtatggtttgtaggatgaggagagatattaggtatatgtataatagtagttttcgaggttttatggtatcgtttatgttttaaggtttttgttgttttgttattttagttagattagtaattaatatagtgttggataaatatggattaaatattagataaggtgtaggtaaatattaatgataaaaatcgtaatgatttttgtattaatttaatatatttagaggaattaaaatttggtagtggaagttttttgttttaggggggtttttagttttgggtggttaaattattgatggggttttagattatgtttttttgtgtagaattgcgtttagtttatgtgaattgtgaggattttcggatggtttattttattttcgggttggtataaggtagtattagtgatacggtgatatgtggtaagaagtaatagttaaaaatggatttttaaattttattaggttttatttttttttttttgagatggagttttggttttgagtgttagagtgtagtggtaggattttggtttagtgtaatttttattttttgggtttaagtgatttttttgttttagtttttcgagtagttgggattataggtgtatattattatgtttagttaatttttgtatttttagtaaagacggttttattatattggttacgttggtttcgaatttttgattttaggtgatttgttcgttttagttttttaaagtgttgggattataggagtgagttattgggttcggttaggttttatttttaaattttttttttttttttttttttaagatagggtttttttttatcgtataggtggaatatagtggtgcgattttggtttattgtagtttcgattttttagatttaattgatttttttattttagttttttgagtatttggaattataggaatgtggtattatatttagttgattatttttattttttgttgaaatagggttttagtcgggcgaggtggtttatgtttgtaattttagtattttgggaggttgagggaggtagattatttgaggttagaagttttagtttagtttgggtaatatggtgaaattttatttttattaaaaatataaaaattagttaggtatggtggtatgcgtttgtggttttagttatttaggaggttgaggtaggagaatagtttgagtttggaaagtggtggttgtagagaggtaagattgtgttattgtattttagtttgggtgacggagcgagattgtttttaaaaagaaagaaagaaaagaaaagaaagagagatagagaaagaaagaatagaaaagaaaaaagaaaagaaaagaaaagaaaaaagaaaagaaagggagggaaatagggttttattttgttgtttagattgttttaaaatttttttagtattaatatattttttagttatgttttggttagggaggtagatacggtggtttagaaagtgtgtgatatttagttatgttggtgatttttatagtgttaatttggtattagttttgttagagatagtttggacggtcggggtgaggtatgatgggagatttgcgttttaggttagttgttttatttttttgaggtttttatttagttttagaaagaatagaagtgagttttttcgtttttgtatttgggtagggaggtttggtagataaaggggagttgaagatgaatgatatgtttttataatcgaggatttatttgtgttatgtatttttttaaattttttattgtttaattttattttcgtaacgtttttgggatattggttttatattaagagatagaatagggatttaaattaggttttttaggttttaaagtttaaggttattatgtaatgatagagaagtagatttgaagattttagagataggagtttttagagatttattttgtatttgtagttttttatttttttattgttaaatttattttgttttttaaaaattatagtatattgggtagatagggtttttggttagtttagtttgtgatttgggttgggatgtgttggttgttgtgattttgataagaggagggggtttagagtttttattgatttttgtttgtttgttttggattttgttttatagagtagtttttgggaagagtttattgtttttaggttacggttattttttggtttgttttttggtttttgtagaagagaagttggatcgatatgatagtgtatatttgaagttttgtttattttttgtattagtatcgattaagttttgtagtgtgttgggtataatgttaggtattgagaggttattatatagaaatttgagtgttttgttgtgtttagtgagttgatgttaggggaaaagggaattagataagttaaagggagtttattgaattttaaggagtgatgagaagttgaagagatagaaatttggaggggtagaggtttattttttgtagggattaggagaaggtttttggatgaggtgtttggaaaaaagagtagtgtttgggaaggggaaggcgggaagggagggagagaaaagtagacgggtaggtgggatgtatgttgtgggaaggtagaggtgtttgggatgggagtaggagttgatgaagagggtagggaaggtggttgggaagggggttgggattagttggcgtaggggtttgaaagtgattagttttttgggtgggagatatttaagatattttaagtaagggtgtgatgagtttaagattgggttgttgagagatggttagtattaagtttggtttatgtaaagtgttagaagtatgtttgtatagggggagggtggataggagatggggagagttaattatgatttgtgtttgttatgttttttagtattacgttcgaatttatttattgtttataattttttataagagatagatattattgttattattatttttatggtatagagaaagagacgttggtttattatatgtatgtgggaggtgggggttagggtggatagaaagtagttatggttgttgaggattgagaatggggagtgtagttgtgttgttggtgtcggtgggatagtatatgggtttagatttgttttgagcgttatttatatatagttaattgtttgtttgatgtgtttatagtttttttatttggtatgtttaaattgaatttttgatttttgtttttttttttttatatttcgttattaagttagattttttttttgttgtttattttagttaaggttatcgttatttagttggttatttaagttagaaggttgggtggtattttgggtgttttagtttttttgattatttattttattttttattttttgaatatttttttaatttattaatttttttttttatttttcgttattatttagtttaagttgtttttattttttatttagacggtttattttttttttttgttttgttttaggtagtagttagagttattatttagaaaggttagtttgtcgtaggtttttttttgtttcgtatattttattttgagtggtatggtttttgttgatttttttatgttatttagtttatggtttttttgagttttttagttttaattgtagagattttttttagatttaggtaggtaggtgtttttttatttatttatttagtaagcggtaatttttttatttatatttgttgggtttagggtgttgaagtagataggtttggtttcgtttttagggagtttatattgcggtgtggaggtaaagttataaaatgaatttattggattttagtatatgttgtttttttgtttgaaaaagtttttgtttaaatttttatttatgcggtgtttgtttggggtaattttttttggatggttaggttgggtttggcggtttttttgaatagtattgattttagttggtaagggtagtttgttagtatgtatggtcgttttttttttcgatagtaagttttatatgggtaggtttttgtttgttttgtttatagttgttttttaggtttaggttagtagatttttgttaaatgtttgtagaatgaatgataggtttttttttttttttttttttttagaaggagtattgttttgtcgtttaggttggagtgtagtgatatgattttggtttaatgtaattttcgtttttcgggtttacgtgatttttatgtttcggttttttgagtagttgggattataggagtagtgtgttataattttttattgtggtaaaatatataaaatataaaatttattatttaattatttttaagaatatagttcggtggtataagtatatttatgttttgtatttattattattatttatttttaggatttttttattttttttagttaaaattttgtatttattaaatattaattattaatttttttttttttttaataattggtaattattattttattttttgaatttatgattttgattattataggtattttatataagcgaaattatatttttgttttttgtgattgttttattttgtttagtataatgtttttaggggtcgtttatgttgtagtatgttagaatattttttttttttaaaaatttatttattttgagatagagttttattttgttatttagttggagtgtagtggtaggattatggtttattgtagttttaattttcgaggtttaattgatttttttattttagttttttaggtagttgggattataggtatgcgttattatatttagttaattttaaaaattttttgtagagaagggggttttattgtgtttcgtaggttggttttaagtgatttttttattttggttttttaaagtgttgggattaggtgtgagttatagtgtgtggtttttagagtattaattttaaaaagttataattataaattttttttttgtttttttgagatatatatttatgtattttttataatttaggaatgttttttttaaggatttgaaatttatttttttggaatgtaattattataaaggtagggtttatgttttttagtttatgtgggagaatagaattttaatttttttaattgttagttagtagatatagttggtttaattatatttacgttaagtattttttttaa

SEQ ID NO: 1073 - DNA, 6398 bp, Artificial Sequence
  chemically treated genomic DNA (Homo sapiens)
  unsure 899, 934, 963, 972: n is a or g or c or t
tgaatttgtagttggaataggatagaggataaggatattagtaaaaatatgagtaattttttaggttttttttattttattttttttatttgtgaatttgtggtagtttttttttgagtttgttgtaagggtttagtgagtttgttataattagacgtagtagatacgggaagtttttgttttgttattatgtagggatggaaaatttgtttattggaatttaggggaagggatggaagaggaagaaaaataagtttggagtagtttaatttagttagggttttttatttttttagggatattttatatttattttatatattgggatgaatttttgtagaggaataatttagatggttatatattttaggatttaaattcgtaaatataaagtatgttcgttagtgttagtattttttttcggcgaattaagtagttgttttagagggtaaagggtttttgtagttatttgtttttattagggttgtagtttttaggtagtagtattgggagttttttttattttcgagaataaattttgaagttagcgattttgcggatttgaattattagggagtttgttagaggaggggtagtgattttgcgggataagtaagtaggttatataagttttagaaggttgggttttatttagattttttttagtagttgttgtttgttagagaggcgtttttagagatttagcgtttatataatatttattatgttttaggtaggaggatttagtaagggttgtgttgatgttagagggagtggagggtggagttttggatattttcggttttggtagttgtgttttgatttgagttttagtatgaattggaggttttgtagttttttggaagaagggggtttagggaggaattttttgaaagagnttttttttattggggttttggtggtatttacggtntgtttaggaggagtggagagaaatgttgngggtggggngggtttagatagatttttgtatgtgtttgtgtgtgtgtgtgtgtgtgtgcgtatttgtgtgtgtgttgtcgatatagtttagtgtgtagagttttgtgtatttgtagttatggggttcggtagttatgtattttgtgtgtggttatatatataggtttgtttgtttttgtgtatggtatatgtatgaagttgtatgtgtgtgtatatgaggttggagggatatagttggatgtatcgttgtataggggtatagtgtgttgttttgaggagtttggtttaggttgagcgaggaaatatttgtatttgtatttaagtataggtaggttttagatttataggcgtttggggttgaggggtagggtaaatatcgagtttgggtgttttttattttggagggatagattagtttgttaagagagaggattgtttttgttgtttgttttgtgggtgggtggttattttggattgtaattttgtgggtatttggtttttttattttatttttagttttaaagatataaagtaaatagtggcgtttttttggaagggggtaatttttgaggaatcgtttgttatttagtgaataggttttggaattaattaaattttttagtattgtttaattttagagttagtttttttcgttgttttttattgtgtttagttttgagtttgattaggtagttagatacgttagtgtgaggttgtagtagttattgtttttaagagtttttaggttataggggaaaggtatatgggtaagttagattaagatagttgggagatttgtagtaggtggagtatagttgggaaggttttttttggaagaggagtagagttttgaataggtttgggtttaatgagtagagaagaggggttttggttaaggtatagaggtaggtgtgtttttttatcgaggttttaggtagtaagatgaggtttttggatttttaaggttggtgtttaggaagtttttattaagaagaagcgtttttttgtgaaggacgaggatttgaagggggttcgaggaaatttgattaagaattaggaaattaagtttaagatttattaggttatgcgagagtgtggtgagtgtttttatgttatttggggttggggatgggggtgtaggtgtgtgttagtggtggggggaggtggttaaggatttttttttgagaatttagtatttttgggtttaagaaaggtgtttttatcgtaagggatttttttttttaggaagttaggttggtttttgattttatttttttttatagagtaagttggttcggtcgtttcgtcggtgtttagtcgtattcgtataggtatcgagattgtttttgagaagtttaaagtcggatttattaagagtgttttcggttgagaagtgtgcgttattttttttgttgttcgaatgttcggaaataggagttttttttaggaatttttttttatgttagaacgtttttttttttttgttgtttttggggttgttatttttttttatagtttaggttttttagttaagggttttgtattagtattttggaagtattaataaagaggatgtttacgtggttttagtaattagaaggtgttggttggtttttggttatggttattattgagagggaggatagggtgggaatatggaatatgttcgtttaagaggattttaggggatagtataggtgttattatgggtattgttatatgttgttttggatatggagatttagtgttgatttgtgattttagatttttttgagttttagtttttttttttatattataggggagttgagttggagtttattttataaagtaggttatgatgatattgtttagagtgaagtgggtggggttttagggattatttttttttttgttttttatagaagttgttgagaagtttttgaggatttgtaggttttgtagtatttagggattttaaaaatttttttttttgtattgtattagggattttaaaatttttttttttgtattgtattagggattttaaaatttttttttttgtattgtattagggattttaaaatttttttttttttttatatttttgtttatattgttttttttcggtttttgttttttttaagttagagttagattgagatttttttttggtagttagttttttgagttatcgttttttttaaatagtaggggtaagatttttatattttgttttaattatgttgtttggggtatggaatattagatttttagtttgtatgatttttttttttttagttttttgttttttgtgtgtttggaagtgttaggtttaaaagatttatagaggtttgtttcgttgtgatggtaagattatgattatggataggttgatagtggtttttttcggagttggattggtagagtttgggtttgtggtgtttggttcggggttgatgtttgttggggatgtttttttgttttaggaggttttggttgtttagaacgttttttatagtttcggttagtttggttattttatatagttttgagttcgggttgggtttgtgttttttgttttaagggagtagttttgttgtgaggaagggtttagttttatttgttggattttatggggagattttttttttagatattgaaaggagcgtgtttttttgtgtaattttaatcgtatttagagttaaaagggtgagtagtggagacgtgcgtagagatgaggtttttggttagttatgttaaggaaggggaacgttttttttgtagttgtagaaatagttttagtttatggtatttttgttttaggtttgtcgttatttttaatggagataggattggtggagaaattttttttagtttttggaagttattggttgttttaaggttttcgataggtttttaaggtagttggtttttttagggttggtgttacggagtcgtcgtttttttttgatttaggatttggtatttggttatatttttatgatttatttttatttatttgtggttatagatttaggagttggtttttttagagttattagggaatacgagttttagcggtgtttagagcgtataatatgtatttattcgattttattttataaggagtagagcgttttaattttagtaaggtcgggatttattttaggtttttgggtagcgtttttttgggtttgggttgtggtagtattatattgtttatgataatagtattttgtttttttttaattagcgatttttgggttttttttgttttattaaatgattttttagttattttttaggagttgttggtattgttaggtttgttttttgttttatgtttttttgttaataaatttttcgtatggagatttttgtgttataggatgtggtaggtttatgatttagttgtattgttatttttgttttgggggttttgttggggttgaatttaaagttttggttagattaatggtatttaaatagtaatttgggattttaggagagagaaggaggcgtttcgtgtttagtattttttattttagaaatacggcgtatttattttgattttagatttgttttatatagatattttttagagttattttatgtttttgggtttttttattagttagatatatttatttggtggttaagtttttttttttcgggaagtcgttagggtagttttgtagttttagttttttttattatttttcgttgttttttttcgggttggatttagggagagtagattgatatttttattgttaatttttttttagttttgtggagtttggtggaatgtttggtgtgaagggttttggtgaaggtttcgtattttttagaaggggtatgtatttttattttaaattgagtttatttttttttggtatatatttttgtttttagttaaggtttatgggacgttcgttatttgtttatttgaggttattgtggtttttggtttgtagattttaattttttagaatttgtttttatgtgggtggggtagtaaataagttattaatttattttttatttgttgtcgcgtttagaagttttttggtagatattggagttacgatgaagtttttaaggtttgttcgtatttgtagtaaagttttcgttttgtttttattgttggttatttattagattattattgtcgaaaaggtagttagtgtttatgggtgtggcgtgagttgggggatgagagaacgtttgggaagtggggaagagttttcgtatgtgttagcgtgttagtataagtgcgtgtgtatttttgtgtgtgtaaaaaaatggtgtagatttttcgttaggtattattttaagggttttattggtatttttttatttaatagaggggatgatttaattatttttattttttaaatgaggaaatatagttttataagtttggttttatcgttttttagtaagtgattttaggagaatgatttatgttgattatgttttaatttttttatttgtaaaatagggtaatattagaatttatttagagggtggcggttgtgaaaattaaatttattgtatttataaagtgtttaggatagtgtttgttgtgaaaattaaatttattgtatttatgaagtgtttaggatagtgtttgtcgtagagtaaatatttaagtatataaataagttatttggtatttttgtgttaaattgtatttaggtagtcgtatgtagtcgagtagagttggtgtagtgcgtatgagtatgttatatataagtaggtaagaggtgttcgtgtgttttttttcgggggatatagattttaaggtaaatggtatttgttaggggagtgttttgcggaagtggggatgagttggggagggtttattgcggagtagagaggaagatttttaatttttagagattagattttagtttattttcgaatttttttagttttgagggtttttttttaggagattggtgggagtttttttgttgttatagaggttaaagtttttagaaattaaaggatttggttattgttttttttttgggtaaagttaagttagtatgtaaagttttttgattttattaggttttttatttttgtttaaaggttgagtgtgatgttttttttagatattggttttggttttattagttttattttttgtatgtttgtttttttttaaggggtgttttgggtttttatagattaagaaggacgtggtttttgttttgtggtgttgtagggtggggaatgaagtatattgttattttttatttgagataaatgtttatatatgagatgttttattgggtttagtttgaggtttggttagtggtttagttagattgggagttagggtttggtttagagttagagttagggttaatttttgaagagcgttatttcgagttgaggtggtattgaaattttgtaattttttttttttttgttggtttaga

SEQ ID NO: 1074 - DNA, 6398 bp, Artificial Sequence
  chemically treated genomic DNA (Homo sapiens)
  unsure 5427, 5436, 5465, 5500: n is a or g or c or t
tttggattagtaaagaagaagggggttgtagggttttaatgttattttagttcggggtgacgttttttaagagttggttttgattttggttttagattaaattttggtttttaatttgattgagttattgattaggttttaggttgaatttagtgaggtattttatatgtgaatatttgttttaggtaagagatagtagtgtgttttattttttattttatagtattatagggtaggggttacgttttttttgatttataggggtttagagtattttttggagaagaataagtatgtagggggtggagttggtgaagttagggttagtgtttgggaggggtattatatttagtttttgggtaggggtgagagatttggtggggttagggagttttgtatgttggtttagttttgtttagaaaaagggtagtgattaggttttttgatttttggagattttggtttttgtggtaatagggaagtttttattagttttttagaaggaagtttttagagttgggagaattcggaggtagattagagtttggtttttgagagttgggaatttttttttttgtttcgtagtggattttttttaatttatttttattttcgtagggtatttttttagtaggtgttatttgttttgaggtttgtgtttttcgaggaggggtatacgggtattttttatttgtttgtgtgtgatatgtttatgcgtattgtattaattttgttcggttgtatgcggttgtttgaatgtagtttggtatagaggtgttaagtggtttgtttatgtgtttgggtatttgttttgcgataagtattgttttaagtattttatagatataatgggtttggtttttataataagtattgttttaagtattttatagatataatgggtttggtttttataatcgttattttttgaataggttttagtattattttgttttatagatgaggaaattgagatatagttagtataaattatttttttgaggttatttattaaaaggcggtagagttaggtttgtaaaattgtatttttttatttggaaaatggaaatgattggattattttttttattaggtgggagaatattagtaaggtttttggggtagtgtttggcgggaggtttgtattatttttttgtatatatagggatgtatacgtatttgtgttgatacgttggtatatgcggaggtttttttttattttttaggcgtttttttattttttagtttacgttatatttatggatattggttattttttcggtagtagtggtttggtggatggttagtagtgaaagtaggacgagaattttgttgtaggtacggataggttttgggggttttatcgtggttttagtgtttgttaggaggtttttgaacgcgatagtaagtggggaatggattagtaatttgtttgttgttttatttatatgggggtaggttttgggaaattgggatttataagttaaaaattatagtgattttagataagtaaatgacgaacgttttatggattttggttgggggtaggaatgtatattaaagaaaggtaggtttagtttggagtgggggtatatgttttttttgaaaagtgcgaaatttttattaggattttttatattaggtattttattaagttttatagggttgggagggaattgatagtgaagatgttagtttgttttttttaagtttagttcggggagaaatagcgggggatggtggggaagattagggttatagggttattttagcggtttttcggaagaagggggtttggttattaggtaagtgtgtttggttgatgggagggtttaaaggtatggagtgattttgggaggtgtttgtgtggggtagatttagagttaggatagatacgtcgtatttttgaagtgagaggtgttgggtacggggcgttttttttttttttttggggttttaggttgttgtttgggtgttattaatttagttagggttttaggtttaattttagtaaggtttttaaaataagaatggtaatataattgagttataaatttgttatattttgtggtatagaggtttttatgcggggagtttattgatagaagagtatggaatagaagatagatttgatagtgttagtagtttttgaggggtgattggggagttatttggtggagtagagggagtttaggaatcgttggttgagagagggtagaatgttgttgttatgagtagtgtgatgttgttatagtttagatttaggggagcgttgtttaaaggtttggggtgggtttcggttttgttaaagttgaagcgttttgttttttgtaaagtgggatcgagtgagtatatattatgcgttttgggtatcgttggggttcgtgttttttggtggttttggggaagttagtttttgagtttgtggttatagatgggtaaagatgagttataaaagtgtggttagatgttaagttttggattagggaaggacggcggtttcgtgatattagttttgagggggttagttgttttgggaatttatcgggggttttggggtagttagtggtttttagaggttggggagggtttttttattagttttgtttttattagaggtggcggtaggtttggggtaaaggtgttatagattggagttatttttatagttgtaaggaagacgttttttttttttagtatgattggttagaagttttatttttgcgtacgtttttattgtttatttttttggttttggatacgattgggattatataggggaatacgttttttttagtgtttgggggaagagtttttttatggagtttagtaagtaggattgggtttttttttatagtagggttgtttttttggggtagagagtataggtttagttcggatttagggttatataaggtggttaggttggtcgggattgtgggaaacgttttgggtagttagaattttttgggataggaaggtatttttagtaggtattagtttcgagttaggtattataagtttaggttttgttagtttagtttcgaaaagagttattgttagtttgtttatggttatggttttgttattataacgggataggtttttatgggttttttgaatttggtatttttaggtatataggggatagaggattggagagagaagggttatgtaggttgagaatttggtgttttatgttttagatagtatggttggagtagaatgtgggagttttatttttgttgtttggaagagacggtagtttaggaaattgattgttagagaggaattttaatttggttttgatttggaggggataaaagtcgggaggaggtagtgtgaataaaagtgtagggagggagaggggttttgaggtttttagtgtagtgtagggagaggggttttgaggtttttagtgtagtgtagggagaggggttttgaggtttttagtgtagtgtagggagaggggtttttgaggtttttaggtgttgtagagtttgtaggtttttagaggttttttagtagtttttgtggaaggtaggaggagaggtggtttttgagattttatttattttattttgagtagtgttattatggtttgttttatggaatagattttagtttaatttttttgtagtataaaaggggaaattgaggtttagaaaagtttgaagttataggttagtattgagtttttatgtttaaggtagtatgtggtagtgtttataatagtatttgtgttattttttgggatttttttaaacggatatgttttatgtttttattttgtttttttttttaatagtggttatagttagggattaattaatattttttgattgttggggttacgtgggtattttttttattggtgtttttaaggtgttggtgtagagtttttggttgaagggtttggattgtgggggagggtggtagttttagagatagtaggggagaggaagcgttttggtataaaaaagagtttttgggaaaggtttttgttttcgagtattcgggtagtaaggggagtggcgtatattttttagtcgaagatatttttggtgggttcggttttgggttttttaaagatagtttcggtatttgtgcgggtgcggttgaatatcgacggggcggtcgagttagtttgttttgtgggaggaggtaaagttaggggttagtttagttttttgggagggaagattttttacgatgggagtattttttttgaatttaggaatattggatttttagaaaaggatttttgattatttttttttattattgatatatatttgtatttttatttttagttttagatggtatgaggatatttattatattttcgtatgatttggtaggttttggatttgattttttggtttttggttaggttttttcgggttttttttaggttttcgttttttataggggggcgtttttttttgataggggttttttgagtattagttttggagatttaagagttttattttattatttgaagtttcggtagaaaggtatatttatttttgtgttttggttaagattttttttttttgtttattaaatttaagtttatttaaggttttattttttttttagagaaagtttttttaattatattttatttgttgtaggttttttagttgttttggtttgatttgtttatgtgttttttttttatagtttgggagtttttgggagtagtggttgttgtagttttatattggcgtgtttggttatttggttaagtttaggattgggtatagtggggaatagcgaaggggattagttttgaggttgggtaatattagggaatttggttagttttaaaatttgtttattgggtggtaagcggttttttaaggattgtttttttttagaaaagcgttattatttattttgtgtttttggggttggaaatggggtagaagggttagatgtttatagaattatagtttaaaatggttatttatttatagagtaggtagtaaggatagtttttttttttggtaggttggtttgtttttttagggtgggggatatttaggttcggtgtttattttattttttaattttaggcgtttgtgagtttgagatttgtttgtgtttgggtgtaggtgtaggtattttttcgtttagtttgggttaggttttttagagtaatatattatatttttgtatagcgatgtatttagttgtgtttttttagttttatgtgtatatatatatagttttatgtatatattatatatagagatagatagatttatgtgtgtggttatatatagagtgtatggttgtcgggttttatagttataaatgtataaagttttatatattgagttatatcggtagtatatatatagatgcgtatatatatatatatatatataggtatatgtaaagatttatttaggtttnttttatttntaatatttttttttattttttttaaatanatcgtgaatattattaaagttttaataaagagggntttttttagggggtttttttttgagttttttttttttaaagggttgtagagtttttagtttatgttggggtttagattaagatatagttgttagagtcgaaagtgtttaggattttattttttattttttttggtattaatatagtttttgttgggtttttttatttgggatatggtgggtattgtgtaagcgttgggtttttgaaggcgtttttttggtaggtagtagttgttggaaaagatttgagtggagtttagttttttgaaatttatatagtttgtttgtttgtttcgtagagttattgttttttttttgataggttttttgatgatttaggttcgtagggtcgttggttttagagtttattttcggagatgagaggggtttttagtattgttgtttgggggttgtagttttgatgaaagtagatggttgtagagattttttgttttttgggatagttgtttgattcgtcggggggaggtgttggtattgacggatatgttttgtgtttacggatttgggttttggaatgtgtgattatttgaattgtttttttgtaagggtttattttagtgtgtggggtgggtgtggggtgtttttgagggaatggagggttttagttgggttggattgttttaagtttgttttttttttttttttatttttttttttggattttagtggatagattttttatttttgtatggtggtagagtaggagtttttcgtgtttgttgcgtttgattatggtaagtttattgggtttttgtagtaaatttagagaggggttattataggtttataggtggagaaagtgaggtaaagggagtttggggagttgtttatgtttttgttgatgtttttgttttttattttattttaattgtaagttta

SEQ ID NO: 1075 - DNA, 7758 bp, Artificial Sequence
  chemically treated genomic DNA (Homo sapiens)
taaatagagaagtttttatgtattaggcgtagtgtaaggtattttttatgtattttttgaggatttttttattttagatattttgttgttggatagagaattaattgtataaaatgtgatttttttaataatgagtttaaaggggagggaattttttttagttggagaagggggaattgagtgttttttttttttattattggtagtttttatgtttttgttttttttgttgttattaagagtagagttgtggttgtttttttatagtttttagatttaagaataaaggttagaattggtgattgagatttagtgatttaataagtttaggagagaaagttataagaagatgtaagagaggaaagtaggttaggatagatagatttatttagaagtttaaaaaggatgagttagtttttttggtttttttttggttttattttttttttttgaatagtagacgggtataaaaggtgagagaagagttaaggttaggtttaggaagtaatggaaaaagatgaggaggatttaaagtttgtggggaaggtcgggtatcgtggtttacgtttgtaattttagtattttgggaggttgaggcgggtagattatgaggttaggatttcgaaattagtttggttaatatagtgaaattttattattattaaaaatataaaaattatttaggtatgttggtatatgtttgtagttttagttatttaggaggttgaggtaggagaatcgtttgaattggggaggtagaggttgtagtgagttaagattgtattattgtatttaagtttgagagatagagtggattttgttttaaaaaaaaaaaaaaaaaaagaagtgtgtggggagataattagtgtaggttggtaggttgaggattgagagtcgttgatgtaggagatagtgttttggggagaggaggaggtttgtgagagggagaggaggttagtagttttagagtatggggtagtgttatattaggaagtagatgaggtatggttatttaagatgagaatgtatgattttttggtttaagttattttttaggattatttgttatgatttttttggtaatttgttaagagttgtttttagtatttttttttataggatattgaattattataattaattttttttgttttttattattaagtaatagtttaaataggttgttttatttaggagagagataaattagttagtttttgtttttaaatttgaaatagttagtgtatttttaggttggggtagagttggggttaaagtttttttatgtgttatgggatatgagtttatttttattatgttgggtgggggttggatagttatttagatttgttatgtggatttggagtttatgaggttatttatataggtagtgaaagaattttttttatatacgtgaatgtttgttttttaaatggggtaatttgtgggtagaataagggattttttagttttagaatgttgaggtttttttaattttttttttgtatatatatatatataaatatttttttagttgtatttattgtttttttttttatattttagttttgtttagtagttaaaggtttatatatattattttttttttaaggtttttattatgtcgtgagttagagggcgggaggtagatttggtagatattgagtttttgttaatttataagatcggtgtgatttttttgatttgagtttgttgttttagattgattgttacgggttgggaagaggtagattttttttagatgaagttagtagtagagtataagggtattagcgttaaagtaaggatgtttgattagttttttagggtagagtgggttgtgttttttttgttttagaaaatggtatagtttttgttttatgggaaaaagaatgtgaggtttttgggtgggtttagggaatagagaggttatgaggaggggatagtattgtagaaattaagggtgttttgtgagttttttttttgtttttttaggtatgatttaggaatatgataaaattagtgttttaaatagatttatttggggttaagagaaatgtgtttgttaggaaaattatggggaattaggatattttttaaaattagttttattgagtattgtttttataattttttttttttggattagattgtaaaaaagagagtgtaaatgaatgatgtttatataataagttattagttaattattaaaaagaaagggaagaaataaattagtttggtttttatatatatatatagatatatatatataaatattgattaatattgaaatgtttaatagttattattttcgggtcgtaaaatttattgttttttaatgaatatttgtagagtatatattatatgtagtagttttgataggttttaggggtatagtggaaaatatattaggtatacgttgtttttagtttattttttagtgggaaagatagataataagtaagtgaataaatgtaaataaattattttagattgttataagtgaaattaagtattaattttttagatatggtatatagagaaggatttttgatagattttaatattgatattgaagttgaaaggtataaaagaattagagatttggggaggggtcggtgggtagaaggagagtaggtgttaagtttttaggtggagagttttgggtttattttaggaatcgaaggtttttagtgaggtaagaatatattttttagggagagattgatatgaattggggttttagaagaaggtagaagttaggtatttagggttttttaaattacggtagtgagtttgaatgttattttaagtgtgttggtgtattgttggtacgggggagagatgtgtttaaatttttattttgaaagattttttaagttatttttagagtatgatttataataggaaatggatgatttgattttgatttttatatttttatgtatttaaaaaagtatttaagaaagtagtttggtttgttattataaaaagtaatatttatttttatattgtgtagatttaattttgtttttttgtttagagtgggtcgtgttttggagtttttatgagtatggtatttttgagaatttttttaattgtagtttcgggtatagaggttgggtagtaagtggtagtagtagaggatttttagaagttttttatttgattttatttggtttaaagttaaattttttttattaaagatagagtttatttttatataggatggagttaaaaaatatattttgagagaggaagggtttgtggtttaagagaatattttagaaatattatttttttatgggaagtgattttatttttaaatatataatttagtttggatattttcgaaagatatataattttttattttatgtttttgaaagtgaattttttggtttaataatgagaataaatttattttgaaagtggaaaaattgagatttagagtagaagtttgattaaggttataaaatagtaggatgttttatttagttttttgtgtttaggttagaaaagtattataggaatagttgagttattagaattttttggttaggtaggagttgtgtgtttttgggaaatggggttttaaagggtttgttgtttaagatgtttgtggtgagttaggaaggggttagaggaagttgattaattagagtggtgaaatttgtttattatttttaatttggagggaggttaggttgtagaatgatataaagagtgttttgatttttgtttagtttagtattttattaaagtttttgttttagttttattgtgagtttggtaagtgtcggatggtagaattagggttgggattcgggatttttaatagtatacgatgtggtgggggtgggtagtttgggtgggggtgggtattattttggggttggatttagttggatttttattttagggggattcgagttagagtattgagagaaaagtgttttggtatagaagtgtagaatagagagtaattattttatgttttatttttttttgtgattatatttttggatttgtgtgtgagagagaattatggaagggaggaggggaatagtatttaattttttttttaaattttttgggttttgatagattattattttgttttttttatggagggagaggtttagggaagagtttttattttttggttatgttgtatagagggatggtagaatggggaaatttttttatttggagaaatttaggtagagttgggataggaaaatttaatttagaagtataagatttggaagaataatttttaatttttagtaattttttagttttcgtagttttattttagatataaggattgtagttaaattttagaaggttaggagagaaagtagttttggggttgaataggttaatttgttggttttataggggggaaaattaaattttaggagattaagtgatatgtttagaaatatatagtattttaatgggagatttaggtttagagtatgttttgtggttttagtttggaggttatattatgattttttaggttttttttggtacggtttattggttttttaggatttggtgttttttaagagatattttattttttaaggttttattttttattgtgatataattttagaacgtatttttgttttttggttagtgaagcgatgagggtggatataaggattagataagagtagatagtgagttggtatttgatttatttttgtagaatagttttgtagatagatttttttgttggtttttatttgggaataaggaggtttttaggaggatttttttttgtttttttatatttttatttttttttttttgttgtttttgggaaatgatagtttagaggtggtagaatagtattttgtttaagggaagaggggatgttaaaaaattagatatttttgtagatttttaaggttttatttattttttttgtttttagtttgtgtattagattttttttgttttttaggttgatagtagtttttaagatgttttagtaatatatattgttagtgatttttttttttgtttttagttaggagttttttaagattgttttttttttagttaatatttattaggagtaaatgaaatagttaattttattgttttttttatgttagaaggtgtttgtcgagtttttagtggaggttttattaaagtaagaggaaaagtatatgattgttgtaaagggattgtttgagtaagaatgtgagtaatagtagaaggagttataggagtaggagttgtagtaatagtattgggaatagtatgaggaatattagaaagtagaaaatttagagtagtagtttaagtaggagaaaatataaagggattagtagttaaataaatagttggaagaagagaagaagtttttagattagtaattggattaagagttagttaagagagatgagtaattgggaatgaagaaagagtaattgttggagtttttagagtagtaggaggggtatttgaagtatttagagtagtaggagggatagttgaagtattcggagtagtaggaggggtagttggagtttttagagtagtaggaggggtagttggagtttttagagtagtaggaggggtagttggagtttttagagtagtaggaggggtagttggagtttttagagtagtaggaggggtagttggagtttttagagtagtaggaggggtagttggagtttttatagtagtaggaggggtagttggagttttttgagtagtaggaggggtagttggagttttttgagtagtaggagggatagttgaagtatttggagtattaggaggggtagttggaggttttagaggagtagatggggtagttgaagtatttggaatagtaggaggggtagttgaagtatttggattagtaggagaagtagttagagtttttagagtagtagatggggtagttgaagtatttggagtagtaggaggggtagtttaagtatttggagtagtaggaggggtaattggagtagttggaggagtaggaggggtagttgaagtatttggagtagtaggaggggtagttggagtatttggagtattaggaagggtagttggggtttttagagtagtaggtgttgtagttgaagtagttagagaagtagtaggggtagttaaagtatttggaggaggaggaggggtagttgaagtatttggtgtagtaggaggggtagttgaagtatttggtgtagtaggaggggtagttggagtagtaggagaggtaggtggagtatttggagtagtaggtggggtagttgaagtatttagaggagtaggagggataattgaagtatttggagtagtagtaggggtagttggaggttttagagtagtaggtggggtagttaaagaatttggagtaggaggagaagtaattggagtttttagagtagtaagagggttaggtgaagtatttggagaagtaggaggtatagttggagtttttagagtagtaggtaggatagttaaagtatttggaatagtaggaaaagtatttagagtatttagagtagtaggacggataattaaaatatttggagtagtaggaggggtagttgaaggatttggagtagtagaaggggtagttggagtagtttgtgtttgttttagttttaggttaggtttaagatatttaattagttttgtttataaagggagaagtattgttttttgtagagtattagtagtagaagtaggaggtgtagtggttatttaaatataaataattattcgtagtgtttagaggtttttagatcgttttatataagggaagagagagttattggttttatttatttcgggttcgttaggtggttcgttttatttgtgaatttgattttgtttttttatatgtttttttaatggggtgagggtgggggagagagggaattattgtttagtgttaattttaatgattttaattttaattttaggtgagtagagtttttatttgagggattattgttattataggaatttttatttttttagtattgaagttgaattagtgagtgtgtataatgatatataataaattttggaagttttgggattttatattttttttagtatttttttttattatattatataaaaatttgtgtatgggttaatggttgtaagagatttttacggtttatttttaaaggaggatagattttttttaaattttggtttttaaattatttaatagatttaatagtttttgaaaaagaaataaatttttttttaaaaaaaattagttttatttgatgtatttgaaaataatatttgttagttatgaaaaggggatacgttgttttggttgtattttagtttaatattattttttattataatattatatttaatttttggtagagtttattttatatttttgttttagatttagttttttttaggagggggattgggaagatgttaggaaagtttgggggttttatttgggttttagttttttttttggaaatattttttggtttttttttttgggtttttttttttagaaaattttatgattttaaaaagttttatggtttgtttatttggttgaggaagattttagtaaagtaatagaagtagaattgggtaaggtgggaagaggaggtgttttagattgtttttgagggaaagtgatagcgttattaaagtaagtaaaggttggattagtagtagttatggaagttaaaattattgattaagttggagaaatatagatttagttat

SEQ ID NO: 1076 - DNA, 7758 bp, Artificial Sequence
  chemically treated genomic DNA (Homo sapiens)
gtgattgggtttgtatttttttagtttagttagtagttttggtttttatgattgttgttggtttaatttttatttattttaataacgttgttatttttttttagagataatttggaatattttttttttttattttgtttaattttatttttattgttttgttaaagttttttttagttaagtaggtagattataagattttttgaaattatgagattttttaagagagaaaatttaagaagaagagttaggaaatgtttttagggaagggattagaatttagatggagtttttaagtttttttagtatttttttagttttttttttgagaggagttgagtttggagtagaagtgtagggtgggttttgttaggggttgagtgtggtgttgtggtggaaggtagtgttggattgagatgtaattagaataacgtattttttttttatggttggtaagtgttgtttttaagtatattaagtgaagttgattttttttgggggggggtttgttttttttttaggaattgttagatttattgagtggtttgaggattaaaatttaaaaagagtttgtttttttttgagaatgggtcgtgggagttttttgtagttattgatttatatataggtttttatgtggtgtgatagaagaaaatgttaaagagaatataggattttaagatttttaggatttattatgtattattgtatatatttattgatttagttttaatattggggaagtaaggatttttatagtaataatagttttttaagtagaggttttgtttatttgaggttgggattggggttattggggttggtattggataataatttttttttttttttatttttattttattaaagagatatgtagagggatagagttaagtttatagatgagacgggttatttagcggattcgaaataagtggagttagtggttttttttttttttgtatgagacgatttgagggtttttggatattgcgggtggttatttatgtttgggtggttattgtattttttgtttttgttgttggtgttttataggaagtaatatttttttttttgtgggtagggttggttgaatgttttggatttggtttggagttggggtaaatataggttgttttagttgttttttttgttgttttaggttttttagttgttttttttgttgttttagatgttttagttgttcgttttgttgttttgggtgttttaggtgttttttttgttgttttaggtgttttggttgttttatttgttgttttgggagttttagttgtgttttttgtttttttaggtgttttatttggtttttttgttgttttgggagttttagttgtttttttttttgttttaggttttttggttgttttatttgttgttttgggatttttaattgtttttgttgttgttttagatgttttagttgttttttttgtttttttaggtgttttagttgttttatttgttgttttaggtgttttatttgttttttttgttgttttagttgttttttttgttgtattagatgttttagttgttttttttgttgtattaggtgttttagttgttttttttttttttttaggtgttttggttgtttttgttgtttttttagttgttttagttgtagtatttgttgttttgggagttttagttgttttttttggtgttttaggtgttttagttgttttttttgttgttttaggtgttttagttgttttttttgtttttttagttgttttagttgttttttttgttgttttagatgtttaggttgttttttttgttgttttaggtgttttagttgttttatttgttgttttgggagttttggttgttttttttgttgatttaggtgttttagttgttttttttgttgttttaggtattttagttgttttatttgtttttttgggatttttagttgttttttttggtgttttaggtgttttagttgttttttttgttgtttagagagttttagttgttttttttgttgtttagagagttttagttgttttttttgttgttgtgggagttttagttgttttttttgttgttttgggagttttagttgttttttttgttgttttgggagttttagttgttttttttgttgttttgggagttttagttgttttttttgttgttttgggagttttagttgttttttttgttgttttgggagttttagttgttttttttgttgtttcgggtgttttagttgttttttttgttgttttaggtgttttaggtgttttttttgttgttttgggagttttaatagttgttttttttttatttttagttgtttattttttttgattagtttttgatttagttgttggtttaagagttttttttttttttttagttgtttgtttagttgttgatttttttgtgtttttttttgtttaagttgttgttttgggttttttgttttttgatattttttatgttgtttttagtgttgttgttgtagtttttgtttttgtggttttttttgttgttgtttatatttttgtttaggtagtttttttatagtagttatgtgtttttttttttgttttgatgggatttttattgggagttcgataggtattttttggtatgggggaggtagtggagttggttgttttatttgtttttgatgggtattgattggaggaggaatagttttgaggagtttttgattgagggtaggggagagggttattggtagtgtgtgttgttgggatattttagaagttattgttaatttgaaagatagaagaggtttgatgtataggttgaaggtaaaggaaatagatgaaattttgggaatttgtagaagtatttggttttttagtattttttttttttttgggtagggtattgttttattatttttggattattattttttaaaagtagtagagagagaagggtggaaatgtggaggggtagagaaaggtttttttaggagtttttttgtttttaggtgagagttaataaggagatttgtttgtagggttgttttgtaagggtgggttaggtgttagtttattgtttgtttttgtttagtttttgtgtttatttttatcgttttattgattaaggagtagagatgcgttttgggattatgttatagtgaggagtaaggttttagggaatgaaatgttttttggagaatattaagttttagaaaattaataggtcgtgttagagaggatttaagaggttatggtgtgatttttagattggagttataggatatgttttaggtttgaattttttattggaatgttgtgtgtttttgggtatgttatttagttttttgggatttggtttttttttttgtaaagttagtaggttggtttatttaattttagggttgtttttttttttgattttttgaggtttagttgtagtttttgtgtttggggtggggttgcgggagttggaaggttgttgagagttggaggttgtttttttaagttttatatttttaagttgagtttttttgttttagttttgtttaggtttttttaaatagaaaggtttttttattttgttatttttttgtgtagtatagttaaaaggtagaagtttttttttgaatttttttttttataaagaaggtaaaatgatggtttgttaaaatttaagaggtttaggaaagaagttgaatgttatttttttttttttttttataatttttttttatatataaatttaaaaatatggttataagaaaagatgggatataggatgattattttttgttttgtatttttgtgttaaggtattttttttttagtattttgattcgagtttttttagaatgaaagtttagttgaatttagttttagagtaatgtttatttttatttaggttgtttatttttattatatcgtatgttgttggaggtttcgagttttaattttggttttattattcgatatttattagatttatagtaaggttgaggtagaggttttggtggagtgttgagttgagtaggagttagggtattttttatattattttgtagtttggtttttttttaggttgaaggtgatggataggttttattattttagttggttaattttttttaatttttttttgatttattataggtattttaagtagtaaattttttagggttttattttttagggatatatagtttttgtttggttagaggattttggtagtttaattatttttgtgatgtttttttgatttaggtatagggagttgagtgaggtattttattgttttgtgattttagttaaatttttgttttgaattttaatttttttatttttaaaatgagtttgtttttattattaggttaaaagatttatttttaagggtatgaaatggaaagttatgtgtttttcggggatgtttaggttgggttatatgtttgaagatagagttattttttatgaaggggtggtatttttggggtgtttttttgggttataagtttttttttttttagaatatattttttaattttattttatgtggaaataaattttgtttttggtggagggagtttgattttaggttaagtagagttaagtagaaggtttttaggagttttttgttgttgttatttgttgtttagtttttatgttcgaggttgtagttagagaagtttttaggaatgttatgtttataagaattttaaagtacggtttattttaggtaaggaaataagattgaatttatataatataaaaataagtattgttttttataatgataaattaaattatttttttaagtatttttttaaatgtatgaaggtataaagattagaattaaattatttattttttgttgtaaattatattttagaaatagtttaagaaattttttagagtggggatttgagtatatttttttttcgtgttaatagtgtattagtatatttgaaataatatttaaatttattgtcgtggtttaaaagattttgggtatttggtttttgtttttttttggggttttaatttatgttaatttttttttgagaggtatatttttattttattgagggttttcggtttttgagatgagtttagagttttttatttgggggtttggtatttgttttttttttgtttatcggtttttttttaggtttttggtttttttatgttttttagttttagtgttaatgttggggtttgttagagatttttttttgtgtattatatttaaaggattggtatttaattttatttataataatttagagtaatttatttgtatttgtttatttgtttattgtttattttttttattggaaaataagttaagagtagcgtatatttggtatgttttttattatatttttagaatttattaaaattattgtatataatatgtgttttataagtatttattgaagaatagtgaattttacgattcgaaaataatgattattaaatattttagtgttgattaatgtttatatgtgtgtgtttgtatgtgtgtgtaaaaattaaattgatttattttttttttttttttttaatggttggttaataatttattatatggatattatttatttatatttttttttttataatttaatttaaaaagaaggaattataaagataatatttagtggggttaattttgagaagtgttttgattttttatagtttttttgataggtatattttttttagttttaagtaaatttatttaaagtattaattttgttatgtttttggattatgtttaaaaagatagagggaggatttataaggtatttttggtttttgtagtgttattttttttttatgatttttttgttttttgagtttatttagggattttatatttttttttttatagaatagggattgtgttattttttggggtagaggaagtatagtttattttgttttgaagaattaattaagtatttttattttggcgttgatgtttttgtgttttgttgttgattttatttggggggaatttgtttttttttagttcgtgatagttagtttggggtagtagatttagattaaggaagttatatcggttttatgggttagtaggggtttagtatttgttagatttgtttttcgttttttgatttacggtataataagagttttaaggagaagatggtatgtgtgagtttttgattgttgggtaaagttagggtgtgggaaagagggtagtggatatagttgagggagtgtttgtgtgtgtgtgtatgtaagggaggggttggggaaattttaatattttagggttgagaagttttttattttgtttataggttgttttatttgggagataggtatttacgtatatgggagaggtttttttattgtttatgtgaatgattttataagttttaggtttatatgataagtttgggtaattgtttaatttttatttaatataataaggatgagtttatattttatgatatatggagaagttttggttttaattttgttttagtttaaggatgtattggttattttaaatttggaggtagaagttggttagtttgttttttttttgagtgaggtaatttatttgagttgttgtttagtggtagggggtagaagaaattggttatggtgatttaatgttttgtggggagggatgttgaggatagtttttaatagattgttagaggggttatagtagatggttttggaaggtgatttgggttagaaaattatgtatttttattttgaatagttatgttttatttgttttttggtatggtattgttttatgttttgaggttgttagtttttttttttttttataagtttttttttttttttagggtattgttttttatattagcggtttttagtttttaatttgttaatttgtattagttgtttttttatatatttttttttttttttttttttttgagatagagtttattttgttttttaggtttgagtgtagtggtgtaattttggtttattgtaatttttgtttttttaatttaagcgatttttttgttttagttttttgagtagttgggattataggtatgtgttaatatgtttggataatttttgtatttttagtagtgatggggttttattatgttggttaggttggtttcgaaattttaattttatggtttgttcgttttagttttttaaagtgttgagattataggcgtgagttacggtgttcgattttttttataaattttgaattttttttatttttttttattgttttttggatttgattttggttttttttttattttttgtgttcgtttgttatttaaggaagggagatgagattaagaaagggttaagagggttgatttattttttttgggtttttgggtggatttgtttgttttgatttgttttttttttttatatttttttatagtttttttttttgggtttgttggattattggattttagttattagttttggtttttgtttttggatttgagagttgtggaagggtagttatagttttgtttttggtggtagtaagaggagtagaggtataaaggttgttagtagtagaggaaagagatatttagtttttttttttttaattaaaggaaatttttttttttttgggtttattgttggggaaattatattttgtatagttgattttttgtttagtagtagaatgtttgagatggaggagtttttagagaatgtatgggaaatgttttatattgcgtttggtgtataggagtttttttattta

SEQ ID NO: 1077 - DNA, 7829 bp, Artificial Sequence
  chemically treated genomic DNA (Homo sapiens)
gtagggtttttagaattagtagttacgtgtttgatttttggtattttcgttgattagcgtaaaattttttatgttttttatgagaattaagtgcgagtgtttaattttaggtttaagatattgaaatgtttagtagatattgttttttttttttttgattggaattgtatattttattaagttgtaattagtttaataaattatggttaaaatacgagtgtttattgtatgttaaattttgttgggtattttatatgtattgattgatttaatttttaatagtttagtgagataaatgttatttttatttttttatttatattaagaatattgaaggttagggatattaattaatttgtttaagattataatagttagtcggtggagacgttagaatttaaatttaggttgtaatgattttagttcgtgtttttaattgttttgttgtgttatttgagttttatgaaatggggttttgatttgtatttaggtttttgtttagaatttttatttagattttgtttttcgaagtagatttatagtttattttagttttgtgttataaagattattttatattgcgttaatatttttttgtatatttatatatttatagttttttgtaaaaagggtattgtaggtatttgatgaagagtttttgaaagttgtttgtttttaaaaagagataatattttgttatattgtttaggttggatttaaatttttggggtttaagtagtttttttgttttaattttttattgaaagatatttttaatttttgtattaattttttaggtaggatgtttttttttaggttaatgggtagggaaattggtttagatgaaaatgatttgtttatggttatatttgttagtatagagttagtgggaatttatatattttggattattgtgtttttttttattgtataatgttgtttattttgtatttttattttttatttatagttgttatcgaatatattttttgattatttaatttgtgttgaggataaagtattaaatataagataaaaaaaaaaaaaattttgatttttttgtagtttttattgttgtgttaggtttttttattaacgttaagattgttgtttgttgaaatagttgattaaggtttaagatttttagttttaaaattttttaagatattaagaagttgattttagggtattttttaaattatatattttttttttagtttttttgagtttatattttaatttataaatattttagttgtattttttattttagaaattaaaaggtttgatttttttaaggtaaatataaagtaatttattgtaggtgtgatggttttttttatatttatagtattttaatttttgttattgagttttattgttaattagtttgtttttaacggtaaaaatttggtagtggtttttggttaaagtggttttattttgatgattatatttatgaatattaaaatagtttatttttatttttttgtttattatttaaaatgtgtgttttttttttgcgtagatattagttttttaaaagatgtttttgaaaatttaagagagttttagtttttttagatagatttttggaattttgtattttggaaaaatttttgatattttatttattgtagtgaggttttgttttaatttatagaattgtgttttgttttttttatttttttttttgttgagaaagtgttagatatatttgttttttttataagattgtggtaaattgaagtaatttgagtaatttataaaatttttttgattttttttttatgtaaaatagtatttataaaattgagttataaaagtaattttttgttattaaaagaaaggtatttttttttaaatttttgataattttataaataaattcgggtggaagaatttattgttattattaaaaattttttgattattttttttggttttttttgttttttaagtgtttttatatttatttgagttgggaattgaatttagtgaattatgttttttttaaagggtattttgtgattgtttttggtgaattgaatttttttagtattgatgatttttttttttgtatattgtagtaagaaatttgaatttattttttggaattatttaaagtgtttattaatataaattgattttgttttttttttatttgttttaaaaataattagttagattatattgtttggtttattttagaagaaatattatttggatgaagttattatataaatgttgtagtatatatataaaaaaatcgtttgttattttgaatgaggatagttgttattttatataaagtggattagtagttttaggtttaaagtgtttagaatagtgttttttatgttttttaagtgttatgtgggtgttttttatttttattattagaatggtaattttttgagagtagagattttgttgttattgaatcggtatttaaaagtattatagttaatgtatattgttttgaaattttgttgttgtttttgttttttcgaagagtttaatttttaggttaagtattataaatttatattattttattgttgtgtttaataatattggaggttagtttgaagattaggtataatgtgattgtaatgtagtattgtttgtagaagagatagaatgattggaaaattaaattttttttgattattggtttttgtagaattttagttttaaaagaattttagtgattttagttagatttttgaattttatatgaggttaagagaagttttatgatttttaagttgaagtaatatatggtttgatagtgtatattaaaaaattttttaagttttggttaggtgtggtggtttacgtttgtaattttagtattttgggaggttgaggcgggcggattacgaggttaagagatcgagattattttggttaatatggtgaaattttgtttttattaaaaatataaaaaatagttggacgtagtggcgtatgtttgtagttttagttattcgggaggttgaggtatgagaattatttgaatttgggaggtagaggttgtagtgagttgagattatgttattgtattttagtttggcgatagagtgagatttaggtttaaataaaataaaataaaataataatagaaaaatatttttgtaagttttaaaaaggtttatatggtagtttttttgaatggagtttgggtttggtggaatttatagttttttttttgttttaaaaggttgagttgtgatttttttcgggtttgaggtatgttttttagtatttttttttggttagtttttattgatttttggtagttggtaacggtatgttgtgaggaaatttggggtagataggttttagatatgtagttagtaagtattgtttatggattggttagtgttgttgggtgtttaagtgtaaaaaggagtattgtgaggtttttttgtttaagtaacgggagagataagtttagtttttttttgttataggatttttttttttatatatgttgatttttttgttgagattgttattttcgttttggttttatgttttatttttatggatatttattgtattttaatttaatgtttttttttttttgagttttagattagattatattttttttattttatgttttttattttttttttatagtaatttagttttttgtaatgatttttttttgtatattttagtttgattttattttttttattgattgtaagttttacgtaggtagggatcgtattgtttttgttttttgaattagtttagtttttgtagagttgtttgaaaatatttgttgaaagagtgaatttttttaataagtatagtatttgaagttttgtttatgagtagaagtaaggtattagtatgtagttagtttttaagtgttgttttgaggtagggtagggtgtttatttatataattaaaataattgattatattaatttttaaaaaatttttgtgtagtgattttaattttgttaaaattggttatattaaaatagttaaattaaagttattataattaaatttatatttgttttttttgtcgggttttttattattatttttatttaagttttatttattgtagaaagtttttttaagttagtttttgttagtgttagttattagagttaataatattttgacgtatttatattattgattttaggttgtttttgtgtttttatttgtgttgtttttaattttttattgtaaggttttgtggggatgttggtttcgtggttttagaggtaatttattttttttttttttttcgttgttgttttgtaatgtttgggattatgttttttttaaaattggattttgataaaatgtgttgagtggttagatagaaaattgaggtgataattattgttaatttgagaattaattttgaattattaaggttggtagtttattatttgtaaaaataattggattttattgttaaagaatttgtgagaagtaataaggaaagttgttaaaataatataaagttgtgtgtgtgtgtgtgtgtgtgtgtgtgtgtgtgtgtgtgtgtgtagataaggttggggcggggtaattttagaaggaatgagaaattaaagtgcgcgtttttgggtgttttaaattattgtttatataattaggagaggggttgttgatggaaaaagtatataatttttatttatattggataggatattttatatcgggaagtaaaaatttttggtttttttttttgatgcggtgaagttagtattttttttgatgtttgtattttaagatgtttttttgttttttcgatgttttaggttatttttttgttttgttttgttttttttttttttttttttaaatgtttttttttgtttgtttatggtttgggttgtttttttaatgaaaatgtttttttatttttagatgtaattatttttgttattgatttatttatttatttttgtttttagcgtttttttgaagtagttttggaaagtagagaagaaaatttagtttgttttttggagaatattggatagttgaataaatgtaggtatgtagatttgtatatttttaaaaaaggaaaatatttggttttaaaaaaattgatgaaatcgtgtttttgaggttgtagggttattggtgttattgtttttaattttttgaaattgatgtatttatttatttttaatgttgagtatgttggttaaaaaaaattttaaatataaaagtataggaggtatagagtaaaagttaaattttttttgtaattttttttagatgtttattattattaagaatttattgtacgtttttttagattttaatatgtatgtgtataattatattatatatgttgtgtatatgtatgagtatattatttatattatgttttttttattttgtagaatgttttgtgtatttttttgtgttgatttatatgtagttttatgttattttttttgatagttatatagtagttttgtttgttttgtttagtgagtttttttttattggatattgttagttggattttttttttattttttttttttttttgagtcggatttttgttttgttattaggttggagtgtagtggtgtgatttcggttcgttgtaattttcgtttttttaggtttaagtaatttttttgttttagtttttcgagtaggtgggattataggcgtatgttattacgtttagttaatttttttatttttagtggagataggggttttattatgttggttaggttggttttaatttcgtgatttcgtgattcgttcgttttggttttttaaagtgttgggattataggtatgagttattatatttagtcgatttttttatattttaaataatgtgatattttgtaaatatataattatatgtatttgtttgtttatttttttagagttagagggtataatattgtttttggattttttttttgttacgtttataaagatttttaaggataaaggtttattttatattatgaagtaggtttttagttattttgttttttattatagttttttaatgtgggatggggttaggggtttagtgttgggtttttaagtggttttgtttgttgatttgaattttaaggttaattatgaattaattgttttaggttggtttttagaagattttggtttttagatttatttggaaattaaatagttaaaattgaatattttttagtttgtagtattgaggtatatttggttaatgtttttttttttagaatttttttttattaggggagttaatagattaagtaaatgaatttggtgaagagaattgtgattgttgtttgttttgtatgattttttttgtttgggggagtttttttgggttattttgtaagtatttattatgtgtaagtttttgtgttttttacggatatagagaaaaatgatttagtttttattttaaggaatttatagtatgtgtataagatgtttaaattttttgtggttagtgtagtgggataagtttaggagtaagaagcgagggttttagggaatgggatggaggtttagagatggttttttgtaggaggcgatatttgagttgaattttaaagaaagttgaagtttgttatgtaagggataaggtagaaagatatttttatagaggaattagtgtgagtgaaggtaggagggtgagaagtagtattgggtaggggaggatatagtaatattgatagttttgtgggttttaagtatgaagtaagaagtttagagtgatagaagataaggtgaggaaggttggtcggttagatgatggagtagggttttgttttagagttttagaattgttttgtagattaatgggaagtttttggaggatttggtatgtgttacggagaaattattttaggggtttaagtgaaggttggtttggtagataggaagaaagtagtaggagtgtggggttagcgaattagtttgtagtttattggtattgggtaagaagaagaaagaatgtgtagggtttttttttatttttttttttttttttggttttgtttaaggttaagttgttgaggttggttttttggttttaggtgttttttttttggagggtgtttatgtgaattatttatttacgtattttttattagggttttttaattgttttaaagtaaggtttttttttgtttttttgttgttgcgttaaagttttgtcgttttttttggggtggtaggaattaggttttatttattaattgttatggtttttttatgtgatttatgaatatgaattggttattattttgtgtgtagtgttttaggtggggatgtgaagagagataagatacggtttatgtttttattatgtttgttttttagtgggagatggatatgaaattaaaacgttgatttttgttataagtttgtttaaagtttatgtgattttagtagaaatagtagtagaattcgtaattaataattagttttttaatattgttggttttagaatgggttatattttttaattataatttgggtgtaaatggagaaaataaatttaggttatgtttaaaattattttgatttttgaaaatatggtttgattatatttttaaaaatatataattaataaattataatttattaattagtatgtataattattttttatggttttattttttatgagatttgatatgtttggtttttaggaagggaaggggtaggggagaggtacgtatttaatattaatattaaatgtttttgtttttttatttttagaatatttttttttgttataagaatttttagtatatagagtgattatatagttttgttttttttttataatagt

SEQ ID NO: 1078 - DNA, 7829 bp, Artificial Sequence
  chemically treated genomic DNA (Homo sapiens)
attgttgtggaaggaaaataagattatgtggttattttatgtgttaaaagtttttatggtaaaagggagtgttttgaaggtaaaaaagtagaaatatttggtgttggtattggatacgtattttttttttgttttttttttttttggaaattaaatatgttagattttataagagatgaaattatggaaaataattatgtatattaattaatgaattgtaatttattaattatgtatttttgaaaatatggttagattatatttttaaaaattagaataattttagatatggtttgaatttattttttttatttgtatttaagttgtaattgaaaaatgtagtttattttggaattaataatgttaaaggattgattattagttacgaattttgttgttgtttttattggaattatataagttttgaatagatttatggtaagaattagcgttttaattttatgtttattttttattaaaaagtaagtatggtgagggtatgaatcgtattttatttttttttatatttttatttgagatattgtatataaaatgatgattaatttatgtttataagttatatggaagggttataataattaatgaatggagtttggtttttattattttaggaggagcggtaggattttgacgtagtagtaggagggtaggaggaggttttattttggaatagttagaaaattttggtgaaaagtgcgtaagtaagtaatttatataagtattttttaaagggagagtatttagggttaaagaattaattttagtaatttagttttgggtaaggttagaaaggaggaaagaaatgagggaaagttttatatatttttttttttttttgtttaatattaatgggttataaattaattcgttgattttatatttttattattttttttttgtttgttaagttaatttttatttaaatttttaaagtaattttttcgtaatatatattagattttttaagggttttttattaatttatagagtaattttgagattttgaaatagagttttgttttattatttggtcggttagttttttttattttattttttattattttgagttttttgttttatgtttgaaatttataaggttgttagtgttattgtatttttttttatttaatgttattttttatttttttgtttttatttatattgatttttttataggaatatttttttattttattttttgtatggtaaattttaattttttttagaatttagtttagatatcgttttttgtaggaagttatttttgaatttttattttattttttaaggttttcgttttttgtttttaaatttattttattgtattagttataggaaatttaagtattttatgtatatgttgtgagttttttgagataagaattgagttatttttttttatattcgtaagaagtatagaggtttatatataatgggtgtttgtagaatgatttaaggaggtttttttaaataagaaaagttatatagggtagatagtagttatagttttttttattaaatttatttgtttggtttattagtttttttggtgaggagagattttgaaaagagggatattaattagatatgttttaatgttataaattgagaggtatttaattttaattgtttaatttttaaataaatttgaagattagaattttttggaaattagtttgaaatagttagtttataattaattttgaaatttagattaataagtaagattatttgaaaatttagtattgaatttttaattttattttatattgaaaaattgtgatggaaaatagagtagttaaaagtttgttttataatgtaagataaatttttgtttttgagagtttttatagacgtgataggggaagaatttaaagatagtgttgtattttttaattttaaggaaataaataggtaaatgtatgtaattatatatttataggatgttatattgtttgaaatatgaaaaaatcggttgggtgtggtggtttatgtttgtaattttagtattttgggaggttaaggcgggcggattacgaggttacgagattgagattagtttgattaatatggtgaaatttttgtttttattaaaaatagaaaaattagttgggcgtggtggtatgcgtttgtaattttatttattcgggaggttgagataggagaattgtttgaatttgggaaagcggaggttgtagcgagtcgagattatattattgtattttagtttggtgatagagtaagagttcgatttaaaaaaaaaaaagaaataagaaaaaaatttaattgataatgtttagtaggagaggatttattaaataaaataggtaggattattatgtggttgttaaaaaggataatataaagttgtatatgaattaatatagaaagatgtataggatattttgtaaaatgaaaaaagtataatatggatagtatgtttatgtatatgtataatatgtataatatgattatgtatatgtatattaaaatttagaagaacgtataataaatttttaatagtggtgaatatttaggagagattataagggaagtttaatttttattttgtattttttatatttttgtatttgaggttttttttaattagtatatttaatattgggaatgaataaatatattaattttaaaaaattaaaggtaatagtattaatagttttatagttttaagaatacggttttattaatttttttaaagttagatattttttttttttaaaaatatgtaaatttatatatttgtatttatttagttgtttagtgttttttaagaagtaaattggatttttttttttattttttaaagttattttagagaagcgttaaagataaaaataaataaataaattagtggtagaggtaattgtatttgaaaataagagggtatttttattaaggaagtagtttaaattataagtaggtaagaaaaagtatttgagaggaagaaggaaaaaaataaaataaaataaaaaaatggtttaggatatcgagaggatagagagatattttagggtgtaaatattaaagaggatattaattttatcgtattaagaaaggaagttagggatttttgtttttcgatatggagtgttttgtttaatgtaaatgaagattgtgtgttttttttattaatagttttttttttgattgtgtgaataatagtttaagatatttaaaaacgcgtattttaattttttattttttttagaattatttcgttttaattttgtttatatatatatatatatatatatatatatatatatatatatatatagttttgtattattttaatagttttttttgttgttttttataaattttttaatagtagaatttaattatttttgtaaataataagttattaattttggtgatttaaaattggtttttaaattaatagtgattattattttagttttttgtttggttatttaatatattttattagaatttagttttaggaagagtatagttttaggtattatagggtagtagcgaagggggagagggagatgggttatttttgaggttacgaggttagtatttttatagggttttataatagaaggttggagatagtataaatggaaatataaaagtaatttaaaattaatagtgtgagtgcgttaggatgttgttagttttggtgattgatattggtaagggttggtttgggaaggttttttgtagtgggtaagatttaagtaaaagtaatgatggaaagttcggtaggggagataagtatgaatttgattgtgatgattttgatttggttattttggtatggttaattttaataagattaaaattattgtataaaagttttttaaaaattaatataattaattgttttaattatgtgaataaatattttgttttgttttagaatagtatttagaaattagttatatgttaatgttttgtttttgtttataagtaggattttagatgttatatttgttgaagagatttatttttttaataagtatttttaaatagttttgtagaaattaagttaatttaaaggataagggtaatacggtttttgtttacgtggagtttatagttaatgggaagaatggaattaaattaagatgtatagaaagaggttattataaagagttaaattgttatgaaggaaaagtagagaatataaaatagagggaatgtgatttggtttggggtttaggagggaagggatattgagttaagatgtaatggatgtttatggaggtggggtatgaagttaaaacggagatagtagttttagtaaaaggattagtatgtgtggggaaaaaggttttatagtagaaaggagttaggtttgtttttttcgttgtttgaataggaaaattttatagtatttttttttatatttgggtatttaatagtattagttagtttataggtagtgtttgttaattgtatgtttggagtttgtttattttaggtttttttatagtatatcgttattagttgttaaggattagtgaaaattgattagaggggagtattgaaaagtatgttttaaattcggaaagggttataatttagttttttaggataggaagagaattgtaagttttattaggtttaggttttatttagaagggttattatataaatttttttagaatttataaaggtgtttttttgttgttgttttgttttgttttgtttgagtttaagttttattttgtcgttaggttggagtgtagtggtatgattttagtttattgtaatttttgttttttagatttaagtgatttttatgttttagtttttcgagtagttgggattataggtatgcgttattacgtttagttattttttgtatttttagtagagatagggttttattatgttggttaggatggtttcgattttttgatttcgtgattcgttcgttttagttttttaaagtgttgggattataggcgtgagttattatatttggttagaatttaaaaagttttttaatatgtattattagattatgtgttattttaatttaggagttatggaattttttttagttttatgtaagatttaaggatttgattaaaattattaagatttttttagaattagaattttataaaaattagtaattaaggagagtttggttttttaattattttgttttttttgtaagtaatattatattgtaattatattatatttaatttttaaattgatttttagtattattgaatataatagtaaaatggtatagatttgtgatgtttagtttagagattaaatttttcgagaaaataagaatagtaatagaattttaagataatatgtattaattgtgatgtttttgaatgtcgatttaataataataaaatttttatttttagggaattgttattttgatgataaaaatagaaaatatttatatagtatttagaagatatgggaggtattgttttaagtattttaaatttaaggttgttgatttattttatatgaaatgataattgtttttatttaggatgataagcggtttttttgtgtgtgtgttatagtatttgtgtaatggttttatttaaataatattttttttaaaataaattagataatgtgatttagttgattatttttagagtaagtagaaaaggagtaagattagtttatattaataaatattttggataattttaagaaataaatttaagttttttgttgtaatatataaaaggaaaaattattaatgttagaaagatttaatttattaggagtaattataaaatattttttaaaaagaatatgatttattgggtttaatttttaatttaaatgaatataaagatatttagaaaataggaaggattaggaagagtaattagaaggtttttggtgatagtagtgaatttttttattcgaatttatttataaaattgttaaggatttgaaagaaaatattttttttttggtgatagaggattatttttgtagtttaattttgtaggtgttgttttatatgaaaaaaaaattagggaaattttgtgggttatttaaattgttttagtttattatagttttataaaaaagataagtatatttgatatttttttaataagggaaaaaataaaagaaataagatataattttgtgggttggaataaagttttattgtaatagataaaatgttagaaatttttttaagatgtaaaattttagaaatttatttgaaaaaattggaatttttttaaatttttaagggtattttttgaaagattggtatttgcgtaagggaagaatatatattttggatagtggataaggaaataaaaatagattattttaatgtttataaatatgattattagaatgagattattttggttaagggttattgttagatttttatcgttaaaaatagattggttgatagtgaaatttaatgataagaattaaaatattatggatataaaagaaattattatatttataatgaattattttgtgtttgttttaaaggaattaaattttttgatttttgaagtagaaaatataattaaaatgtttatgaattaaggtatgaatttagaaaaattgaaagaaaaatatgtaatttagaaaatgttttgaaattagttttttaatattttaagaaattttaagattaaaaattttaagttttaattaattattttagtaggtagtagttttaacgttggtaaggaaatttaatataataatgaaaattataggaagattaggattttttttttttttgttttgtatttagtgttttatttttagtataaattaggtgattaagaagtatgttcggtaatagttgtaaatgaaagatgaaggtataaagtaagtaatattatgtaatgaaaaaaagtatagtaatttaaggtgtgtaggtttttattaattttatattagtaagtgtgattatgagtaagttatttttatttaagttagtttttttatttattaatttaagaggaaatattttgtttagagggttggtataaggattaaaaatattttttagtgagaagttgaggtaggagaattgtttaagttttaggagtttgagtttagtttgggtaatatggtaagatgttgtttttttttaaaaataaataatttttaaaaattttttattaagtatttataatgttttttttgtaagaggttatagatgtgtaagtgtataaaaaggtattgacgtaatataaaatagtttttatggtataggattaaagtgggttatgaatttgtttcgaagagtaaagtttaaatagggattttgagtaaaagtttagatataaattaaaattttattttataaagtttagatgatatagtaaagtagttaagagtacgggttggagttattgtaatttgggtttgaattttggcgtttttatcgattagttattgtaattttaggtaagttagttaatatttttaatttttaatgtttttggtgtaagtggggagataaaaatagtatttattttattgggttattaagagttaagttagttaatgtatgtaaaatgtttaatagagtttagtatgtagtaagtattcgtattttgattataatttgttaaattgattatagtttgatgaaatatatagttttagttaaggaaaaaaaaaataatatttattaagtattttaatattttgagtttggagttaggtattcgtatttaatttttataaaaagtatgagaggttttacgttaattagcgagagtgttaggagttaaatacgtgattattgattttaaggattttgt

SEQ ID NO: 1079 - DNA, 5696 bp, Artificial Sequence
  chemically treated genomic DNA (Homo sapiens)
atgattgaagatagatttttatattttgtgggtgaattatatattttttttaaatatatattttttttgttgtaatttgatagagtattttttttttttattagtttattatgatgttttttttatttttggttattttagttgtgagtacgttgatattattagatttaatttaagttaaaaggagaaatttgttataaggaagtatttttaagatagaaaatgtatgaagttttggtggattttataagaaagagggaattgaaaagttatggggatatatattgcgtatattttttttttttttttttttgtggtattttttttttttatagtaaattagttttttgtgtaagaatgaagatggtaattttatagtggtagttttaattttagagtatgggtaattttattttaagtgaatagaaaagtttgatttgttgtttttgaattttaattttaaattttttaggagtgagattttgatggtttagtttggtttaattaaggggttgtgggaagtagggtgttataaattagaacgtaggtgttagaggttggttattttgggtgaagaggatagtttttagtaaagaggatagaatttttagtttaaattaggatttaggaattaagtttttgagtttttgtaaattaataattatgttagggatttatttttattttttattttattttattttattttttgagatgggagttttgttttgttgtttaggttggagtgtagtagtatgatttcggtttattgtaatttttattttttaggtttaagtgaattttttgtcgtagttttttgagtagttgggattataggtatatgttattatgtttggttaattttttgtatttttagtagagatagggttttattatgttagttaggagattttgattttttgattttgtgatttatttacgttggatttttaaagtgttgggattataggtgtgagttattgcgtttggtcgaaattttgtttttaagagtgaatgttggtatgaatttttttatatatataaaaaatgtttttcgtgaataggtaattatatgtttaatagttttaagttaaattttttaaaagtagtatatagttataatggttattttatatattttgttaaataattatttttatttgaaagaggttattaatttttggtttataaagggaaaattgttttggtttttaagtattaaagtttaatatatttagttattttaagggaatgagggatttgtttattggtaatattttttttgttttttttttttttttgtgattgaaagtaaggataagggaattgatgtagagataaggatatgttgaagtatcgaggaggtattggaaaatttttttgttatagttaattaaattttggaataaatggtattaaaatatttggatgatttgtagtaaaaaaaatattgtttgtttgtttgtttatttgattaatattttttgtttttgttttttggtttataattttatatttggaataaataagtttttttttatattttatttttttttgtttttaggaaagtatattttttttgttttggaaagaaataaattaatttttggatttttttttagtttttcgtttgagtttgtttttttttttaaggatttttttgtatttttttttgtgtttatatttatgtttttttttaagaatgatgtttttagttttattatttaatgatatagttttgttttttaaaatttaaatggagatttttatatttatttttattataatttagtttttattttattagtttatatagttttgtgtagtgtaataaattgtgataaatattttaatttttttaataaaatttaataaattttttatattttttagtttggttatatttgtaaattggttttgttatagatataatagatatttgataattgtgttaagggttttaaaatatttttttatttaatttttaaaatttttttataggggagattattatttttattatattgatgaggaaatagaggtttagaaaatttaaataaatttttttggtaaaagttgtgattgaaagaaatttgggtggtttggatttttaaagcgtaagtttttaaatttttggttatggatttttaatcgtggttttatgttaaattatttaaaaatgttaaaaagttatagaagttaatgcgttattttatatttattgaggtagttttgttggggtggggggaaggtttgggtatagtagttaagaattattgttgttatgttggttaatattggaaggataaaattttaagatattatatatagttttatagttaataattagttgttaagtttttttattagattttgttataaagttttgaatttaaatgtgttattttatagtttatattttttgtttttttatattgtatgaatgttttgaaagatttggttaaattttttggaattttttttattattattaaagaataagggaaattttttgaaatgtttgttttgagtagtaaatttttagtgatgttattattaggaattatataaagagtttaaaagttttgttaatatagagtgaaaaaagtttaatattttaggttagtattgatttaaaattatgttttagtgatgagggaggtttttattttttgaatgataggaggtaagttgttttatttttttatgtggggagatagaagattttttaattttataggtttatgaataatatattttttgtttattttgttttttatatttatatttttaatattaagaaaataatttgtttttttataaaaatatttttaatatttattatttttaaatggtttttttttgtaatttattaattttaaatggtttttttttgtaaataggttgtggatagtaagagatattatgtttagttatataagtatattattgtaaaatatagaaatattatttataatgaaagtaatattgttttagagttttaaaataagtatttttttttttttataaaatattatatttttatttttatagttgtgatgttttttatttatttatgacgttaagtttatttttagtttttttttattatgtgggtttgtgttttagtttttattttagtagtagtttttgtttgtaggaaaaaaggaatttttttggtagttattgtttgtaattgcggttttgatattttaagttattgagttataattaataattagaaatttttattaattttgtttatatattatttatgaagtagtagtcgtaggaatgtaatttttttgtaaattttttttttttatatagttttagtttattatttaaaagatttagggtgaatttaagtaattttttatgttgttattatttgtttaaagattttttgtaatgggttttatgtaagaagaaatgtaggagttgttttggtgaggtttatttaaagaaattattaagtgtaagatagatttgaagagtagtattagttgtgtatggggaaataggagttatgaatgcgttattttatttaggttgatagaaagagggttaatatttgaaaaaaatttttatacgatttggtgttaggttatttttttggttttattttttattattgtttttttttttcgtgttttttagttatagtgattttttttttgatttttgaatttgttaaatattttttttttttaaggtttttgtttttaggagtttttttgtttgaaattttttttttagatagttatgggattggtttatttttattttttagatttttgtttaaatgttatttattttaggaaatcgtttttggttatcgtaaaatagtatattttttttttattttttattttttttttttgttattatgtatatggtagtagaaaattatgtatttttttagtggtaattatatatttcgtatattatgtatttaaagcgttgtttgttgttttgtcgtttttattagaatataatttagtagggtaaggagtgtgtggggtcgtgtttatttggtatttttggggatttatagttcggtatttagtagatatttagtaaatatttgaatgaatgaatgaggttttttggtagtcgggaagttcgttatagtcgttgtttttattttttttcgggttatattaggttacgtcggtaaagttgttttttttttaggagaaatattcgttaggttttgttgttaattcgtaggcggttgggcgttttattttatttttatttttttttagttaaggtggttgatgggagttaggttttcgagggcgtattgttacgaaatagcgtgtgtgagcgcgttgttttcggttttcggcgttattttttttcggtttagtagtttggattggggaaggacgggtttgttgtattcgggaggtggaaggaaaagtcgaaagcggagaagtgtgcgggaggggagttttcgcgcggaggtagttcggttttttttagtgtaggttgcgcgttggggagttagttagggtgagttattttcggtcgtttttttggagggcggcggttatatatatattcgtttatttagtgagggtcgggtttagcgttggcgtttagttttagtcgggtattagcgtttcgcgaggcgtcgtcgttttaatttttttgcgcgtttacgtttaggggtcgttttaggaatttttacgcgcgttcgtcggtttttcgagaggtagttgttttgcgtggttcgcgtttgtcggtttcgcgattagtatcgagcggcgtacgcgtattgtaggacgcgcgttcggtttttttttagtttttattcggttcggttttttgttattcggggagattgtaggttaatcgggaggttgagttcgaagttagtagggcggcgaagttagtgtcgttcgcggcgttgagaagacggtgtggtttcggagagggtggagataattgtgacgggtttttcggttgttcgaagtgggagtggtgtggggttgtaggaaggagagaggaagaggagtagaagggggtagtagcggacgtcgttaacggtttttttcggcgttgataggttgggtcggcgttcggttcgtttgggtgttcgcgtcgttatttcggtttttcggtcggtcgggtttttcggttcgggtttgcggcgcgcgtcggggttgagggttgttgcggcgtagggagaggtttggttttcgttgtcgagggatgtgagtgggagttgagtttatattggagggttttcgagggtttagtttggaggtcgtttagagtcgtgttcgtttcggggtttcgtagattttgattcgtcgggtaggagtcgtttttgcgggttcgagggcgcgttttggtcgttcgatttgtgtagtcggtgggtgttatttttgtttggtttttgggtggggggtagtagttgtttttttattttttttttattttttggtttcgtttgttttttgttagtggtagtaaatttttgagttagaaaaatttttttttttaagacgatatttagaacgagttttgttggtgatatttgtttttatttgtgttttataattttttcgttttcgtttttttatttttttttaaaattttttagatatttaaatagtttagaaaaagtatttgttttttttggatttatgtggtagtagttaattgttgtttttgtttttagg

SEQ ID NO: 1080 - DNA, 5696 bp, Artificial Sequence
  chemically treated genomic DNA (Homo sapiens)
tttaaaaatagaagtagtagttaattattattatataaatttaggggaaataaatgttttttttaggttgtttaagtgtttagaaaattttaaaaaggaataaggaggcgggagcgagggaattataagatataaatggaagtaaatattattagtaagattcgttttaggtgtcgttttaaagaggaagatttttttggtttagaagtttgttgttattagtagggggtaggcgggattaaaaggtaggaagggggtggagagatagttgttgttttttatttagaagttaggtagagataatatttatcggttatatagatcgggcgattagagcgcgttttcgagttcgtaggggcggtttttattcggcgggttaaggtttgcgaagtttcgggacgggtacggttttgaacgatttttaggttgggttttcgggggttttttagtgtgggtttagtttttatttatatttttcggtagcgaggattaggtttttttttgcgtcgtagtagtttttagtttcgacgcgcgtcgtaagttcgggtcgaggggttcgatcggtcgagaagtcgaagtggcgacgcgaatatttaagcgagtcgggcgtcggtttagtttgttagcgtcgagggaggtcgttagcggcgttcgttgttgtttttttttgttttttttttttttttttttttgtagttttatattatttttatttcgggtagtcgggaagttcgttatagttgtttttatttttttcggggttatatcgtttttttaacgtcgcgggcgatattggtttcgtcgttttgttagtttcgaatttagtttttcggttggtttgtagttttttcgaatggtaggagatcgggtcggatagaggttgggggagagtcggacgcgcgttttgtagtgcgcgtgcgtcgttcggtgttggtcgcgggatcggtaggcgcgggttacgtagggtagttgtttttcgggaagtcggcgagcgcgcgtggagatttttgggacggtttttgggcgtgagcgcgtaaggaagttaaggcggcggcgtttcgcgaaacgttggtgttcggttggagttaggcgttagcgttgggttcggtttttattagatgggcgggtgtgtgtgtggtcgtcgttttttagggaagcggtcgggagtgatttattttggttggttttttagcgcgtagtttgtattggaggaggtcgggttgttttcgcgcggagatttttttttcgtatattttttcgttttcggtttttttttttatttttcgggtatagtagattcgtttttttttagtttaggttgttaggtcgaggggaagtggcgtcgggggtcggggataacgcgtttatatacgttgtttcgtggtaatgcgttttcgagagtttgatttttattagttattttggttggaaaggggtgagggtgggatgaagcgtttagtcgtttgcgggttggtaataaggtttagcgaatgttttttttagaggagaaataattttatcggcgtggtttggtgtagttcgggagagggtggagataacggttgtgacgggtttttcggttgttaaagggttttatttatttatttaaatatttattgagtgtttattaggtgtcgggttgtaggtttttagagatattaggtgaatacgattttatatattttttgttttattggattgtattttgatggaagcgataaaataataaataacgttttaaatgtataatgtgcggggtgtgtaattgttattaagaaaatgtatagttttttgttgttatatatataataataaagaaaaggagtagaaagtgaggagggggtgtgttattttacggtggttaggaacgattttttagaataagtgatatttgagtagagatttgaaggatgagaatgaattagttttatgattatttgggaaaagaattttaggtagagggatttttgaaggtaaagattttgagaagggaaagtgtttggtaagtttaaggattaggaaagaggttattgtggttggaggatacggaaggagggggtagtggtaagaggtgaggttaaagaagtagtttggtattagatcgtgtagggattttttttaagtattagttttttttttgttaatttaaatgaagtgacgtatttatagtttttgtttttttatatataattgatgttgttttttaggtttgttttgtatttaatggtttttttaaataaattttattaaagtaatttttgtatttttttttatataagatttattgtaaaaggtttttaagtaaatgatagtagtataggaaattatttgaatttattttgaattttttaaataatgaattagagttgtataagagggagggatttataggaaaattgtatttttacggttattgttttataggtaatatatgggtaaagttagtaagaatttttaattattaattgtgatttaatggtttagaatattaaggtcgtaattataaatagtgattattaaaagagtttttttttttttgtaaataaaaattgttattgaggtaaaagttagaatatagatttatataatgaagaagagttaaagatgagtttaacgttatgggtaaatgaaaagtattataattgtggaaatggaaatgtgatattttgtgaggggaagaaaatgtttgttttagaattttgaaatagtattatttttattataagtgatgtttttatattttgtagtgatatatttatgtaattaggtatggtattttttattgtttatagtttgtttgtagggagaagttatttgaaattggtgaattgtagggagaagttatttggaagtggtgaatattgaggatatttttgtgggggagtaggttatttttttaatattagagatgtgggtatggaagataaggtggataaggggtatattatttataagtttatagaattgagaaattttttgtttttttatatagaaagatgaagtaatttgttttttgttatttagaaagtgaaagttttttttattattaagatatgattttaagttaatgttaatttggaatgttgagttttttttattttgtattaatagaatttttgagttttttatgtgatttttggtagtggtattattagaaatttgttatttaaggtaaatattttaggaaattttttttattttttgataatgatgaaaagaattttaaggaatttgattaagttttttaaaatatttatataatatgaagaaataagaaatatgagttgtaaggtaatatatttagatttaaaattttgtggtaagatttaatgggaaaatttaatagttagttgttgattgtggggttgtgtgtagtgttttgaggttttgtttttttagtgttggttagtatggtagtagtgatttttgattgttatgtttaaattttttttttattttaataagattgttttagtaagtgtgagatggcgtattggtttttataattttttaatatttttaggtggtttgatataaagttacggttgaaaatttatggttaagggtttaagaatttacgttttaagagtttagattatttaggttttttttaattatagtttttgttaggaaagtttatttagattttttaagtttttgtttttttattagtataatgaggataataattttttttgtagagagattttgaagattaggtgaaaaagtattttaaaatttttagtatagttattaaatgtttattatatttgtggtaggattaatttatagatataattaagttgggaggtataagaaatttgttgaattttattaggaagattgaagtatttgttatagtttattgtattatataggattgtgtgggttggtaggataagggttgagttgtaatagagataaatgtgaagatttttatttgaattttaaaaaatagaattatattattaaatgatgagattgaaaatattatttttaaggagggatataaatgtgagtataaaaaaagatgtaggaaagtttttggaaagggaaataggtttaaacgaagggttggggagaagtttaggagttagtttgtttttttttaaaatagggaagatgtatttttttgaaggtagaaaggaataaaatatggaaagaggtttatttattttaaatgtaggattataagttaaaagataaaggtaaggggtattaattaagtagatagataagtaagtaatgttttttttattataaattatttagatattttagtattatttattttaaaatttggttggttatggtaaagaaattttttaatattttttcggtattttagtatgtttttgtttttatattagtttttttatttttatttttaattataaaaagaaaaggaaaataaaaaagatattgttagtgaatagattttttatttttttgagataattggatgtattaaattttggtgtttgaaaattaaaatagttttttttttgtaagttaagaattaataattttttttaagtgaggataattatttggtaaaatatgtaaaatgattattataattatgtgttatttttaaaaaatttaatttaaaattgttagatatatagttgtttatttacgaaaaatattttttgtgtgtgtgaaaggatttatgttagtatttatttttaaaaataaaatttcggttaggcgtagtggtttatatttgtaattttagtattttgggagtttagcgtgggtggattataaggttaggagattaagattttttggttaatatggtgaaattttgtttttattaaaaatataaaaaattagttaggtatggtggtatgtgtttatagttttagttatttaggaggttgcggtaggagatttatttgaatttgggaggtggaggttgtagtgagtcgagattatgttattgtattttagtttgggtaatagagtaagatttttattttaaaaaataaaataaaataaaataaaaaataaaaataaatttttagtataattgttagtttatagagatttagagatttaatttttgagttttaatttagattaaggattttgttttttttgttgagaattgttttttttatttagagtagttagtttttggtatttacgttttagtttgtgatattttgttttttataattttttgattggattaagttgagttattagagttttatttttggggaatttggagttgggatttaaaaatagtaaattagatttttttgtttatttgaaatgaggttatttatgttttaaagttaaggttgttattatgaggttattatttttatttttgtatagaaagttgatttgttataggagagaagaatgttatagaagagaagagagagagaatgtgcgtagtatgtgtttttatagttttttagtttttttttttttataaggtttattaaaattttatgtattttttattttgaaaatatttttttatgataaatttttttttttgatttaagttagatttagtagtgttagcgtatttataattgaaataattaggagtaagggagatattatagtaagttgatgagagagaaaaatattttgttaaattataatagggaaaatgtatatttaaaaaaaatgtatgatttatttataaagtgtggaagtttatttttaattat

SEQ ID NO: 1081 - DNA, 6036 bp, Artificial Sequence
  chemically treated genomic DNA (Homo sapiens)
tgagttattgtattcggttattatttcgttagtttatttttgaagttttattttcggggttttgattttattattttaagaatattggtttaagtttttgtatttggatgttgttcgggttttttgttttttttatttataatagtttttatttttaatttttttgtggttttagattatgttttaggtaaaatttattttttttttaaagattttgatttttttgtttttttacgattttgtttttgttgatcgttttgtagttttttttttttttattttatttttgtttttggttttttgattgttttttaagttgttaagattattgtttttttaaggtttttgtttattttgtgttttttttttggagtattttttttttggttagttttttgttttgtttcgggtttaagttttagtttgtgtttgttttgatattttggttttttttgttgtttgcgatgatttggtttttttatttgtttattgttttagcgttagattataagttttaagaggttaggtcggatttatttggttttttagggttgggtttagggtattataggtagaaatgggttattatttttttttgagtttttttttttttttttaaacgaagtttcgttttgttgttaggttggagtgtagtggcgttatttcgttttattgtaatattcgttttttagatttaagtaatttttttattttagttttttgagtagttaggattataggtattattaggtttggttaatttttttgtttttagtagagatagggttttattatgttggttaggttggttttaaatttttgattttaagtgattcgttcgttttagttttttaaagtgttgcgattataggttattacgtttggttaatttttgtatttttagtagagacggagtttcgttatgttggttaggttggttttaaatttttgattttaagtaatcgttcgttttagttttttaaagtgttgggatgataggcgtgagttattgcgtttagcgtttttttgagttttaagggagaaatattttaaagaagaatttgatttttttttggggtaatttttttgttttttttttgggtaaatttagttaggtttttttttttgggtgtaaaattagttttattgggtgtttaatttatatatgttatagatgggtaaattgaggtaataagggtcgggttagagttttatttaataagtgggtttagagtcggttgagtttttggtgtgatttagatttttttttgtgttattattagtttttttggtttaggggtttttagtagtttgtttgaacggggcggttgatgtagaggttttcggaattttttgtttttttttgttcgttttttcgtttttagttttcgtagggttttgattttcggtaaatgatagtggtttaggaaattaaggggtttatataggaaggagtcgagtgggatttttttttcgttgtttttcggttttgttcgtttttcgaaagtttagggtttttgttcgttaggtaagagttggcgatgtcgtagggttcggtttagatattgggggaggatggtggtggcgggggatggttgggttggggtagggtgttgttagggtaaaggttagttcgttttttaggtttcggaggaaagttgcgaggtagacgtgagtcgagattcgtatttttcgatcgttcgtttttttgggtttcggttttgattaaggtcgggagatgtttgttttgcggatttggaggagttattgcgtatgcgcgacgggggttgcggggttgggggtggggaggagggattgggaaggagggattggggggcggagtttttagtttttattttttaggttttttcggtttagatatagggtattcgattatattaggatgtagaacgttgaggattataaataggggatgtcgaggcgggaggatagtttgaggttaggagtttaaggttagtttgggtaatatagttagatttttatttttataaatatttttaaaaaattaaaaaaattatggcgttttttgggattaaatattatttttgattttttatttttttttgttatagtattatagaataataatattttgttaagatttttttgttgttttggagatgggagttttgttatgttgtttaggtaggtttttaatttttggttttaagttattttgttgttttagttttttgagtagttgggattgtagtggggcgttattgttattgaagttttattttaaattcgattggggttgggtatagtggtttatgtttttaattttaatattttgggaggttgaggttagcggattattggaggttaggagttcgagattagtttggttaatatggtgaaattttatttttattaaaaatataaaaattagttaggtttggtggcgggtgtttgtaattttagttatttaggaggttgaggtaggagaatcgtttgaatttgggaggtggagtttgtagtgagtcgagattatgttattgtattttagtttgggagatagaataagaattcgtttttttttttataaaataaataaataaataaaaaggttgggtaatgtggtttacgtgtgtaattatagtattttgggaggttaaggtaggcgaattatttgaggttaggagtttgagattagtttggttaatatggtgaaatttcgtttttattaaaaatataaaaattagttgggcgttgtggtgcgcgtttgtaattttagttatttgggaagttgaggtatgagaatcgtttgaatttaggaggtagaggttatagtgagttaagatcgtgcgattgtattttagtttgggtgatagtgcgagatttcgttttaaaaaaataaataaataaattaaaaaatttgattggttgatgttgaggggacgatagagaggttatggtgtgtgattttatttttataaagggtaaaattagatattaatttttttgtgggagagatggggtttttttaaggttttcgggattaggaatgtgtttatttttggtttgggtatcggtgatattaaagtgtttttttggtaaggtttttttttttataagatttttttttttatagtaattattatatcgttgtgttaattgttttttttgtttggtttaataggcgtttgttgatcgtttatcggtatattattaagaaatatataaattaatgtatattaattgagttgatattttaggtttggattgcgtttagtagattattttaatgaggatgttggggagttagtttattttatagttgcgaaagttgagttttaggggttttagttttttgattgttttaaattttattaggttaggcgtagttttttacgtcggtaattttagtattttgggagttcgaggtaggaggattattcgaggttaggagttttagattagtttcgttaatatggtgaaatttcgtttttattaaaaatataaaaattagtcgggtatggtggcgtgtttttgtaattttagttatttgggaggttgaggtaggagaattatttgaatttaggatgtagagtaagtcgagattgtgttattgtattttagtttggatgatagagttagattttgttttaaaataaaaataaaaaaatttttattaatgtcgttttattttagttatagggtattattttggattatagtttttgtattgtgttttttttttagagataaggttttgttttgtcgtttaggttggagtgtagtggtgtgattatagtttaatgtagttttaatttgtagagttgaaggtatttttttgttttagttttttaagtagttaggattatgggggtgtgttattatgttttgttaattttttagagatgaggttttaaaattttagttttaagtgatttatttgtttcggtttgttaaagtgttgggattataaggtttttttttttttttgagaggaggttttattatattgtttagtttggttttaaatttttggtttcggttaggcgcggtggtttatatatgtaatttagtattttgggaggttgaggtaggttgattatttgaggttaggagtttgagattagtgaaattttatttttattaaaaatataagaaaattagttgggcgtggtggtgtttatttgtaattttagttattggggtggttgaggtacgagaattttttgaatttgggaggcggaggttgtagtgagttgagattgcgttattgtattttagtttgggtgatagcgcgagattttgttttaaaaaagtaaaaaatataaaataaatttttggttttaagttattttttttttttggttttcggaaatgatgggattatagatatgagttattgcgttttgttggaatttaggtttttgtttgttttttttaatattttttttagattttttttatttaggttaatttgagtgattttttttttttttttaattttttttaggggattcgaagttttatttttggttttatttagttgagggttttgagtgttgaggttttttagggtaagtgagcgagcgggtgggaggtgttgggggttggaagtagggggttagtttttttttgggtttattttagggaggttttttttttttttttttttttttttttttttttttttttttttttgagatagagtttgattttgttgtttaggttggagtgtagtggtataattttggtttattgtaatttttgttttttaggtttaagtgattgttttgttttagtttttcgagttgttgggattataggaacgtattattatattcggttaagttttgtattttttagaggtagggtttcgttatgttggttaggtaggttttaaatttttgattttaagtgattttttcgtttcggttttttaaaatgttgtgattataggtataagttatcgtattcggtttttagtatttttttttatgttttttttgtttagaagtttaattttttttgattaggattgaggggttttttttttttgtgttttaggtaagttgtatttatggtatttttaagtgaagagacgtttttgattttttagcgtttatgtagttttttgtttacggaggttggtgttttgtatgtgttgttgttcgttcggggtttcgggtttttttagcgtttattttttttttttggggattatttggttgaggatttgtgcgtgtaggttgttaaggttagcggtgagtgtatttttagtggatcgggttagagggaaggatggggttgtgtggggttaagattggaagttggaatagttgtttgtagaagttagtatcggagttggggttttgggggatgagtaggagttttgtaatggagaagggtgtgtagggttggtttttgaggtagagggaatggtttgtgtagacggagaggtgtgacggtatatgaagggaatagttggttatattttgaggtatggaaggatttggacggttgggtatgatgttggtatttttgaagggtatagatggggtgatttaggagggagttgatgggattattttttgtaggtattttgtttgtgtattattttttttttgttttggttacggaggatttgttttgttggtttttttcgagttatatttttttcgtggaggatgttagtatttaagttttgttgtataggattcggtaggaagtgttttttagtttttagggattgtataattttattatttttttgtatttcgaggtgtttatatttttgttttagggaggtatggttattatttattttttagatgaggaaatagattagagagggtgggttatttgtttaaggttatatagtaagttaaaggtataagttgggttttgtgaggttttcgtagaatttgtttttcgtttttattataatgttatttttattgaggttgggttgtatttttattttagggtttttttttttttttatagtttttatttttttaattggtttgggttggagaagtgttatcgtttcgggttacg

SEQ ID NO: 1082 - DNA, 6036 bp, Artificial Sequence
  chemically treated genomic DNA (Homo sapiens)
cgtagttcgaagcggtggtatttttttagtttaaattaattggggaagtaaaagttgtgaggagaggagagaattttgggatgaaagtgtaatttagttttagtaggagtgatattatggtgggggcgagggatagattttgcggaggttttatagagtttagtttgtatttttaatttgttgtgtgattttgggtaagtgatttattttttttggtttgtttttttatttgagaaatgggtagtgattatatttttttggggtaggggtgtgggtatttcgaaatgtaaggagatgataaaattgtataatttttgggggttggggggtattttttatcgaattttgtatagtaggatttgggtgttggtattttttacggagaagatgtggttcggggggaattagtaggataggtttttcgtggttagagtaaagagggagtggtatataggtaggatgtttataggggatggttttattagtttttttttgagttattttatttgtgttttttaggagtgttagtattatatttaatcgtttagatttttttatattttaaggtatgattagttgttttttttatgtgtcgttatattttttcgtttgtataggttattttttttgttttagaagttaattttgtatatttttttttattataaaatttttatttattttttaaagttttagtttcgatgttgatttttgtaggtaattattttagtttttaattttggttttatatagttttatttttttttttggttcgatttattagggatgtatttatcgttggttttggtagtttgtacgtataggtttttagttaagtggtttttaaaggagaaagataggcgttgggggggttcggggtttcgagcgggtagtagtatatgtagggtattagttttcgtggataagaggttgtatgaacgttgagggattaggggcgtttttttatttggaggtgttatgagtgtaatttgtttggggtatagagagaaaaagttttttagttttggttagaggggattggatttttgagtagggagggtatggaaaggagtgttggaggtcgggtgcggtggtttatgtttgtaattatagtattttgggaggtcgaggcgggaggattatttgaggttaggagtttgagatttgtttggttaatatggcgaaattttgtttttaaaaagtgtaaaatttagtcgggtgtggtggtgcgtttttgtaattttagtaattcgggaggttgaggtaggataattatttgaatttgggaggtagaggttgtagtgagttaagattgtattattgtattttagtttggataatagagttagattttgttttaaaaaaaaaaaaaaaaagaaagaaagaaagaaagaaagaaggaaagtttttttgggatgggtttaggaggaaattggttttttgtttttagtttttaatattttttattcgttcgtttatttgttttgagaaattttagtatttagggtttttagttgggtggggttaggggtggggtttcgagttttttgagaaaaattggggagaaaaaggaggttatttaaattgatttgaatgaagaagatttgaagaaagtgttgggaaaaataaataaaaatttaagttttagtagggcgtagtggtttatgtttgtaattttattattttcggaggttaagaaggaaggatagtttgagattaggagtttgttttatgttttttgtttttttgagatagagtttcgcgttgttatttaggttggagtgtagtggcgtaattttagtttattgtaattttcgttttttaagtttaagagattttcgtgttttagttattttagtagttgggattataggtgggtattattacgtttagttaatttttttgtatttttagtagagatggggttttattgattttaaatttttggttttaagtgattagtttgttttagttttttaaaatgttggattatatgtgtgagttatcgcgtttggtcgagattaggagtttgaaattagattgggtaatatagtgagatttttttttaaaaagaaaaaaaagttttgtaattttagtattttgataggtcgaggtaggtggattatttgaggttaggattttgagattttatttttaaaaaattagtagggtatggtggtatatttttatagttttagttatttgggaggttgagataggaggatgtttttagttttgtaagttgaggttgtattgagttatgattatattattgtattttagtttgggcgatagagtaagattttatttttagaaaaaaaatataatataaaaattatgatttaaaataatgttttgtggttggggtggggcggtattaatgagggtttttttgtttttgttttgagatagagtttagttttgttatttaggttggagtgtagtggtataatttcggtttattttgtattttgggtttaagtgatttttttgttttagttttttaagtagttgggattataggggtacgttattatgttcggttaatttttgtatttttggtagagacggggttttattatgttggcgaggttggtttggaatttttgatttcgagtgatttttttgtttcggatttttaaagtgttgggattatcggcgtgagaaattgcgtttggtttaatgaggtttaagataattagaggattaggatttttaggatttagttttcgtagttgtgaaatgggttgattttttagtatttttattgaggtggtttgttgagcgtaatttaggtttaaagtgttaatttaattaatgtgtattaatttgtatattttttgatgatgtgtcggtaagcgattaataaacgtttgttaaattaaataggaagggtaattggtatagcggtgtggtggttattgtgggaagggaagttttgtgggggaaagaattttattaaagggatattttgatgttatcgatgtttagattaagaatgagtatatttttagtttcgggaattttggaggagttttattttttttatagagagattgatgtttagttttgttttttatagaaataaaattatatattatagtttttttatcgtttttttaatattagttaattaagttttttggtttgtttgtttgtttttttgagacggagtttcgtattgttatttaggttggagtgtagtcgtacgattttggtttattgtagtttttgttttttgggtttaagcgatttttatgttttagttttttaagtggttgggattataggcgcgtattatagcgtttagttaatttttgtatttttagtagagacggagttttattatgttggttaggttggttttaaatttttggttttaggtgattcgtttgttttggttttttaaagtgttgtgattatatacgtgagttatattgtttagtttttttatttatttatttattttgtaggggggaggacggatttttgttttgttttttaggttggagtgtagtggtatgatttcggtttattgtaaattttattttttaggtttaagcgatttttttgttttagttttttgagtagttggaattataggtattcgttattaaatttggttaatttttgtgtttttagtagagatagggttttattatgttgattaggttgatttcgaatttttgatttttagtgattcgttggttttagttttttaaagtgttgggattaaaggtatgagttattgtgtttagttttagtcgagtttaaaataaggttttagtggtagtggcgttttattgtaattttagttatttagggggttgaggtagtaggatagtttgaggttaggggttagagatttgtttgaataatatagtaagatttttatttttaaaataataaaaaaattttaatagaatattattattttgtaatattgtaataaaaaaaaatgaaaagttagaggtgatgtttggttttagaaaacgttatagtttttttggttttttaaaaatgtttgtagaaatggaggtttggttatgttgtttaggttggttttgaatttttggttttaagttattttttcgtttcggtattttttgtttataatttttaacgttttgtattttggtatggtcgggtattttgtgtttggatcgggaaggtttggagggtaggggttgggaatttcgttttttaattttttttttttaattttttttttttatttttaatttcgtagttttcgtcgcgtatgcgtaatgatttttttaggttcgtaaggtaggtatttttcggttttagttaaagtcgaagtttagagaagcgagcgatcggaggatgcgagtttcggtttacgtttgtttcgtagttttttttcgaggtttggaaggcgagttagtttttgttttggtagtattttgttttagtttagttatttttcgttattattatttttttttagtgtttgggtcgagttttgcggtatcgttagtttttatttagcgggtagggattttggattttcgaagggcgggtagagtcgggaggtagcgagaggaaagttttattcggtttttttttgtgtgggttttttggttttttgagttattgttatttatcgaaagttagggttttgcgggagttgggggcggggaggcgggtaaggaggggtagaaagtttcggaagtttttgtattagtcgtttcgtttagataggttgttggagatttttaagttaaaggaattgatgatagtatagagaagggtttgggttatattaggggtttagtcgattttagatttatttgttaagtggggttttggttcggtttttattgttttagtttatttatttgtagtatgtgtgagttgggtatttagtggaattaattttgtatttagggaaggaaatttggttggatttgtttaggagggaagtagggaagttgttttagaggaaggttaagtttttttttgaggtattttttttttaagatttagggagacgttgggcgtagtggtttacgtttgttattttagtattttgggagattgaggcgggcgattatttgaggttaggagtttgagattagtttagttaatatggcgaaatttcgtttttattaaaaatataaaaattagttaggcgtggtggtttgtaatcgtagtattttgggaggttgaggcgggcggattatttgaagttaggagtttgagattagtttggttaatatgatgaaattttgtttttattaaaaataggaaaattagttaggtttggtgatgtttgtaattttagttatttaggaggttgaggtgggaggattgtttgaatttaggaggcggatgttatagtgagacgagatggcgttattgtattttagtttggtaatagagcgggatttcgtttaaaaaaaaaagaaaagatttagggagagataatgatttatttttgtttgtggtgttttgggtttagttttaaaaaattaggtggattcggtttggttttttggaatttgtgatttggcgttgagataatgagtaaatgaaggagttaaattatcgtagataataaagaaagttagggtgttaggataggtatagattggaatttggattcgaggtaggatagggagttggttagggaaagggtgttttaggaggagggtataggatgggtaaagattttgagagggtagtgattttagtagtttgaagagtagttaggaggttaggggtaggggtgagatgagggggaaggggattgtagggcggttaataggggtaagatcgtggggggatagggggattagggtttttgggagaagggtgggttttgtttggagtataatttggagttataggagagttggaagtaggagttgttataaatagaagaggtagaaggttcgggtagtatttaaatgtagagatttgggttagtgtttttaggataataggattagagtttcggaagtagagttttaggaatagattgacgaagtggtgatcgggtatagtggttta

SEQ ID NO: 1083 - DNA, 10957 bp, Artificial Sequence
  chemically treated genomic DNA (Homo sapiens)
tatataattttatattataaaaagttaattttattgtatgtatttaataaaatttttaaatagtaattaaaagaggtttatttttgagagatatatgttaaaatagataaaatgatatgatgtttggtatttgttttaaaatagtttaggaagttgggatgaaaagtatagatttaaaaaatgttatgaattaaaattaggtgaaggtgggtgatgggtatatgtagtatagtttattatattattttgtatttgtaaatgtttggaattttttataataaaaagtaaattattgtttatttatataatgaaatatagtgtaattaattagaaaagaatgaggaaaagttttgtgtagatatataaatattttaagataaataattaagtttaaaaaaagtaaattatagattaagttgatgtttagtgtgttagtattattatgagtaaaggggatatgtaatagataagagacggtaatagaggttgtttttaggaaaggatttagggaaaagggtatgtaaatagggagattgtttttttagtatgtatttatttgtattttgagtatatttacgggataaatttttagaataaaattgttatgtttaagggaatatacgttataaatgttattagatattgttaaaatgttttttaaagaaattgtattaatttttattaataacgtaggagtatatttgtttttttatatattaattttggatattatttattgtattgatttttgttaattttatagataaagtataatatttttttgttttgatttagttaaaaaaaataaataatttggggagtttttgttttattttgtataatggaagttattttaatttattaaataaatataaaataattttaatatatatatttattattttataggttttatgggttaaagtatagtttatattgattttaggtttagggtttgatttatttttttttttttttttttttttttttcgagatggagtttggttttgttatttaggttggagtgtaggggtttgattttagtttattgtaatttatatttttttggtttaagtaatttttatgttttagttgtttgagtagttgcgattataggcgtatgttattatgtttggatagtttttgtagtttttagtagagacggagttttattatgttggttaggttggtttcgaatttttgattttaagtggtttgttattttggttttttaaagtgttaggattataggtatgagttatcgtattcggtttgatttatttttatttaataatagattatttttttatttgtttatcggtcgtttatttatttttttttttgggaattttttgttttattttttttttttatttttttattagttttttttttatttaatgattttttatttaatgataaagagttttttagatattaaagaaattaagtttattgtagtgtattgggaatgtttttttagtatgttttttgattttatttattatgagaagtttttaatttttaggtaattaaatatataaaattttttttttgtttttttggttttataatttattattatgttaatatttttatttttttttttttggtaaattaggtagtattttgaattataaatggtttagagtaatttttattatattgatatatttatttatatttttttttatttattttagaattttttaatttttatatttaaatatttgattattaaaagattatttagatgggtaggatgaatatagtttaattttgttttaagttttaaatggtttgttaatagttttaatattacggatttaaaagtaagttttagatatagtatggtggtttatatttggaattttagtatttttgggaggttaagtcgggtagattttttgagtttaggagttcgagattagtttgggtaatacggttaaattttgtttttataaaaaaatataaaaattagttaggtatggtgacgagtgtttgtagttttagttatttggaaagttgaggtgggaggatttattgagtttgggaagttaaggttgtagtgagtcgtgatcgtattatcgtattttagtttgtgtgatagagtaagattttattttaagatatataataaaattaaaataaaataaaaataaaagtaaggttatatatgatgatatattttatttatatatatagttttaattttatttgttataattaatttttttttttattttattaatagttattttgttttttttgtggttttaaatatattagttatatttttatttaagggcgattgttttggtttttttttttgtttgaatatttttttttagatatttatttgggttgtttttttatttttttcggtttttgtttaaatattagtttatgagaatgatttttttttattattttataggaaaaattttttttttaatttttatattttgaattatttttttttatagtttttattattttttagttagtatgttataagttttaggattatagggatttttatttattgttatattttagtaggattataatgtttggtatttaaatttttgttgaatgaatgaagttgaaatgttatttttattaaaataaaatttttattaagtatattgaataggagaaaaagattttattttttagattttaagtgttaaatggagtagttatataggtaaagaaaaggtgggaggattacggagggggaggagaagtagtatgtttttttaaataaaagggtttatcggtttaagttattaatgttaggtacgttattaagtatattttaatagattcgttttgtattttagatatattgaattttaatttttaatttaattgtattaaaaatttattttatttaagtaagattaggaagagattttttaattgtcgagaatttttttaagtttataggtatttagttacgttagagtattaaagtaagtttggtacgtttttatattgaatttatttgaatataatagtaattttttttaaaaaggagtttgtggaatattttttaaaagaaatataagaagttagttagttcgtgggtagttggtggataggaaggacgagataatttttttttttttttgagatggagttttgttttgttatttacgttggagagtagtggcgtagtttcggtttattgtaattttcgtttttcgggtttaagtaatttttttgttttagttttttgagtagttgggattataggaatttttcgttacggtcggttaatttttgtatttttagtaggggcggtatttcgttatgttggttaggttcgtttcgatttttttattttaggtgattcgttcgtttcggttttttaaagtgttgggattataagtttgagtcgtcgcgttcggttaagagagaattttttatatattttttgtaatttttgaatatagaattatgttaatattttagttaatggtaaagtaaattaaaattagattaagaagttgggtgtgatggtttacgtttgtaattttaatattttgggatatcgagacgggaggatcgtttgagtttaagagttcgagatttgttagggtaatataacgagatttttatttttataataattttttttttaatttagcgggacgtggtggcgcgggagtgtagttttagttatttgggaggttgaagtcggagattcgtttgagtttaggaggtttaggatgtagtaggtcgtgatcgcgcggttgtattatagtttgggcgacggagcgagtttttatttaaaaattaaaaaataaaaacgacgagaggttagacgtggtggtttatttttgtaattttaatattttgggtggtcgaggtaggaggatcgtttgagtttaggagtttagattagtttaggtaatagagatttatcgtaaaaaaagaataataataaataataagggagcgagaaggtaagaaaatggtgtaaatttattcggatgttaatagggggcggggttaagcgttgttatcgaagatgttaagatggacgttaggtagttaggagaaagattttaattttattcgcgtagatattcgcgaggtttcgcgtttagtttttttattttcgttattcgcggttttcgggttttttttcgtttttcgtttgagtttttgggaggaggggtttatcggcgcgttttttagtaggtatttatgtttttggtttcgtaggtgtttgaggtagcggttttttagggattgttacgagtgttgcgtgagcgagtttttttttatcgttttttataaggcgttatcggtgacggagttgggcgagcgggtatttttttttacgtaggtaaggatggttacgtcgttcgtattcgtgaaggcgattcgttcggcgtgtcgttgcggtttcggtttcgcggcgttttcggttagggtttcgggttttgttttcgagtcggtgttcgtcgtcgaggcggggtttagtcgataggtttttagttttagtttttcgttgcgttttacgtagtttaggatgtattgcgtggagatgaaattattcgaggtttcggttagcgttttttcgggttgggttagtagtacggtttcgggtttttgtattcggtatacggtgtcgtcgtcgtgtaggatgagcgtcgatagtcgacgtttggtcgggttgggtcgtacgtagaaggatatggagttgtcgtcgttttttacgaatagagtcgaggaatgggtgggttcgttggggtttttgtttaaatttatcgttttcgttatgtttgacgtcgagtattattagaagagttattttttcgcgagcgtttggtatatagagtttaattgattgagttgttatcgtagacgtttttgtcgcgaagcgtagtattgggtttgcgtagtagtagtcgcggcgtatcgagagtgttcgttttttttttttcggaagaggtggggtttcgtattttgatttggaaattaacgtattattttttttatttttgggtcgggtttttcgggaagatggcggtcgtgtaggcggtcgaggtgaaagtggatggtagcgagtcgaaattgagtaagaagtgagtgtcgttgcgagtttttaaagtttttgcggtaggagagtttgggttgggaagcgtcgcgaggtttttattaaggttgttgtgtcggggtttttttgtcggttttcgtgggtacgtatatgttgagacgtggtggttgcgttttgtagattacgtatttcgggatatttcgggtacgttcggtttttcgtttttagttggtatcggcgggatgttttttattatatttttagagttaagagattgtggaggaggaattaggacgagaattaagagttattagaaaagaaaagcgaaattttttgtttagttttatttttttttttgagaaatgtatttttttgttgagttatttagtaaacgtggaagttggagaaatgttaaatattttagttttttagaaagatttttaaaattttttgggttttattaaggttattttgaacgttatgtattaaaagggattagttttaaaattgttatgtatttattcgtatgggttatttagtagatatttgtgagtattaagtgattaacgtttaatagtagagattattttaatttagtttgatatttttgttaattatttttaaatttttggagtatgtaggttaatatagataagttaggattagttattttttaattggttgttttatatttttattagcgttttttatttgaattatagaatataggtaattgagtgttttattattgttaggaagatggtatatagtattattttagaggtatacgagagggtttaattttcgtggcgcgtatttgttattttagttattcgggagattgaggtaggagaatcgttttaatttaggaggcggaggttgtagtgtgttgaagtcgtgttattgtattttagtttgggagatttgaggtagtggttttttagggattgttagaagtgttgcgtgagcgagtttttttttatcgttttttttaaggagttattgagacggagttagattttgaatgaaaaagaaaagagaaatgatgtttttttttttttttttttaagatggagtttcgttttgtcgttaggttggagtgtagtggcgcgattttagtttattgtaattttcgttgttagggtttaagcgatttttttgttttagtttttcgagtagttgggattataggcgtgtgttattatggttggttaatttttgtatttttagtagagatagggttttattatgttgggtaggatggttttaatttcgttattttgtgattcgtttattttggttttttaaagtgttgggatgataggcgtgagtttgagttattattttggtttgatgtttttttttgtgtttttggttttgtgttttaaatattttagaaaaagtataagagaaattgtcgaagtttatagttgggtaggattttaatatattgttttttattagagtaattcgatggatttttataaaagtttggaatttggtttttggattgttattttagagaaaattgatttgattttattaagttaaatttaattgaatgtggtatatttgtgatatacgattttaaagtttagtttatttttttaaattatttatgataattaattatattgaattgaattttaggattgtatattataggtgaaagtacggtttttagtttagagtgtgtttttaggtaaacggaaaaaattggttaatttttttttattgattttttttttttttttttttttttggaggtagagtcgttgttgtttcggttggattgtagcggtgcgattttagtttacggtaatttgtaattttcgggtttaagtaattttggtgttttagttttttaagtatttgggattataggtgtatgttataatattcggttaaatttttgtgttttagtagagacgggatttgattttgttgtttaggttggcgttaaattgttgagtttaggtgattcgttcgttttaattttataaagcgttaggattataggcgtgagttattattttttgttttattgatttttttaaaattaaatatagttattatttttttgattagtttttttgtgttaggtataatgttagatttttataagttttttgtttagtgttagtaataattttgtaagaggagttattgtttattttttaaattaataaattgaggttttagtaattaaatgtattattaaagtgtgtatttttaaaatatagtttagtagtgatttagagtattggagtacggatttgaatttaggtttgtgattttatagtttatgttttgtattttgattgtatagtattatttacgttgttttatttgttattgatgtttatttttttcgttattatgagttaaaataatttttttttgattaatattttttttcgtttattgttttggggaattttttggtttgaaatttttagtaagtattattttgtgttaggtattgattttaagtttaaaagtagatgtgttttttgttcgagtgaaatagtttttttaaatttatttgaatacggtaaagaaggtgatttttgtaattttgttgttttttagtgttgataatgtataaatataacgtagtttaaggatttttttgaaatttttttttttttttgtttttagagttttaaataagttttttttttgatacgtatttttgtgtggtttgtatttatttttgtttagagtttgtaattgatagtgatagtttttttttattttatatgttttttattgttattttgtggttaggtattttttttttaggtgagaaattatattttagggttttagaaagtgttttatattttgtttttatattttaggatgttgtgagtaattttatttgtaagttatttattaatttgttgttggttttattttagatatgtatgttttttttatagttaggattaagaatattgttagttatagttgtagtatagagagtgttatagggttgttattagttaagatagttttaagttaaatgggattaaaaggtagtagaagtatggtttttttttttaatttataagagagttggttgggtatatgtatattgtttgttttatttgatattatatttttgtgtttttcgttaggtggtggtaattattagttttagggtgttttgttatgttgacgtaagttgttgtaaggtttgttagggggtttttgcgtaaaattttttgggtagagtggggttatagggaattgcgattgggttaatttgttttttttatagcgttttataaggataagttattttttgattaaagaaggttggtgtttattattttttttattgttttggaagtaaaaattatttttttatttggtttatttttcgttaagtttttggttaagtttttggatttgttgttaaggaaataaggagttttaatattaaaattaatagtttttttttattttttttttaataaatttaaatcgtttttttttagagttttgagatgatatgtggattttattttagaagagtgttaagaataaaatttttgtttgaataaataatttttaatgttagttattttttttttttgtttttttggagttttgtgtgtttttgagattaatttggtttttagttttagtgttatttttaggatttttttggattatttttaagattgatttgatttaagaggagtatttggttgagtggaaaatagatttattttaattttagaagaattagatagtttaattttagtagtttattgattgaattatagtatgataatattagtatagtgttttggaaaggttgtttttataaatgttataagatattatatgtagaaaaagttgttaattttgaaattatttagaatttgttttttttttttataagatgaaagattcggttaggcgtggtggtttacgtttgtaattttagtattttgggaggttaagataggtagattacgaggttaggagattaagattattttggttaatacggtgaaattttatttttattaaaaatattaaaaaaattagtcgggtatggtggcgggtatttgtagttttagttatttcggaggttgaggtaggaaaatggtgtgaattcgggaggtagagtttatagtgatttgagatcgtattattgtattttagtttgggtaatatagcgagattttgttttaaaaaaaaaaaaaaaaggtgaaagatttaaaattttaatttattttttaaagttattttaaatttatatcgaaaatgaaggatgtgttttgaagttagaatgtttgcgggtatgatttgggattttttgttgtggtttattattgtagaatatttgattatgtttagcggtttgaaagaatgatttataaattgtttttgaatagtaaagatatttttttttatattaatttgtttagtttttggttttagatagtaaatttagattataagagatatgaatatattatatagaatagtttagagttgttcgtattattttggttttttaggtttaagtgataagtattaagagtttggatattaagtgatttaattagaaatgtatttaaatttatatgaggtatagagagtaaagggttaagatattaaaagatatttagaaagtttatatttggttagttgaatgttagggttagggtaatttttttatataaatattattttattatatattataataattggtgggggttgtttattattattttcgttttataggtgagaagttaatttattcgtttaagttatataattgataagtgtgttggaatttagttttaggtagtttgattataaagatggtatattattttttgtattatattgttttgtatatcgttttattttgttgtttaagttaggttttagtgggtaaagtgagattaatgttgatagttatttttggagagattgttggtaggggaggtttttttgagtgttaaagagtcggtttttttttattattattttaatttatttttaggggagggatagagagagggggtagtagagggttggagatgttgttttattatgtattagatttggtattggaggggttaggtggtttatatttgtaattttagtattttgggaggttaaggtgggtagattatttgaggaaaggagtttgagattagtttggttaacgtggtgaaatttcgttttattaaaaatatataaattagttgattgtggtggtatatatttgtaattttagttatttaggaggttgaggtacgagaattttttgaaattcgggaggtagagattgtagtaagttgagattgtgattgtattttagtttgggttatagagtaaaattttgttttataaaaaaaaaaaaaaaaaaaaaaaaaaaaaaaaaagatttggtattgttggaattttattttttagggggatattaaataattaagatttagttattgtttttaaggagttttttaatttaattagtttaagaaaagtttattttaattttttagaaaatttttttttttatttaaaattaatgtataggattttttttgttttggtatattttggttttagttgggatttaatgttaaggatttgagattggtaagtagagattgagagtgattttttatatttttgttttaagtttatttttttttttgtgttttttatataaagagtttagtgataagttatttgagttgagttgtgggtgtggaattgaggggtatagaattgagtaagagcgttttttttgggcgatttatgtttttgataagttgttaggggtagaatatagaggattttttaggtagttaatatattgaacgtttttatttttttaatagt

SEQ ID NO: 1084 - DNA, 10957 bp, Artificial Sequence
  chemically treated genomic DNA (Homo sapiens)
attgttggaaagatgaaagcgtttaatgtgttagttgtttgaagagttttttatgttttgtttttagtaatttattaaaaatatgaatcgtttaggagaaacgtttttgtttagttttatattttttaattttatatttatagtttagtttaagtagtttgttattaaattttttatgtgaaagatataaagggaaaaataagtttagaataaagatgtgaaaaattatttttagtttttgtttgttagttttaggtttttggtattaggttttaattaaaattaagatgtattaagataaagaaaattttatgtattagttttgaataggagaaaaggttttttagaaaattagaataggttttttttgagttaattaggttagggagttttttgaggatagtgattgaattttagttgtttagtatttttttagaaggtgaagttttaatagtgttaggttttttttttttttttttttttttttttttttttttatgagatagagttttgttttgtggtttaggttggagtgtagttataattttagtttattgtaatttttgtttttcgggttttaagagattttcgtgttttagttttttgagtagttgggattataggtgtgtattattatagttaattaatttatgtatttttagtgagacgaggttttattacgttggttagattggttttaaatttttttttttaagtgatttgtttattttggttttttaaagtgttaggattataggtgtgagttatttgatttttttaatgttagatttaatatatgataaggtaatatttttagttttttgttattttttttttttattttttttttaagagtgagttaggatgatagtaaggaagagtcggttttttagtatttaaggagattttttttattaatagtttttttaagaatggttgttagtattagttttattttgtttattggagtttgatttagataataaaatagaacggtgtgtaaagtagtatagtatagggggtaatatattatttttgtagttaggttgtttgggattaaattttaatatatttgttaattatgtgatttggacgagtgaattaattttttatttgtgaaacgaaaataataatagataatttttattagttgttatggtgtgtaatgagataatgtttgtataaagggattattttgattttggtatttagttaattaaatgtgagttttttaggtattttttagtattttaattttttattttttgtgttttatatagatttaaatatatttttggttaaattatttggtatttaaatttttgatatttattatttgaatttgaaaaattaaagtaatgcggataattttgagttgttttgtatgatatgtttatgttttttatagtttgaatttgttatttgaaattagaaattaaatagattggtgtagggagggatatttttattatttaaagataatttatggattatttttttaaatcgttgaatataattaaatattttgtaatagtgaattatagtagaagattttaagttatgttcgtaaatattttggttttaggatatattttttattttcgatatgaatttagaataattttaaaaaatgaattgaggttttgaattttttattttttttttttttttttgagatagagtttcgttgtgttgtttaggttggagtgtagtggtgcgattttagattattgtaagttttgtttttcgggtttatattatttttttgttttagttttcggagtagttgggattataggtgttcgttattatgttcggttaatttttttggtatttttagtgaagatggggttttatcgtgttagttaggatggttttgattttttgatttcgtgatttgtttgttttggttttttaaagtgttgggattataggcgtgagttattacgtttggtcgaattttttattttgtaaaaaagaaaaatagattttgaatggttttaaagttgatagttttttttatatataatgttttataatatttgtaaagataatttttttaaaatattgtgttggtgttattatgttataatttagttagtggattgttaagattaggttgtttagtttttttagaattaagataaatttgttttttatttaattaggtgttttttttaaattaaattaattttaaggataatttaaaaaggttttagggatagtattaagattagaaattaaattaattttaagagtatataaaattttagaaagatagaaaagggaaatagttggtattagaaattatttgtttaaataaaggttttgtttttagtatttttttagaataagatttatatgttattttaagattttaaggagagacgatttgaatttattaaagagaaaatgagaaaggattattggttttggtattagggttttttgtttttttagtaataagtttaaagatttagttagaggtttaacggaaaatgaattaagtaaggaaataatttttgtttttagagtaataaagaaggtaatgggtattaattttttttgattagaaaatgatttgtttttgtgaggcgttgtgaaaggagtaagttgatttagtcgtagttttttgtgattttattttgtttaggaggttttgcgtagggattttttaataagttttatagtagtttgcgttaatatggtagagtattttggaattaatgattattattatttagcgggaaatatagagatgtggtgttagatgggatagatagtatatatatatttaattaatttttttatgggttggggagggggattatgtttttattattttttagttttatttaatttaagattgttttaattgatagtaattttgtaatattttttgtgttataattgtaattgataatgtttttagttttgattatggaaaaaatatgtatatttggggtaaagttaatagtaagttaatggatagtttataggtaaaattgtttataatattttagaatatgggaataggatgtgaggtattttttgaagttttgaagtgtggttttttatttggagaggaaatatttggttataagatggtaataggaagtatataaaataagaggaaattgttattattaattgtaaattttagataaagataaatgtaagttatataaaaatacgtgttaaagagaagatttgtttggaattttaggaataaggggaaaggagaattttaggaaggtttttagattgcgttatgtttatatattattaatattggaaggtaatagaattatagagattattttttttatcgtgtttaaataaatttgaggaggttattttattcgggtagggagtatatttgtttttaaatttggagttaatatttggtataaaatggtgtttattaaaaattttagattaaggaattttttagaataataaacggaaggaaatgttaattagaaaaaaattattttagtttatggtaacgagaggaatagatattaatgataggtaagataacgtgagtagtgttgtgtagttaggatatagagtatggattgtggagttataggtttgagtttagattcgtgttttagtgttttggattattgttagattatattttaggaatgtatattttaatagtgtatttaattattaggattttagtttattaatttgaaaaatggataataattttttttgtaaggttattattgatattagatagaaagtttgtagagatttagtattgtgtttggtatagaaaagttggttaaaaaagtagtagttgtatttaattttagaaaagttagtgaagtagggagtggtggtttacgtttataattttagcgttttgtggggttgaggcggacggattatttgagtttagtagtttgacgttagtttgggtaataaggttaaatttcgtttttattaaaatataaaaatttaatcgggtgttgtggtatgtatttgtagttttaggtatttgggaggttgaagtattagaattgtttgaattcgggagttgtaagttgtcgtgggttgaaatcgtatcgttgtaatttagtcggggtaataacgattttgtttttaaaaaaaaaaaaaaaaaaaaaaagttagtaaagaggaattaattagtttttttcgtttatttaaaaatatattttgaattggaaatcgtgtttttatttgtgatatatagttttaaagtttaatttaatgtaattgattattataggtggtttgaaagaatgaattaaattttaggatcgtatattatagatatattatatttaattaaatttgatttaataaagttaagttaattttttttaaggtagtagtttaaagattaggttttaaatttttatggaagtttatcggattgttttaataaaggataatatattaaggttttatttaattataaatttcgataattttttttatattttttttaagatatttgaagtataaagttagggatataaaaggaaatattaggttagggtggtggtttaggtttacgtttgttattttagtattttgggaggttaaggtgggcggattataaggtaacgagattgagattattttgtttaatatggtgaaattttgtttttattaaaaatataaaaattggttagttatggtggtatacgtttgtaattttagttattcgggaggttgaggtaggagaatcgtttgaattttggtagcgaaggttgtagtgagttgagatcgcgttattgtattttagtttggcgatagagcgagattttattttaaaaaaaaaaaaaaagaaatattatttttttttttttttttatttagggtttggtttcgttttagtaattttttggggaaagcgatggagaagggttcgtttacgtagtatttttggtagtttttgaaggattattattttaagttttttaggttggagtgtagtggtacgattttagtatattgtaattttcgttttttgggttaaagcgatttttttgttttagtttttcgagtagttgggataataagtgcgcgttacggggattaagttttttcgtatgtttttggaatggtattatgtattatttttttagtaatgataaaatatttaattatttgtgttttgtggtttaaatggggaacgttaatgagaatataagatagttagttaaagggtggttaattttgatttatttatgttaatttatatattttagggatttgggagtggttaataaagatattaggttgaattaagatggtttttattgttagacgttgattatttaatatttataggtatttattgaataatttatacgggtagatgtatgatagttttagaattgattttttttaatatataacgtttagaatgattttagtgaggtttagaaaattttgaaggtttttttgaaaagttagggtatttaatatttttttaatttttacgtttattgagtggtttaataaaagaatgtattttttagaaaggaggatgaagttaagtaggaagtttcgttttttttttttgataatttttagttttcgttttagttttttttttatagttttttaattttaggagtatgatagggagtatttcgtcggtgttagttgggaacggggagtcgggcgtgttcggggtatttcggggtacgtggtttgtagggcgtagttattacgttttagtatgtgcgtatttacgagagtcggtaagaaggtttcggtatagtagttttggtgggaatttcgcggcgttttttagtttagatttttttatcgtaaaggttttaaagattcgtagcgatatttattttttgtttagtttcggttcgttgttatttatttttatttcggtcgtttgtacggtcgttattttttcggagggttcgatttaaaagtaaggaggatagtacgttaatttttaggttaaggtgcgaagttttatttttttcgggggagagggggcgggtattttcgatgcgtcgcggttgttgttgcgtaggtttagtgttgcgtttcgcggtagaggcgtttgcggtgatagtttagttagttgagttttgtgtgttaggcgttcgcgagggggtagtttttttagtagtgttcggcgttagatatggcggaggcgatggatttgggtaaagattttaacgggtttatttatttttcgattttgttcgtgagggacgacggtagttttatgtttttttacgtgcggtttagttcggttaagcgtcggttgtcgacgtttattttgtacggcggcggtatcgtgtgtcgagtgtaggagttcggggtcgtgttgttggtttagttcggggaggcgttggtcgaggtttcgggtgattttatttttacgtagtatattttggattgcgtggagcgtaacgagaggttggagttggaggtttatcggttgggtttcgtttcggcggcggatatcggttcggaagtaaagttcggggttttggtcgagggcgtcgcggagtcggagtcgtagcggtacgtcgggcggatcgtttttacggatgcggacgacgtagttatttttatttacgtgaaggaaaatgttcgttcgtttagtttcgttatcggtaacgttttgtggaaagcgatggagaagagttcgtttacgtagtattcgtggtagtttttgaaggatcgttattttaagtatttgcggggttaggagtataagtatttgttgggggacgcgtcggtgagtttttttttttagaagtttaagcggaaggcggaggaggattcggaggtcgcggatagcgggggtgaggaggttgagcgcggggtttcgcggatatttgcgcgggtggggttgggattttttttttggttgtttggcgtttattttggtattttcggtagtagcgtttggtttcgttttttgttgatattcgggtaaatttgtattatttttttgttttttcgtttttttgttgtttattattgttttttttttgcgatgggtttttgttatttaagttggtttgaatttttgagtttaagcgatttttttgtttcggttatttaaagtgttgggattataggagtgagttattacgtttggtttttcgtcgtttttattttttaatttttgagtgggggttcgtttcgtcgtttaggttgtgatgtagtcgcgcgattacgatttattgtattttggattttttgggtttaagcgaattttcggttttagttttttaagtagttggaattatattttcgcgttattacgtttcgttaaattaaaaaaaaaattgttgtagagatgggggtttcgttgtgttgttttgataggtttcgaatttttgggtttaagcgattttttcgtttcggtgttttaaagtgttgggattataggcgtgagttattatatttagttttttggtttagttttaatttattttattattgattagaatattgatatggttttatatttaaaagttataaaaagtatatagaaaatttttttttggtcgggcgcggcggtttaagtttgtaattttagtattttgggaggtcgaggcgggcggattatttgaggtaaggagatcgagacgagtttgattaatatggcgaaatgtcgtttttattaaaaatataaaaattagtcggtcgtggcggagagtttttgtagttttagttatttaggaggttgaggtaggagaattgtttgaattcggggggcggaggttgtagtgagtcgagattgcgttattgttttttagcgtgggtgatagagtaagattttattttaaaaaaaaaaaaaaattatttcgttttttttgtttattagttatttacgggttaattggttttttgtgttttttttaagagatattttatagatttttttttaaaaaagattgttgttatgtttaggtagatttagtataaaggcgtattagatttattttaatgttttggcgtaattgaatgtttatggatttaagaaggttttcggtagttggaaggtttttttttggttttgtttaggtgaagtgagtttttaatgtagttgaattgaaaattggggtttagtatgtttaggatatagaacgagtttgttaagatgtatttggtgacgtatttggtattgataatttaaatcgatagatttttttgtttaaagaggtatgttgtttttttttttttttcgtaatttttttattttttttttgtttgtatgattattttatttaatatttgaagtttggggagtaaaattttttttttttgtttagtatgtttagtaggaattttgttttggtaaaagtgatattttagttttatttatttagtagaaatttgagtgttagatattgtggttttgttggaatataataataaataaaagtttttgtggttttggagtttataatatgttagttggggagtggtaagggttatagagaaaaataatttagagtgtaagggttggggaggaggttttttttataggatgataagagaaggttatttttataagttgatgtttaagtagagatcgaaggaagtgaaagagtaatttaggtggatatttggggaagagtgtttaggtagaggaagaagttagggtaatcgtttttaggtgggagtatggttggtgtgtttggagttataaagagaatagagtggttgttaatggagtaggagggagaattaattatagtagatgaggttagggttatgtgtatgggtgaagtatgttattatgtatggttttgtttttatttttattttattttaattttattatatattttgagatggggttttgttttgttatataggttggagtgcggtagtgcgattacggtttattgtagttttgattttttaggtttagtggatttttttattttagttttttaagtagttgggattataggtattcgttattatatttagttaatttttgtatttttttgtagagataggatttggtcgtgttgtttaggttggtttcgaatttttgggtttaagggatttgttcgatttggttttttaaaagtgttaggattttaggtgtgagttattatgttgtgtttgggatttgtttttaaattcgtgatgttggggttattggtaagttatttggaatttgggataaaattaagttgtatttattttatttatttaagtaattttttgataattagatatttaaatgtaaaaattaaaaaattttaaaatgagtaagagaagatatgaatgaatatattagtatggtgggagttgttttgaattatttgtggtttaggatgttgtttgatttgttagaagaaaaaaagtaaaaatattagtatggtgataagttatgaagttaaaaagataaagaaaaagttttatatatttgattatttgaaaattaagaattttttatgataaataaagttagagggtatgttggaaaaatatttttaatatattgtaatagatttagtttttttaatgtttaaagagttttttgttattaagtaagaagttattaagtaaaaagaaaattaatagaaaaatgagaaaaggaaatggaataggaagtttttagaaaaggaaataaataagcggtcgataaataaatgaagaaatagtttgttattaaatgaaagtaaattagatcgagtgcggtggtttatgtttgtaattttagtattttgggaggttaaggtggtagattatttgaggttaggagttcgagattagtttggttaatatgatgaaatttcgtttttattaaaaattataaaaattatttaggtatggtggtatgcgtttgtaatcgtagttatttaggtagttgaggtatgaaaattgtttgaattagggaggtgtaggttgtaatgagttgagattaagtttttgtattttagtttgggtgatagaattagattttatttcggaaagaaaaaaagaagaagaaagaaagtaaattagattttgagtttagggttagtataagttatattttgatttatgagatttgtgagataataaatatgtgtgttggaattgttttgtatttatttgatgaattgagatagtttttattatataaaatagaataaaagttttttaagttatttattttttttaattaaattagagtaaggagatgttatattttatttataagattggtaaaagttaatataatgggtaatatttaaagttagtgtatgggaaaataagtatatttttacgttgttaatagaaattgatataatttttttggggggtattttgataatatttgatgatatttataacgtatatttttttaaatatggtagttttgttttaggaatttatttcgtagatatatttagagtataaatgggtatatattgaaaaggtagtttttttatttatatatttttttttttgggtttttttttaggggtagtttttattatcgttttttgtttgttgtatgttttttttgtttatagtaatattagtatattagatattaatttaatttgtggtttattttttttaaatttaattatttattttgaagtgtttgtgtgtttgtataaagtttttttttatttttttttaattgattgtattgtattttattatgtgaatgaatagtaatttattttttattatggagaattttaagtatttataaatatagaatagtataatgaattatattgtatatatttattatttatttttatttgattttagtttatggtattttttaaatttatattttttattttaattttttggattgttttgaagtaaatgttagatattatattattttatttattttagtatgtattttttaaagataagttttttttagttattatttaagaattttattaaatatatatagtaaaattaattttttatggtgtaaaattatatg

SEQ ID NO: 1085 - DNA, 7488 bp, Artificial Sequence
  chemically treated genomic DNA (Homo sapiens)
aatgttttaatgggaggtgtgaagttagaattatgagaggaagagaaaaggagagtgagatagggaaggatagggtgtagatttaaggagaagagttattaaattagttattgttttatgagttataaagagatatagtttttttattagattatgtggttgtttggttatgaaaataataaaggtagaggggatttatcgacgagttttattttagtttgtattttttattgggtaagttttttttggtttattgagttaatgtatttttaggtttgtgttatttatttaggtttttttgtagttttgaggaatttagattttattttttgtagtgttgttaattttaagaggtagaattttgttatttatcgagttgatttttttagtagtatttgtagtggggtaagtggttattggataagataatggtgagttggagagaatttgaggagatggtttacgttgtttaatatagtgataattaagatatataaggttttagattttaaggagtttttaagttgtttaatatagaagattttagaagatatagaagattttagattttaaggaatttatatttaggtaggagcgaaattgtttgggatatttttgtagtaaatgatattattatttatttggttattaaggttataagtttaggagatagttttaaaatttttttttttttatattttaaattttgttatttttattttaaaatgtaatttttttttaaaaattttttataagtttattatagttttttttatttaagttaatattgtttatgttatttagtaatttttaattttgtgttttgtttttagtagttagaataatttttaagaaatgtaaattatattgttatattgatgtatattttttagtaggtttttattgtatttagaatgaaatgaattatttttattatagttttagaggttttgtatgatttgggttttgtttgtttttttgatttatttttgatgatatttttttttagtgatttttttttggttatattggtttttttgttttttgaatatgttgagtttgtttttgttttgggatttttgtttttatatttatttttttatttttttgttttttgttttttttttttgatgttttttgtttaaatgttatttttgtagagaggttttttttatttgtaaatttatatttgttatttgttgtgtttgatttttaattttttttatttaatattataatgtatgacgtatatgtttattgtttgtattttttattagaatatgagttttatgagatttgggattttatatgtttttattttagtgtaagggtattatttggtttatagttggggttgggtaaatatttgttgaattaataaatatttttagatttttattaagggaggatttttattaagaatgttgagttttagttagttaggagtgatggtttgtgtttgttgtttttttagttattttagaggttaaggtgggaggattgtttgagtttaatattttaaggttgcggtgagttatgattatattattatattttgttttaaagaagaataagaggaagaagaggaagaggaagaaggaggaggaggaggagaatgttgagtttttagtttataatttttttttagttttttggaggtttagttttgttgtaaatatatttattagagatgtggaagattttttaatatgttttttaataaaattcggaatttaggaatttgggattttatttaatttgtgaattttttgtagtaaggtaattttttaatgttgagttagggtatatgtatttataagaagttaggaagatgatagttttagggatatttaaaggaaggtaatgggttataggaagagggaggtataagataaggatagataaagtggagaatagggaagtttagtagtgttaggatatggttagaaaatttttgtttcgtagggttatttttagtagggttttagtagtggtagtagtaataaaattaaaagatttggtagtattttagttgggagttttatatttatatttttgtttttatttttaaatttttttaaaaaatatatttatttgtattagaatagtagtgtagaaaggtagggatttttggagttattgagattgagggatatgcgtgtggaaggtgggaaaggggaagagtttaatatgggaaggaggagtataagagaatttattgtttatgaaagaaaagttggggtacggatttgaaggaggggagggaatatatatttttgtttttttgaaaggaatgttggcgtttgaatttggaggaaggatttaattagttttagatagggattgttgtattgtttgggtaatttcgtaggggtttttgttttttattagttataatagagcgggaaggatgtaattattggttttgattaaggaggtgggtggtgtaggcgggaggtaacggtggtgagaagggtggttttaaggtcgcgggaggagttaattagcggcgattttgggtttttgtagtttttttagagatttcgtagttttggaggtattaagttgtttgttgttttttttcgcgttgtaggcgcggagatgtagcgtttttgggggcgtagttttagtcgtattcgtagggtaaggtatacgttttcggtttttgttgttatgcgtttttgcgggggattttttttaaataaattgtaagttttgaaagtggttttgtggaggtattaggttggggaaaaaggttgcgggaggagggatatagggtgggaggtgagtaggcgatttgttttttagattatttttaattagtattaagttggtagataattttataaatttacgaagttttcggttttttataagttatattttttgtattttagaataatcggatcgtaagaaaattttaagttttatcgtaggttaaagagggataggtttttagtatcgtcgtcgtttagtaaaattatatggaataaatttagggatttttatttgtatagttttgtttaaagtttgtagttttgcgagtttagtcggcgggggaagttgggtgggtttcgtagagagtaagggtttttttgggggaggagcgggatggggcgtagagtagtgcgatcgaagagggttattgtgggattgtataaaagtaaattcgtcggaggagttttgttagaaatattatcgtttgtattgcgtcggatttgattatttttaatgtgaaattttcggggaaggtcgcgagtcgttaggggtcgttcgtgggcggggcggcgggttataggggaagtagagttagcggtcggtttttttggtaggagaggaaaaagttgtgttggtaagggtgggaattgaatgataatttcgtttttttttaaattatttttttatattttttatttattttttcgtttttgttttttttcgttttttttaatttacgttcgggtgggttaatcgttgttcggtattttaggcgtttttttaggtttttgttgattttgtagcgtttagaaatggatcgagcggattcgtcgtcgtacgtattttgttttattttaagtttttaagggtttttggcgcgtcgcgtagttttggcgaggttcgcgttggggtgcggagagcgaagggaattggagagttatgtagatttaggttttcgttcgttcgtttttttcgggatcgaattaagggtttttatagtgttaggagggggcgagagtgttgtttatcgttatttgtttcggagtttcgagagagggtggtattttgttttttcgtttcgtatttttcggaattttttgtatcggagagaggacggcgtttttaggttgttggtaatcggtgagaatgggggtagggaaggaatattttcgtcgtagttgtttcgtaaagcgattgtttaattgagaggggcgtcggacgagtggattagggcggcgagtttgttcggcgcgtttcggatgttgttgcggcggtcgtcgcggttttcgttagggtattgtaaagacgatttgtcgtatttttattcgggtttttcgttgatttagtatcgtttttgcgttaagttagtcggttaggtagggggttttttagttcggggatgtagaagcgggggttggggggatcgggtgggggaggtcgggggtgcggggatgttgttcgggattttgagtttttttcggcgtttttcggcgttttttcgatttttagtttaacgaagttgtaaatagatcggttgttgggtattggggaaagtgggatggaagagttttaaatttggattttcgggtgtttgcgtgtcgtttgttcgtgtgtgtgtgatagttttagtaaacgtttagtgtttttttaagttagaggtttgtgtttttcggtgtttgtaggttcgttttatttgaatgtttttgattttttattttcgtattattttttatttttttgtagcgtgtatcgatcgttttggtgggagtttagaaggcggtaggcgaagaggggtaggaggggggagagtcgaggagaagtagagagggtggtaggcgtggggatttgtcgagtcggtattgtatcgggttttaggaaggttttcggaggggaggggaggttagggcgattttcgaagtaatggtttagttcgttagaacggtattgcgttaaggtatttgggattaggaagaaatatttaaataataataatagaaaattaataaatttttaaatttaaatttaattttttgtaaaaagttgtattcggttcgtaggcgagggggattttaaattgagtgaaaggtagggtggaggggaaggtagcgagaggtaaagtcgtagatttttcgatttgttcgtgttgaagtatttttttttgggcgtgagggagacgcgcgtttcggtgggggggtcgtttgggttttttttatttttggtttttggttgttttttatttcgggtttttttttggttttttattttcgcgttcggtttttattatgacggtgatgtttggggagaacgtggacgaggtttcggtcgtttcgggttatttttaggatggtagttattttcggtaggtcgattacgacgattacgagtgttgcgagcgcgtggtgattaatattttcgggttgcgtttcgagacgtagtttaagattttggcgtagttttttaatacgttgttgggtaattttaagaaacgtatgcgttatttcgattttttgaggaacgagtattttttcgatcgtaatcggtttagtttcgacgttattttttattattattagttcggcggtcgtttgcggaggtcggttaacgtgtttttggatatgtttttcgaggagattaagttttacgagttgggcgaggaggttatggagaagtttcgggaggacgagggttttattaaggaggaggagcgttttttgttcgagaaggagtattagcgttaggtgtggttgtttttcgagtatttcgagagttcggggttcgttagggttatcgttatcgttttcgttatggttatttttatttttatcgttattttttgtttggagacgtttttcgagttgaaggatgataaggattttacgggtatcgtttatcgtatcgataatattacggttatttataattttaatatttttatagattttttttttatcgtggaaacgttgtgtattatttggttttttttcgagttggtggtgcgttttttcgtttgttttagtaagacggatttttttaaaaatattatgaattttatagatattgtggttattattttttattttattacgttgggtatcgagatagttgagtaggaaggaaattagaagggcgagtaggttatttttttggttatttttagggttattcgtttggtaagggtttttagaatttttaagttttttcgttattttaagggtttttagattttgggttagatttttaaagttagtatgagagagttagggttgtttattttttttttttttatcggggttattttgttttttagtgtagtgtattttgtcgaggcggaagaagttgagtcgtatttttttagtattttcgatgttttttggtgggcggtggtgtttatgattattgtaggatacggtgatatgtattttgtgataattggaggtaagatcgtgggttttttgtgtgttatcgttggtgtgttaataattgttttgttcgtatttgttattgtgtttaattttaattatttttattatcgagaaattgagggggaagagtaggtttagttgttttacgttagtttttttaatttagtttttgatagtgattttagtcgtcgtagtttttttattatgagtaagtttgagtatatggagatcgaagaggatatgaataatagtatagtttattatagataggttaatattagaattgttaattgtattattgttaattaaaattgcgttaataagagtaagttattgatcgatgtttaaaaaataaaggtaagtaaataaaaaagttttatttagtagtttaaaagatttaaaaaataaaatagaaaatttagtgatttatgttacgttttgtagatattttattaagtagatttggaatgttttatttaattgttaatgcgttgttgtattgaggattttgggggtggtgaattagaagtttttaagatttatgataaaataaattattttttttttattaaaaaatgggaaaagagagagtattttttaaaattggtttaaaaagatttagtttacgaattagtttaggtaaaataataattatatgtttttttaaattgaaatatttttaatgttttggtttttttaatttttttaaaaatttagaataagatgattatttagaaatatgaaattgaaattcgtatgggattttagtaaaatatttttgtaaattgcgtagtatattgaagatagtgtattagatgtattatatgtaatatgatagattagttaaaatggataatgaatagatatttttatttcgattaattgaattgtatattataaggtgaaaaaagaaaatttcgattatttaagattggtttataaagtattttataaattggatattggttttgatttgtagggatttttttttgggtttattttttttttaatttagattattttttaagaaaaagttaattgaattaaattaattgatttttttgtagtgtcgttaaatggttttaattgtagatgagttaaatataggtttttttttattaggtttgtatttcgatttttggtttttagaattggatgtaaaattttagtttttttattgtaagagagtataaatgaagttaaatgtaagtatgtttgaatttgatataatttattttataatcgtatgttgagaagttaatttagataataggggataagtttaagttgaaatcgatttttttaaaaatagatttttttttatttgtatttattaaaagtgtatttt

SEQ ID NO: 1086 - DNA, 7488 bp, Artificial Sequence
  chemically treated genomic DNA (Homo sapiens)
ggagtgtatttttggtgaatgtaaatgaaaaaggatttatttttagaagaatcgattttaatttaagtttattttttattgtttgggttaattttttagtatgcgattataaaataaattgtattagatttaaatatgtttatatttaattttatttgtgtttttttgtaataaggaggttaaggttttatatttagttttgaaagttaggggtcggagtgtaggtttggtgagaaaagatttgtatttggtttatttgtagttgagattatttagcggtattgtagaagaattaattaatttaatttagttaatttttttttagagaataatttggattagaaagagaatgggtttagggggaaatttttatagattaggattagtatttaatttataaggtgttttgtgaattagttttaagtaatcggagttttttttttttattttgtaatatgtagtttagttgatcgaaataaaaatatttatttattgtttattttggttggtttattatgttatatataatatatttgatgtattgtttttaatgtgttacgtagtttgtaaagatgttttattggagttttatgcgaattttaattttatatttttaagtgattattttgttttgagtttttaaaaaagttaaagaaattaaagtattaaaaatgttttagtttggggaagtatatgattattattttatttagattagttcgtggattgaatttttttaagttagttttagaaaatattttttttttttttattttttaataaaaggaaaatagtttattttgttatggattttgaaagtttttggtttattatttttaaaatttttaatgtaataacgtattgatagttaaatagagtattttaagtttatttagtaaagtatttataaagcgtgatatgagttattaggttttttgttttgttttttaagttttttgagttgttaagtggggtttttttgtttgtttgtttttgttttttaaatatcggttagtagtttgtttttattaacgtagttttggttagtagtggtgtaattggtagttttgatattgatttgtttataatgggttatgttattatttatatttttttcgatttttatgtatttagatttgtttatagtagaggaattgcggcgattgaggttattgttagaggttaagttaggggaattgacgtggagtaattgagtttgttttttttttttagtttttcggtggtagaaatagttgaaattggatataatgataggtacgggtagggtaattgttagtatattagcgatggtatataaggagtttacgattttgtttttaattgttatagggtatatgttatcgtattttatagtggttatggatattatcgtttattagaaagtatcggggatattggagaagtgcgatttagtttttttcgtttcggtaaagtatattgtattagaaaataggatgatttcgatgaagaggaaaaagatgagtagttttagtttttttatattagttttgagggtttggtttaggatttggaggtttttagagtggcgggagagtttgaagattttaaaaatttttattaagcggatgattttgaggatggttagggaggtggtttgttcgtttttttggttttttttttgtttagttatttcggtgtttagcgtgatgaaataaggaatgatggttataatgtttatgaagtttatgatgtttttgaagaagttcgttttgttggggtaggcgaagaagcgtattattagttcgaaggagaattagatgatatatagcgtttttacgatgaagaaggggtttgtgaagatgttggaattgtagatgatcgtggtgttgtcgatgcggtggacggtgttcgtgaagtttttgttattttttagttcggggagcgtttttaggtaaaagatgacgatggagatgaggatgattatgacggagacgatggcgatgattttggcgggtttcgagttttcggggtattcgaagagtagttatatttggcgttggtattttttttcgggtagagggcgttttttttttttgatgaagttttcgttttttcggaatttttttatggttttttcgtttaattcgtaaaatttgattttttcggagaatatgtttaggggtacgttgatcggttttcgtaggcggtcgtcggattggtagtagtagaggatggcgtcgaagttgggtcggttgcggtcgaagaagtattcgttttttagggggtcgaagtagcgtatgcgttttttagggttgtttagtagcgtgttggggaattgcgttagggttttgagttgcgtttcgaagcgtagttcggagatgttgattattacgcgttcgtagtattcgtggtcgtcgtggtcggtttgtcgggggtagttgttattttgggggtggttcggggcggtcgaagtttcgtttacgttttttttagatattatcgttatggtggaagtcgggcgcgggggtgggaggttaggagagagttcggggtgggaagtagttagggattaggggtgggggggatttaagcggtttttttatcggagcgcgcgttttttttacgtttagggggaggtgttttaatacgagtaggtcgggagatttgcgattttgtttttcgttgtttttttttttattttgttttttatttagtttggaatttttttcgtttgcgggtcgggtgtagttttttgtagagggttgggtttgggtttgggggtttgttggttttttgttgttgttgtttagatatttttttttgattttaggtgttttaacgtagtgtcgttttagcggattgggttattgtttcgggggtcgttttggttttttttttttttcgagagtttttttaggattcggtgtagtgtcggttcggtagatttttacgtttgttattttttttgttttttttcggttttttttttttttattttttttcgtttgtcgttttttaagtttttattagggcgatcgatgtacgttgtagagaaatagaaagtgatacgggggtagaaaattagaagtatttagatgggacggatttatagatatcgaagaatatagatttttagtttgagaaagtattggacgtttgttagggttattatatatatacggatagacgatacgtagatattcggaaatttaagtttggggtttttttattttattttttttaatgtttaatagtcgatttgtttataatttcgttaaattagagatcggaaaagcgtcgagagacgtcgggggaagtttagggtttcggatagtattttcgtattttcggttttttttattcggtttttttaattttcgtttttgtattttcgagttggggaattttttatttggtcggttggtttggcgtaggggcggtgttgagttagcggagagttcgagtgggaatgcggtaggtcgtttttgtagtgttttggcgggagtcgcggcggtcgtcgtagtagtattcgagacgcgtcgggtaaattcgtcgttttggtttattcgttcgacgttttttttagttggataatcgttttacggagtagttacggcgaaaatgttttttttttatttttatttttatcggttgttagtaatttggagacgtcgtttttttttcggtgtagggagtttcggaggatgcggggcggaaaagtaaaatattattttttttcgaagtttcgaggtaaatgacgataaatagtattttcgtttttttttaatattatgggagtttttgattcgatttcgaaggaggcgggcgggcgagagtttggatttatatggttttttagtttttttcgtttttcgtattttagcgcggatttcgttaaggttacgcggcgcgttaggagtttttaggagtttggagtggagtagggtgcgtgcggcggcgggttcgttcggtttatttttgggcgttgtaagattagtagaaatttgagaaagcgtttggaatatcgagtagcgattggtttattcgggcgtgggttggggagggcgggggagggtaggagcgaggaggtggatggaaaatatgagggggtggtttggaagagagcggggttgttatttagtttttatttttgttagtatagttttttttttttttattagaaaagtcgatcgttaattttattttttttgtggttcgtcgtttcgtttacgaacggtttttagcggttcgcgatttttttcgggaattttatattggaaatggttaggttcgacgtaatgtaggcggtggtgtttttggtaaaattttttcgacgggtttgtttttgtgtagttttatagtaatttttttcgatcgtattgttttgcgttttatttcgttttttttttaagaaggtttttgttttttgcggggtttatttagtttttttcgtcggttggattcgtagagttgtagattttgggtagagttgtgtagatgaggatttttgggtttgttttatgtagttttattgggcggcggcggtattaagagtttgtttttttttaatttacgatgggatttgaagtttttttacgattcgattattttgaaatatagggaatgtgatttgtgggggatcgaaggtttcgtgggtttgtggggttgtttgttaatttggtgttaattgggaataatttgagaagtaagtcgtttatttattttttattttatgttttttttttcgtagtttttttttttagtttagtgtttttatagggttatttttaaagtttgtaatttatttggaaagggtttttcgtagaggcgtatggtagtaggagtcgggggcgtgtgttttgttttgcgagtgcggttggagttgcgtttttagaggcgttgtattttcgcgtttgtagcgcgagaaaaggtagtaggtagtttggtatttttagggttgcggagtttttaaggaggttgtaagagtttagagtcgtcgttgattggtttttttcgcggttttgggattattttttttattatcgttgtttttcgtttatattatttatttttttaattaaagttaatgattgtatttttttcgttttattgtggttagtggaaagtaggggtttttgcgggattgtttaggtagtgtaatagtttttgtttggaattagttaaattttttttttagatttagacgttagtattttttttagaaaaataaaagtgtatgttttttttttttttttagattcgtattttagttttttttttatgaataatgagtttttttatattttttttttttatattaaatttttttttttttttattttttatacgtatattttttaattttaatagttttagggatttttatttttttgtattgttgttttaatgtaaataaatatattttttaaaaaaatttaaaaataaaaataaagatataaatatgaagtttttagttgaagtattgttaagttttttggttttgttgttgttgttattgttagaattttattggggataattttacgagataagggttttttgattatattttagtattattgagtttttttattttttattttatttgtttttattttgtatttttttttttttataatttattgtttttttttaaatgtttttaagattgttatttttttagttttttgtgaatgtatgtgttttgatttagtattaggagattgttttattataagggatttatagattggatgagattttaggtttttaaatttcgggttttattggggggtatattaggaaattttttatatttttgatagatgtgtttatagtaggattggatttttaagggattggaagaaaattgtgagttgggaatttagtattttttttttttttttttttttttttttttttttttttttttttgtttttttttgagatagagtgtagtagtgtaattatagtttatcgtaattttgaagtattgggtttaaataatttttttattttagtttttggagtaattgggaggataataggtataagttattatttttggttaattggaatttagtatttttgatggaagtttttttttggtaagggtttgaagatatttattaatttaataaatatttgtttagttttagttatgggttagatggtgtttttgtattggaatggagatatataaggttttaggttttatggagtttatattttggtgggagatatagataataaatatatacgttatatattatagtgttagataaagaaaattaagaattaggtatagtaagtgataaatataggtttgtagataagaagggtttttttgtagaagtaatatttgaataaaaaatattaagaagagagagtaaggaataggaagatgaaaggatgggtgtaagagtaaaggttttaaggtaaggatagatttagtatatttaggaaataagagagttagtatggttagaaagaagttattgagaaagaatgttattaaaggtaggttagaaaggtaggtagagtttagattatgtagggtttttaaggttatggtaagaatagtttattttattttgagtataatgggaatttattggaggatatgtattaatatagtaatatgatttgtattttttggagattattttggttattagaaataagatataaggttggaggttattaagtagtataagtaatgttggtttagatgagggagattgtggtgagtttgtaaggagtttttggaagagaattatattttgaaatagagatggtagaatttgggatgtgaggaaagaaaagttttaggattgttttttaggtttgtggttttaataattagataaatggtaatattatttattgtaggagtgttttaaatagtttcgtttttatttagatgtgagttttttgaagtttgagattttttgtgttttttgagattttttgtgttgggtagtttaggagttttttgaagtttgagattttgtgtgttttagttgttattgtattgggtagcgtaggttatttttttagattttttttagtttattattgttttgtttaatggttatttgttttattgtaggtgttgttggaaaagttaattcgatgggtggtagagttttgttttttgaagttgatagtattgtaaggagtggaatttggattttttaagattgtaaaaaggtttaggtgagtaatataaatttaggggtgtattagtttaatggattaagaggagtttgtttagtgggagatgtaagttaggatggagttcgtcggtaaattttttttatttttattatttttatggttaagtaattatatggtttaatgaaaaggttgtgtttttttgtgatttatgaagtagtaattagtttggtaatttttttttttggatttgtattttgtttttttttgttttatttttttttttttttttttttatggttttggttttatattttttattaaagtatt

SEQ ID NO: 1087 - DNA, 7500 bp, Artificial Sequence
  chemically treated genomic DNA (Homo sapiens)
ttttagggtagaagttttgaaatgtgtttaaataattgttatgatggttttttttttttttttttttttagttaatttttttttttgttattgtttatatttaagtttaaaggatagagataggataatatatttttgaggttaagttataaaatagaagtagaggttagaggaagattttaaagagggaaatgaaatttaagagttgtttattttatttgtatagtgtggtgtgggggttaagggtatatgttttagaattataaagatttaattttagttttagagttattatttattaattttaggtaggtgattttattttttattgtttttattttttttttaatgaaatggtattaatgtatatattgatttttagggttgtgagaattaaatgttgttttgggtaagaagtgtttagtatagggtttgatatatggtaagtttatgttattaattatgacgattgatttttttttaagggtttttttttgtttatagtttttgtttttaagaaggaaggtaaaggaaatgtatatatatgattagatggatagagtatttgattttggttatataggattatttgattttaaatgatacgagaatttagtgtgttaaataggagaaatagagttttttggtgttggttaggggaggtttttagaaggagtatatagggaagggaattggaggttaatttggtagaggggtgggaatggtgagattttaaggaaagtaaagggcggggtaatttgggaagtagagggaatggggtaataaggatttggtgattgggagtttagagaaatattttagagttaagttggaagttaagagttatgaggagagttttataaggaagtagagtagcgaaattattatgtatttagtgtttgttggatgttaaatttatttaataattaaaattttattatatttttaggggtattttgattttttagaggagggtattggtgtttagagaagtgaaataatttatttagtaattgttagggagttacgtttttatttgattgtttttaaaatatttaagtcgtttattgattgggatattaataggttaggtttaaggtgttttaaattatattagtttttttttatagttatttgttattttttgggtttacggaggttattgtttttttagattattttttgtagttttaggtaggtttttagtttttaattatattttatagattattacgatgaaacgttagaattcggagtttcgttttatgggtttttagggttttttttacgaggtatacgtatagagaggagggtttttcggtcggagggtaggggggagggtttagtggggattttttggtgttagagtttatttgaatttagagtttcgtgtttatcgtagttttattttaaggaattattattgtttggtatatttgtttaggtgattttgatagggatttggagaatagaattagtaggggtttgaggttgtcgtttgttttttaaaagtattttggattttttcggatgttttatttaggtagaaagtaggttgtgttttttatatatatttttcgaaagtaaagggtattttcgtttgtttatttagggtgttgtaagttgtatttttaagtttagagttttgtgggttatttggttttgtaagttttgttagagggttcgttttgtgagtagttgattatttttaagggtagcggcgtgttttttagttttttttgttcgggttttgggggagggagtcggggagtggagagggttagttttgtagtgttgtttgtttttgcggtttttttcggtgggggcgaatatagtagaagagtttttgttatattgcggatcgtatttgttgtatttttttgcgaagttaaatttttgttgggtaatagggaggtgggaagtcgatttggagaaggggtcgcgttggcgggagaaagggtaagaaaggggtttgtagattttgtttggaggtattataataatagtaatacgtttttttcggggttggatttcgttgtgggtttggggtagttgttattgattattttttttttgtttattttattacgttggtaggagttttttattagtgttttttaatttttgtttttttttattttttcggttcggtagtatttagttgagtttttttggaggttttggttagtaagtcgggttttgttaaagaatgtttttttcgcggggcgggggttgaggttcgggggtttaacgaggtgacgagttcggtggcggcggagggtagtttgtcgtttcggtttcggtttcggttttcgtcggtttttttaattcgagttcgtcgtcgagttaggtgcggcgttgcgtggcgcggtgcggttgcgggcggcggtcgggagtttcgtacgcgtcgttcgcgggattgtagagtcggttttcggttggtcgttcgtatttcgtcgtcgttcgttgtcggggttttgtcggcgttggtcgtaatttaggaatatggaggtttcggtgtttattcggaagggtaaattcgtgtcggggcgttgcgcggcgcgtgttgttttttttgttcggttgcggcgtttagaggggttgcggggtattcggcggcgtagtttgtagcgtagtaggtttgggttgagttcgcggcggtaagtttttgtcgattattgtcgtttgttcggtaggttttagatcggggagattaaggggaatttgtattttgtttaagaagagtgtatagaatgggttcgggattttttggggtttgcgtggcgcggggcggagggtacggagaggagttggtgggtggtgggaagtgtagttggtagtataattatgtttggtaaatagcgcgggttggtaggatttgaattatttgggacggtcgggttgtattcgttttttcggtatagaataataaacggttttgttgtagagagggttttttttttcgttggggtcgtgggttgtcgtcgagttttcgcgtttaaaaggaagttgagatttggggcggtagtttggcgtaggttattttttatttttagagattaggtttcgggattttgggttggatattgagtttcggcggtttttcggttggacgtcgggggtttaagagttgaattgcgtttgggttcgtagtaggagtcgatcgcgcgggtaggagggggttaaggtggcgttagcggtcgcggttagcgggagggtttggttttttgcgcggaggcgagcgttgagtgcgtcgaacggaatttcggtcggagttcggggcgatggggagagggtttagattttttttcgttttggggtcggcgggattgggtcggtagggggttagttcggaagtcggttttttttaggttttttttttcgttgttgttaagtcgtttcgtagttaggtaggcggagcgtttattttgtgttttttgtcgaggagatgtgagggatttttttttgggggagaaattagtggtcgagcgtttgtttagtttaaatgttattcggtttagagggaggtttgcggtttagggatttcggagggagagtaagtttatttagttttcgtatagtgtagattttgttgtgtggggtttttttagatgcgttttgaaggagtgtgtgtgttggggggtggggtgttttttttttaggattggttgaggttagagtttgtagataggttgtagtgagttaagttttttttttgggagttgttgtgttttgatatgtgggggtaggagtgttttttttagagttttttttgagagtagttggggattagtaatttggattaatttagggaggtttttggagaaggtaggtttagttaagtttgagttttgttttttgggagaaaatgttttaagttgatgggaagtttgtttagaagaggtaaggaggttgagggatagtttttaggtttggtattagaatagaggatgggtatgggggtttgttattttttatgagggaagttgttagatttttttaaattttggtattagttggtttaaatgttttggttttattttgttgttgtttttttttaggtaacgttatattttttgaggatagttaggattttagtttttgttgagttttgtattttgttttttttttttaaaaggttttaggtttatgttcggttgtttttaagtttcgtatgtttttggttaggtattttatcggttttttagtttagtttaattttagagtttattttaggatttagagtttgtttttttgtttagaatgatttattattatttttagttcgagtgagaagacgtgatgaggagttgggttgtttgttggtgtattttagatttttgtagtatttgattagttttgtaaggaagagagttttacgtttttggttaggtaaattaatttattatttaataatagttttgtgtagaattattggggtggaggttaatgagaaagatttaggtttaagttttttaattatgaatatttttttgggtatgagtatttgagatattagtgtagtatttgggagagggtttatttttaatttattagtatggggttatgttttatgaagtttgtgtgttataagcgggtttgtattagttatttttttttaatgtagggtattttagaggtttttggagagattgttatttgttttttttgatttttagataagttataaggtgaaagtaaattttgttttgtcgttgtggtggtggtgattatgtgtttgaatttttggttgagagatgggagataaaaagtggtaatttaggttaggttgttaatgttgagtagttttatgttaataattgtttttgttttttagttaagcgaggttgtttttttagtttttagagagttttcggggtttttttgtaggagattaggttaatgtttttgtgttttttggggttagtagtagtattttgagttttttgttattaggtagttgaaaggtatagcgtgaggtgttttttttagttttaattatgatagtggttatcggagatttagtagacgaggttgttgttttttttgggtatttataggatatttatgatttagaggtagattacgagtgttgtgagagggtggtgattaatattttagggttgcggtttgagatttagttaaagattttagtttagtttttagagatttttttaggggatttaaagaaacgaatgaggtattttgatttttttcgaaatgagtattttttcgatcggaatcgttttagttttgatgttattttgtattattattagttagggggtcgattgaggcgatttgtgaatgtgtttttagatatattttttgaagaaattcggttttatgagttgggagaagaagcgatggagatgtttcgggaagatgaaggttatattaaggaggaagagcgttttttgtttgaaaatgagttttagagataagtgtggtttttttttgaatatttagagagtttagggtttgttaggattatagttattgtgtttgttatggtgattttgattttaattgttagtttttgtttggaaatattgtttatttttcgggatgagaatgaagatatgtatggtagtggggtgattttttatatttattttaatagtattatcgggtattagtagtttattttttttatagattttttttttattgtagagatattttgtattatttggtttttttttgaatttttggtgaggttttttgtttgttttagtaaagtcggtttttttattaatattatgaatattattgatattgtggttattattttttattttattattttggggatagagttggttgagaagttagaggacgtttagtaaggttagtaggttatgttattggttatttttcgtgttattcggttggtaagagtttttaggatttttaagttgtttagatattttaaaggtttttagattttaggttagatttttaaagttagtatgagagaattgggttttttgatattttttttttttataggggttatttttttttttagtgttgtgtattttgtagaggtcgatgagcgagagttttagttttttagtattttagatgttttttggtgggtagtcgtttttatgataattgtaggttatggagatatggtttcgattattattgggggaaagatagtgggttttttatgtgcgattgtaggtgtgttaattattgttttatcggtttttgttattgtgtttaattttaattatttttattatcgggagatagagggagaggaataggtttaatatttgtaagtgataagttgtttaaagattttatttttttttgatttaaagaaaagtagaagtgtttttattattagtaagtttgattatatggagatttaggagggtgtaaataatagtaatgaggattttagagaggaaaatttgaaaatagttaattgtattttggttaatataaattatgtgaatattattaaaatgttaattgatgtttgattgaaatttattatcgtatttatagtttaatggaattaatgtagatgttgtataatagtttgtattgtagttagtgtgttttatagtgtgtatttggttttgtatggaaagtaatagttgtgtaagtgatttttgattttttgatttttgatttagaatatagaatatttattatggtttttatgtatatttttattatcggtttatgaatttttaaagacgggagttatttattaagttaggattttagatagatataacgagggtattttatattttatatatagtgtattatattagtgttattattgttttttaatgaaatgtatataatatttaagagatgtatttttttttttattattttattattttatttgagtttatttgtttttttatagaggaatataattatggtttagttttaaatagttggtgtttgtttaaaaggttatatttatttttgtattgaaaagaatatatagttttgtgtgttggaattattttttgtgttataggttggagtttgtgaattgtagttgttaagtagatgttttggaggtttgtgttttataacggaaaatgttgtattttgttttttttttgtagtgtcgatgtgagggaagttcgggggagggatagttagtatgatcgaatatgagttgttaagttttatatttgtttttttaggtttatggggagaagttaataaattaatagatttttaagtttttgattttattatttttgtaggttttagggttataaaaatatgtttggttttttattggagtttgtagatatttgtttttttattgatgtggtttagttatattgatattgtagtgaaatttattagtgatgtaatagagttgtatgggtgtttgttgtatgaattttaatatttaaaatataggagataatttatttttttagtagtttatatagtgttaatatttagagtattaataggtttggaatggttttgaattaggggttt

SEQ ID NO: 1088 - DNA, 7500 bp, Artificial Sequence
  chemically treated genomic DNA (Homo sapiens)
aaatttttagtttaagattattttaagtttattaatattttaaatattaatattgtgtaggttattaggaaaataggttattttttgtgttttaaatattgagatttatgtaataaatatttatgtagttttattgtattattggtaaattttattgtagtgttagtgtagttgggttatattagtgggaaagtagatgtttgtaaattttagtaagaaattagatatgtttttgtgattttggagtttgtaaaaatggtgaaattagaggtttagaggtttgttggtttgttagtttttttttataggtttaagggaataaatgtgaaatttgataatttatattcggttatattaattgtttttttttcgggttttttttatatcgatattgtagagaaaaagtagaatgtagtatttttcgttatgaaatataagtttttagagtatttatttggtaattgtaatttataaattttagtttgtgatatagaaagtaattttaatatataggattgtgtgttttttttaatgtaaaaatgagtatgattttttgaataaatattagttatttaaagttaagttatgattgtgtttttttgtgaaagggtaggtgggtttaaataaggtggtgggatggtggggaggggagtgtattttttggatgttgtgtgtattttattaggaagtaatgatggtattgatatggtgtattgtgtatgggatatgaggtgttttcgttgtgtttatttgaaattttagtttgataggtgattttcgtttttggaagtttataagtcggtgatgaggatgtgtatgaaagttatgatagatattttgtgttttaaattaaaagttaaaagattaaaagttatttgtataattattgttttttatgtagaattagatatatattgtagaatatattgattataatgtaggttattatgtaatatttgtattagttttattgagttgtgagtacggtaataggttttaattagatattagttaatattttggtaatatttatatagtttgtgttagttaaggtatagttggttgtttttaagtttttttttttaaagtttttattattgttatttatatttttttggatttttatgtaattagatttattaatggtagaggtatttttatttttttttaggttaggggaggatgggatttttggatagtttgttatttgtaagtattgggtttgtttttttttttttgtttttcggtggtagaagtagttgaaattggatataatgatagggatcggtaaggtaatagttaatatatttgtaatcgtatatagggaatttattattttttttttaatggtagtcggaattatgtttttatagtttatagttgttatggagacgattgtttattagaaggtatttgggatgttggggaattgggattttcgtttatcggtttttgtaaaatatatagtattagagaaaaggatgatttttatgaagagaaagaatattaggaggtttaatttttttatgttggttttgagggtttgatttagaatttggagatttttggagtgtttggataatttgaaaattttaaagatttttattaatcggatgatacggaggatggttagtgatatggtttgttggttttgttgagcgttttttggttttttagttaattttgtttttagggtgatgaagtaggggatgatggttataatgttaatgatgtttatgatgttggtgaagaagtcggttttgttgggataggtaaagaattttattaagaatttaaaggagaattagatgatgtagagtgtttttataatgaagaaagggtttgtgaaggaagtggattgttggtattcgatggtgttgttggaataggtgtggaaggttattttattattatgtatgtttttatttttatttcggaagatgggtaatgtttttagatagaagttgataattgagattagaattattatgatagatataatagttataattttggtaggttttgagttttttgggtatttaaagagaagttatatttgtttttgaaatttatttttaggtagaggacgttttttttttttgatgtagtttttattttttcgaaatatttttatcgtttttttttttagtttataaaatcgaatttttttagagaatatatttaagggtatatttataggtcgttttaatcggttttttgattggtagtagtataaaatggtattaaagttagggcggtttcgatcgaaaaagtatttatttcggagggggttaaagtattttattcgtttttttgggttttttaagagggtttttggaaattgggttaaggtttttagttgggttttaaatcgtagttttgagatgttgattattatttttttatagtattcgtggtttgtttttgggttataggtgttttgtgggtgtttagggagggtagtagtttcgtttgttgggttttcggtggttattgttataattgggattgagagaagtattttacgttatgttttttagttgtttggtggtagggagtttagggtgttgttattggttttaggaagtataggagtattggtttggttttttgtaggagagtttcgagagttttttgagagttggagagatagtttcgtttggttgaaagatagaggtagttattgatatgaggttatttagtattggtagtttgatttgggttgttattttttgttttttattttttagttaagagtttagatatatgattattattattataacgataaagtaaaatttatttttattttgtaatttgtttggggattagggggagtaggtagtaatttttttaggaatttttggaatgttttgtattgggggaaggtggttggtataggttcgtttgtagtatataggttttatggagtataattttatgttaataggttaaaagtggatttttttttaggtgttgtattaatgttttagatatttatatttagggaggtatttatggttggggagtttgggtttgggttttttttattggtttttattttagtgattttatataaggttgttattaaatgatagattgatttatttgattagagacgtgaagtttttttttttgtagagttgattagatgttgtaggaatttgagatgtattaataggtagtttaattttttattacgtttttttattcgagttagaaataatggtgagttattttgggtagaagggtagattttgggttttgaggtgagttttaggattgggttgggttggagggtcggtgaggtgtttggttaggggtatgcgggatttgaagatagtcgagtatgggtttggagttttttgaaggaaggaggtaagatgtaaagtttagtaaaagttggagttttggttgtttttaggaggtgtgacgttgtttggaaaaaaatagtagtaaggtggaattagggtatttgaattagttggtgttaagatttaggagggtttggtagttttttttatgggaggtaataggtttttatgtttattttttattttgatgttaggtttgaggattattttttagtttttttgttttttttgggtaggttttttattagtttgaagtatttttttttagggagtaagatttaggtttggttgggtttgttttttttaggggtttttttgggttgatttaggttgttagtttttagttgtttttaggaaggattttggaagaagtatttttatttttatatgttaggatatagtagtttttaagaggagggtttagtttattgtagtttgtttataagttttgattttagttagttttggaaaagaagtattttattttttagtatatatatttttttagagcgtatttagggagattttatataataaagtttgtattgtacgaaaattggatgaatttatttttttttcgggatttttgggtcgtaggtttttttttgagtcgggtggtatttgagttgggtaggcgttcgattattgattttttttttaagagaaaattttttatattttttcggtagggagtatagaataaacgtttcgtttgtttagttgcgaggcggtttggtagtagcgagagggggagtttggaggaagtcggttttcggattggttttttgtcgatttaatttcgtcggttttagggcggggaggggtttgggttttttttttatcgtttcgggtttcggtcgggatttcgttcggcgtatttagcgttcgttttcgcgtagaggattagattttttcgttggtcgcggtcgttagcgttattttaatttttttttgttcgcgcggtcggtttttgttgcgggtttaagcgtagtttagtttttaagttttcggcgtttagtcgagggatcgtcgaggtttagtgtttaatttaaaatttcggaatttgatttttgggggtggggagtagtttgcgttaggttgtcgttttagattttagtttttttttaagcgcgggggttcggcggtagtttacggttttagcgaaggggaaagttttttttgtagtaaagtcgtttgttattttgtgtcgaagaggcgaatgtagttcggtcgttttaagtggtttaggttttattaattcgcgttatttattagatatggttatgttgttagttgtattttttattatttattagttttttttcgtgtttttcgtttcgcgttacgtaaattttagagggtttcgagtttattttgtgtattttttttgagtagggtgtaagttttttttgattttttcggtttgggatttgtcgagtagacggtagtggtcggtaagggtttgtcgtcgcggatttagtttaagtttgttgcgttgtaggttgcgtcgtcgggtgtttcgtagtttttttgggcgtcgtagtcgggtagggaaggtagtacgcgtcgcgtaacgtttcgatacggatttattttttcggatgggtatcggggtttttatgtttttaggttacggttagcgtcggtagaatttcggtagcgggcggcggcggggtgcgggcggttagtcgggagtcggttttgtagtttcgcgggcggcgcgtacggagttttcggtcgtcgttcgtagtcgtatcgcgttacgtagcgtcgtatttggttcgacggcgaattcgaattaaaggggtcggcgggggtcggggtcggggtcggggcgataagttgtttttcgtcgttatcgagttcgttatttcgttgggttttcgggttttagttttcgtttcgcgaggaaaatattttttggtagagttcgatttattaattagaatttttaggagagtttagttgggtgttgtcgggtcggggagatgggggagggtagaagttgaggggtattggtgagaggtttttgttaacgtaatgaagtaggtaaggaggagataattaatagtagttattttaggtttatagcgggatttagtttcgggagagacgtgttgttattattgtggtgtttttagataggatttgtagattttttttttgttttttttttcgttagcgcgattttttttttagatcggttttttatttttttgttatttagtaaagatttggtttcgtagggaaatgtagtaggtgcggttcgtagtgtggtagaaatttttttgttgtgttcgtttttatcgagaggagtcgtaggaataggtagtattgtagggttggttttttttatttttcgatttttttttttagggttcgggtagggaaggttgggggatacgtcgttgtttttgggaatggttagttatttataaaacgggttttttggtagaatttgtaaagttaggtggtttatagggttttgaatttaggagtgtagtttatagtattttaggtgggtagacgaggatgttttttgttttcgggaaatgtgtgtgggaggtatagtttattttttgtttagatagggtattcgagaaggtttagggtgtttttgggaggtagacgatagttttaagtttttgttagttttgttttttaggtttttgttagggttatttagataggtgtgttaaatagtggtggttttttgagataagattgcggtagatacggagttttggatttagatgggttttagtattaggaagtttttattgggtttttttttttatttttcggtcgggaaatttttttttttatgcgtgtatttcgtggggagagttttgaaagtttatgaagcgggatttcggattttggcgttttatcgtggtagtttgtgaggtgtggttgaagattgggagtttgtttagagttgtagggggtggtttgggagggtagtgattttcgtgggtttaaaggatgatagatgattatagagaagggttggtatggtttagagtattttgaatttggtttgttagtgttttagttagtgaacggtttgggtgttttggaggtagttagatggaaacgtaattttttaatagttattagataagttattttatttttttgggtattagtgtttttttttgaaaaattaggatgtttttaagggtgtggtgaggttttaattgttgaatgagtttagtatttagtagatattgaatgtatgatgatttcgttgttttgtttttttgtgaaattttttttatagtttttagtttttagtttagttttggggtgtttttttaggtttttaattattaggtttttgttgttttattttttttgttttttagattgtttcgttttttattttttttgagattttattatttttatttttttattaaattgatttttagtttttttttttatatattttttttgaaagttttttttgattagtattaaggggttttgttttttttatttggtatattgggttttcgtgttatttaaagttagataattttgtgtggttaaagttagatattttatttatttgattatatgtatatattttttttgtttttttttttgaaaatagaagttgtggatagagaaaagtttttgaaggaaaattaatcgttataattggtgatatgggtttattatgtgttagattttgtgttaagtattttttatttagggtaatatttaatttttatagttttagaagttaatgtatatattagtattattttattggaaaggaaatggaggtagtgagaggtgaaattatttgtttgaggttaataaatggtgattttaggattggaattaggtttttgtgattttaggatatgtgtttttagtttttatattatattgtgtaggtggaatgagtagtttttgaattttatttttttttttgagatttttttttgatttttgtttttattttgtgatttggttttaggggtatgttgttttgtttttattttttaaatttaaatgtgaataatgataaaaaaagaaattaattaaagaagggggaaaaaaaagaattattataatagttgtttaggtatattttagggtttttgttttgaaa

SEQ ID NO: 1089 - DNA, 7642 bp, Artificial Sequence
  chemically treated genomic DNA (Homo sapiens)
tagttaggtatttagtttggttagaatagataaaatagttataagtaatatttttagtatttttgttatgtattgttaataaatagtattgtaaaaatttttatggatttatattttatttttttaatagtatgtaagtttaatgagggtatgatttatgtttaaattttatatttttatagtatttagaataatggttgtgtatatattaggtgtttttttttttattattattatattttaagttttaggatatatgtgtagaatatgtaggttatataggtatatatgtgttatggtggtttgttgtatttattaatttattatttatattatatattttttttaatgttattttttttttatttttttattttttgataggttttagtgtatgatgtttttttttttgtgtttatgtgtttttattgtttaatttttatttatgagtgagaatatgtggtgtttggttttttgtttttgtgttagtttgttgagaatgatggtttttagtattatttatgtttttgtaaagggtatgaatttatttttttttatggttgtatagtgttttatggtgtatatgtgttatattttttttatttagtttattattgatgggtatttgggttggttttaaatttttgttatcgtaaatagtgttgtaataaattatatgtgtatgtgtttttgtagtagaatgatttataatttattgggtatatattttgtaatggtattgttgggttaaatggtatttttggttttagatttttgaggaatcgttatattgtcgtttataatggttgaattaatttgtattttatgtttatggataggaagaattaatatcgtgaaaatggttatattgtttaaagtaatttatagatttaatgttatttttattaagttatttttgattttttttatagaattataaaaaattattttaaattttatatggaattaaaaaagattttatatagttaagataatattaagtaaaagaataaagttggaggtattatattatttgattttaaattatattataaggttatagtaattaaaagagtatggtattggtattaaaatagatgtatagattaatggaatagaatagaatagagtttgagaaataatattatatatttataattatttgatttttgataaattttataaaaataagtaataaggaaagatttttttatttaataaatgggaaaattggttagttatatgtagaaaattgaaattggattttttttttatatagtatataaaaattaatttaagatggattaaagatttaaacgtaaaatttaaaattataaaaattttagaagaaaatttaggtaatattatttaggatataggtatgggtaaagattgtatgagtaaaagtaatgcgaataaaagttaaaattgataaatggggtttaattaaattaaagagtttttgtatagtaaaagaaattattattagagtgaatagataatttatagaatgggagaaaatttttgttatttatttatttgataaagggttaatatttagaatttataaggaatttaaataaatttataagaaaaaaataattttattaaaaagcgggtgaaggatatgaatagatattttttaaaagaagatatttatgtagttaataaatatgaaaaaaagtttattattattggttattagagaaatgtaaattaaaattataatgagatattattttatgttagttagaatggcgattattaaaaagttagaaaataatagatgttggagaggatgtggagaaataggaacgtttttatattgttattaggtgttatttttttatttatttatttgtaattgtggattaggatttttagttttgttttgttttatttttaaatatttttgagttaattttaaatgttgtttattatttggtaaataattggtgaattatttttgggattgatgtggttagtaggaaatataaattatgtttagagtaatatagaaaggttaaatattaagatttatttatttttgttgtttgtaaatttgacggttttagttaggttttagtattgtagattgaaatatgaggaaattttgtatatgtttagagaagttgttggttttgttatagttttacgtttaaacgttataataatattattattattttataggggtgttatgaggattaatgagatatttttaaattattttgagttattttgttgggggtattaaataaatgttatgttttttttttgaaatgttatttttggtattgatttgttgtgatgggttcggttgtttaatagggttagaatgagtttattaatttattttttatagataatagacgagtcgttagaaggagtggtttttagttaagataaatatgaattgaagtgaattagtcggtaattagaagtaaataggttgttgttagaaatttagtatattaagtatttatagtgattaatataagcgttgtatagtgtgatatagtaaagtaaatattggatttggaaatggtttaagattttaggtttagttttgttgttaattagttatgtgagtttaagtaaattgttaaatttttttgggttttaaatataaagtaaggattttatatgtgttttaagaagtatataattaaagttttttagataaggtaaatatatgaaagggaatggaaatagttatttatgaaggaaagatattttatagttgggagaagtttgtgattatttgttataggattattttttgttttggttttttttgttattgattaatattaattttagtattaatttttgtaaaagaaggaataaattattttttaagttagatatagaagtatatgaaatatttggtttttaaaaatagggtttttgtttttttatgagttattattgtagtaagtagtttgttttattttaagatttaaatatatgaatgattgattatattgttattttaattattagtttaaaatatatacgtaaaataatgaggtggttgttatattttagtgttttggagttttgtaagagaaagagttttacgtggttgtttagttttgttattttataatataagtgattgtttgtattgtttggtattgattaggaggtgaaacggaagatgaagggataataaaaggatatgggtgtttgttgtgtttaggagagtcggaggtggaaattttatggaataaatgagtagtgttttttatggtgagtttagtttttttttattttttattttaggaattatagtagtattttgggtttaaaaagaagaaatgttgaaattttagagtagatagtaacgtaaagagatattttttggggaatttaatttgataagtatgtattaagtttttattatttataaggtattttggtagttgttagaaatataagttggttaggatttattttgtgttttagagaattttatggttgggagtggtggtgggaagtattgattataaattatttatttaaaattgaattgttagttaattttgggtgggtgaggagttgtttagataatagttttttttttgtaaatgatttgaatgatataataaaaaatagattttttaaagtttagggttgagttatattagattgttaaaatttttggaaataaattgtgtttaaagtaattataataatttggaaaaataagtttaaagaagatatatgtaagttatttttgggtttagattaagtaagaggtataagttgtagaatgaatgtttttttagtttaataattagagcgttgtaaattttttattataagggtagtgttaaaatattaagtaaaaagtttaggtataggttttgtttttattttttttacgataggtttgagttataaagttggattttttaattatataatttcgatttcgtgaatttttttttttatttttttttttattttttcgttaataggaaatttgtgtagtggataaagattaggttgttattgttaattttaattagaaatttggtttttgattttttttagtggtcgatattttcgttgcgaaaacgggtgtgaattatttattaaagtagtagggttcgaacgtttttaataatttatttttttcggatttcgtttgcgaagtttattagtatttattattttttttggtttcgtattttagtagaagttaaattgtttaaattttcgtttttttttagggtttggcggttttcgatttttaagggaatttgggatgtcggcgttaggtttgtttttggtttagggcgttcgtttggtttgtattttttttttggatattgggttcgtttgtttttttcgggttgtatttaggggtgtggaggttagggtgtcggcgttcgcggggtcgcggcgggagttttttcggtttacgggtcgaaaattttggcgattgggacgcggttaggcgggtcgggggcgaggggcgttgattagaagcgggcggagtttagggttcgggtcggtagtttgatttttcgtgggtcggttttgttgggtgggtattttcgcggggcgtcgaggtataatatgagggttttttcgttgatatcgaggggttttgagggttgtaagaaatgtaggttcggcggttgttttcgagagcgggacgcgcgttcgcgcggtgggcgggaattttaaggggacgcggaggcgggcgcgcgtttcgtaggggagggggcggagagcgcgagaaggagggaggaggcgttttcgtgcgggagttcggttgatcgcgttagatttagatagagtatcgcggttttggttgtaataggcggtgggttcggttcgggggcggaggcggcgaaagggcggggagcgcgaggaggagcgatttggttttatcgttgtcgtttttttttcgtcgtatggacgagcgttttagttttttgcgttcgtcgtcgtcgtttttagttcgttatcgcgtttattttttttagcgtttagcgagtagcggcggtgtttatacgttggtgaattacggttacgcggagttcgtcgtaggtcgcgagttgtcgttcgatatgatcgtggtgttcggggattatttgttggagtcggaggtggtcgatggtggaggggtttcgttttaaggcggttgtggcggcggcggttgcgatcgttacgagtcgttgtcgtttttattgtcggtcgcgggcgagtaggattgttgcggggagcgcgtggttattaatattttcgggttgcgtttcgagacgtagttgaagattttttgttagtttttcgagacgttgttgggcgattttaagcggcgtatgaggtatttcgattcgtttcgtaacgagtattttttcgatcgtaatcggtttagtttcgacgttattttttattattattagttcgggggtcgtattcgtcggtcggttaacgtgtttatcgatatttttttcgaggagattcgtttttattagttgggcgaggaggttatggagaagtttcgcgaggacgagggttttttgcgggaggaggagcggtttttgtttcgtcgcgatttttagcgttaggtgtggttgtttttcgagtatttcgagagtttcgggtcggttcggggtatcgttatcgtgttcgtgttggttatttttatttttattgttattttttgtttggagacgttgtcggagtttcgcgacgagaaggattatttcgtttcgacgtcgtaggatttattcgaagtagtcggtaatagtacgtcggggtttcgcgtaggagtttttagttttttcgatttttttttcgtggtggagacgttgtgtattatttggttttttttcgaattgttggtgcggtttttcgtttgttttagtaaagttattttttcgcgaaatattatgaatttgatcgatattgtggttattattttttattttattattttgggtatcgagttggtcgaacgatagggtaatggatagtaggttatgtttttggttattttgagggttattcgtttggtaagggtttttcgtatttttaagttgtcgcgttattttaaggggttgtagattttcgggtaaacgttgaaggcgtttatgcgggagttgggattgtttattttttttttttttattggggttatttttttttttagcgcggtttattttgtcgaggtagacgattttattttaggttttagtagtatttcggatgttttttggtgggtagtggtaattatgataatagtgggttacggcgatatgtatttagtgattatagggggtaagattgtgggatttttttgtgttatcgtcggtgttttgattatcgtattgttagttttcgtgattgtttttaattttaattatttttattatcgggagatagaaggggaagagtaattttagtatatgtacgtgggaagttgttagtattttttttttttagtcgaggagtttcgaaaagtaaggagtaattcgattttgagtaagtcggagtatatggtgatcgaagaggggggtatgaattatagcgtttttttttagattttttttaaaacgggtaattttattgttatttgtattacgaataataattttaatttttgtgttaatattaaaaagatatttatcgatgtttaatatgtgatataagtgatatgttgtgtttagtattgtgtggaacgtgtttttttggtttgtttatgtttttgttttatatatttttagattatttattaaggaaaggatttgaagaagtggaaagtatattttattttttttttttttgttgttttatattgaaataggtgtttgttttgtaagtgggttgtatttttttagtttttttttttttttttatttttttttttttaatattgtaaataatagatttacgttaaattttatttttagtatacgttttatttaaaaaagagtagtatattttgggaggaaatgaaattaaagaatagttagagtaattgtttaattttagaattttaaaggtagttgttttttttttaagtatattaattcgtagtaaatgatgtttcggtttgatggattttttaacgttatttattgaatatgtatttcggttgtttattttgtagatatgtggatgaagagtttaattagaataatgatttgtaaatttattatgagttatttggtttttgatttaaatttttatttgaattttttttttcggaattttaagggtttttataattttgaataaagggaaatgtttttaagatgttttgatttgattaattagtttaattttttcgggtttgttaagtatttttaaagtattagattaatagatttttgtgaagttttgtgtatatgttttagttttaataattattaaagtttagaaatagatgtttttagtgttgttgagagaaataaaaaattttttaatgtatttgagagataagtttcggtagtattataagaagattaaagtggtagatattttttttagcggaagttattaattcggatttgattgatgtagtttttatagtaatttatgttttttgggaaattcgaaaaaggttgttatggtattttttgttttttagttttattttttagtttttgtcgtttttata

SEQ ID NO: 1090 - DNA, 7642 bp, Artificial Sequence
  chemically treated genomic DNA (Homo sapiens)
tgtggaaacggtaggggttgggaggtggggttagagagtaagagatgttatgataatttttttcgggttttttaggaaatatgggttgttatggaaattgtattagttaggttcgaattagtaattttcgttggaaggggtgtttgttattttaatttttttgtgatattgtcgaagtttattttttagatgtattaggaaattttttgttttttttagtaatattgaaaatatttgtttttagattttgatagttgttggggttgggatatatgtatagaattttataggaatttgttagtttaatgttttagaaatgtttagtaagttcgaaagaattaaattaattagttagattaggatattttgggggtatttttttttatttaaagttgtagagatttttaaaatttcgggaaaggggatttaaataggaatttaagttaaaaattaaataatttatggtgggtttataagttattattttagttagattttttatttatatatttatagggtaggtaatcgaaatatatatttaataaataacgttgaaaggtttattaaatcgaagtattatttattacgaattgatgtgtttaggaaagaaataattgtttttaaaattttgaggttaaatagttattttaattgttttttagttttatttttttttaggatgtattgtttttttttaaatagggcgtgtattagaaatgaagtttaacgtaagtttgttgtttataatgttaagagagagagggtaagagggaaaaggagagttgagagaatgtagtttatttgtaaaataggtatttgttttagtatgaagtagtagggagagggagaatgaagtgtgttttttatttttttaggttttttttttgatgaatggtttggaaatgtataaaataagggtataggtagattaagggggtacgttttatataatattgagtatagtatgttatttgtattatatattaaatatcggtgaatatttttttgatgttgatataagagttgggattattgttcgtggtgtaggtggtagtggaattgttcgttttgaaaggggtttgggggaaagcgttatggtttatattttttttttcgattattatatatttcgatttatttagagtcgagttattttttgtttttcggagtttttcggttgaagaggagaggtgttggtaattttttacgtgtatgtattgggattgtttttttttttttgtttttcggtggtagaagtaattgaagttggaaataattacgggaattggtaatgcgatggttaagatatcggcgatggtatagagagattttataattttgttttttatggttattgggtgtatatcgtcgtaatttattgttgttatggttattattgtttattagaaggtattcgggatgttgttgaaatttgaagtggggtcgtttgtttcggtaaagtagatcgcgttggagaaaaggatgattttaataaagaggaagaagatgagtaattttagttttcgtatggacgtttttagcgtttgttcgaggatttgtagttttttggagtggcgcgatagtttgaagatgcggaagatttttattaggcggatgatttttaggatggttagagatatggtttgttgtttattgttttgtcgttcggttagttcggtatttagagtgataaaataaggaatgatggttataatgtcgattaggtttatgatgtttcgcgagaaggtggttttgttaggataagcgaagaatcgtattagtagttcgaaggagaattagatgatgtatagcgtttttattacgaagaagggatcggagaagttggaggtttttgcgcgggatttcgacgtgttgttgtcggttgtttcgaatgagttttgcgacgtcgaggcggggtagtttttttcgtcgcggaatttcggtagcgtttttaggtagaagatgataatggagatgaggatgattagtacggatacgatggcgatgtttcgggtcggttcggagttttcggggtattcgaagagtagttatatttggcgttggaagtcgcggcggggtaagggtcgttttttttttcgtaggaagttttcgttttcgcggaatttttttatggttttttcgtttagttggtagaagcggattttttcggagaaaatgtcgatgggtacgttgatcggtcggcggatgcggttttcggattgatagtagtagaggatggcgtcgaagttgggtcggttgcggtcgaagaagtattcgttgcggagcgggtcgaagtattttatgcgtcgtttggggtcgtttagtagcgtttcggggaattggtaaagggtttttagttgcgtttcgaagcgtagttcggagatgttgatgattacgcgtttttcgtagtagttttgttcgttcgcggtcggtagtgagggcggtagcggttcgtagcggtcgtagtcgtcgtcgttatagtcgttttgaggcggggtttttttattatcggttattttcggttttagtaggtggttttcgggtattacggttatgtcgggcggtagttcgcggtttgcggcgggtttcgcgtagtcgtggtttattagcgtgtgggtatcgtcgttgttcgttgggcgttgaggagggtgggcgcggtggcgggttgagggcggcggcggcgagcgtagaaggttgaggcgttcgtttatgcggcggggaagaggcggtagcggtgaggttaggtcgttttttttcgcgtttttcgttttttcgtcgttttcgttttcgagtcgagtttatcgtttgttgtagttaaagtcgcgatgttttgtttgggtttggcgcggttagtcgggttttcgtacggggacgttttttttttttttttcgcgtttttcgtttttttttttgcggggcgcgcgttcgttttcgcgtttttttaggattttcgtttatcgcgcgggcgcgcgtttcgttttcgggggtagtcgtcgggtttgtattttttgtagtttttaaggtttttcggtgttagcgaaagagtttttatgttgtatttcggcgtttcgcgggaatgtttatttagtagagtcggtttacggggagttaggttgtcggttcgggttttaggtttcgttcgtttttggttagcgtttttcgttttcggttcgtttggtcgcgttttagtcgttagggttttcggttcgtgggtcgggagagttttcgtcgcggtttcgcgggcgtcggtattttggtttttatatttttaggtatagttcggggagggtaggcgggtttagtgtttagggagggagtgtaggttaggcgggcgttttgggttagaggtaagtttggcgtcggtattttaggtttttttgagggtcgaggatcgttaaattttggggaggagcgggggtttaaataatttagtttttgttaggatgcgaagttaaagggagtaatgggtgttgatgggtttcgtaaacggagttcgaaggaaatggattgttaaaggcgttcgggttttgttgttttagtgaatagtttatattcgttttcgtagcggagatgtcggttattgggaagaattaaggattaagtttttgattgggattagtagtgatagtttggtttttatttattatataggttttttgttggcggggaaataagaggaaaaatgggaaaggaaatttacgaagtcgaagttgtgtggttagaaagtttagttttatgatttaagtttgtcgtggaagggatgagagtaggatttgtatttagattttttatttaatattttggtattgtttttgtggtagggaatttgtagcgttttagttgttaaattggaaggatatttattttgtaatttgtattttttgtttgatttgggtttagagataatttatatgtattttttttaaatttatttttttaaattattgtggttattttgaatataatttgtttttagaaattttagtaatttaatataatttaattttaggttttaaaaagtttgttttttattgtattatttaaattatttatagaagaggaattattgtttagatagttttttatttatttaaagttagttgataatttaattttaagtaagtgatttgtggttaatattttttattattatttttaattatggggttttttagggtatagagtaggttttagttaatttatatttttagtaattattaaagtgttttgtaaatggtggagatttggtatatatttgttagattgaattttttaaggagtgtttttttgcgttgttatttgttttggagttttaatattttttttttttgagtttaagatgttgttgtgatttttaggatgaggagtgaggaaaaattgagtttattatagaaaatattgtttatttattttataggatttttattttcggtttttttgggtataataggtatttatgtttttttattgtttttttatttttcgttttattttttggttagtgttagataatgtaggtagttatttatgttgtggaatggtaaaattgggtaattacgtaaaatttttttttttataaaattttagaatattggaatgtgatagttattttattattttgcgtatatattttgagttggtgattagagtagtagtataattaattatttatatatttaaattttagaatgagatagattgtttgttgtaatgatagtttatggaaaggtaaagattttatttttaaagattagatgttttatgtatttttatgtttgatttagaaaatgatttatttttttttttgtaggaattagtattgaaattaatattaattaatggtaaggaagattagagtagaggatagttttgtgataaatggttataagttttttttagttgtgaaatgttttttttttataagtgattatttttatttttttttatgtatttgttttgtttggaagattttgattatgtgttttttaggatatatataaagtttttattttgtatttggggtttagagaagtttagtaatttgtttaagtttatatagttagttagtagtagagttgggtttaaaattttggattatttttaaatttagtgtttgttttattgtattatattgtgtaacgtttgtgttgattattgtgagtatttaatatattagatttttaatagtagtttatttgtttttgattgtcgattagtttattttaatttatatttattttaattgaaaattattttttttgacggttcgtttgttgtttatagaaaatgagttggtgggtttattttagttttgttggatagtcgaatttattataataaattaatgttaaaaatggtattttaagaggaaaatatagtatttatttagtatttttaatagagtagtttaaagtgatttgaaaatgttttattaatttttataatatttttgtgggataataataatattattataacgtttaggcgtagaattgtggtaaagttaatagtttttttgagtatgtgtaggatttttttatattttagtttgtaatattagagtttgattaaaatcgttaggtttgtaaatagtaagggtaaataaattttggtgtttggtttttttgtgttgttttaggtatagtttgtgttttttattgattatattaattttagaaatagtttattagttgtttgttagatggtaagtagtatttaggattagtttagaagtgtttgagagtgggataaggtagggttagaggttttgatttataattatagataaatgaatggagaaatagtatttagtaatagtgtaaaagcgtttttatttttttatattttttttagtatttgttgttttttgattttttaatgatcgttattttaattggtatgagatggtattttattgtggttttgatttgtatttttttaatgattagtgatggtgagtttttttttatgtttgttggttgtataaatgtttttttttgagaagtgtttgtttatattttttattcgttttttgatgggattgttttttttttgtaaatttgtttaagttttttgtagattttggatattaattttttgttagatggatagatggtaaaaatttttttttattttgtaggttgtttgtttattttgatgatagttttttttgttgtgtagaagttttttagtttaattaggttttatttgttaattttggtttttgttcgtattgtttttatttatgtagtttttgtttatgtttatgttttaaatggtattgtttaggtttttttttagggtttttatggttttaggttttacgtttaagtttttaatttattttgagttaatttttgtatattgtataaggaaggggtttagttttagttttttgtatatggttagttagtttttttatttattaaataggggagtttttttttattgtttgtttttgtaaggtttgttaaagattagatggttgtagatgtgtggtgttattttttaggttttgttttgttttgttttattggtttatatatttgttttggtattagtattatgtttttttggttattgtagttttgtagtatagtttgaggttaggtagtgtgatgtttttagttttgtttttttgtttagtattgttttggttatatgggattttttttggttttatatgaaatttaaagtagttttttataattttgtgaagaaagttaggggtagtttgatggggatagtattgaatttataaattattttgggtagtatggttatttttacgatattgattttttttatttatgagtatggaatgtaaattagtttagttattgtggacgatagtgtggcgattttttaaggatttagaattagaaatattatttgatttagtaatattattatagggtatatatttaatggattataaattattttattataaagatatatgtatatgtagtttattgtagtattatttacgatagtaaagatttggaattaatttaaatgtttattaatgatagattggataaagaaaatgtggtatatatatattatggaatattatgtagttataaaaaaggatgagtttatgttttttgtagggatatggatgatgttggaaattattatttttagtaaattaatatagggatagaaaattaaatattatatgtttttatttataagtaggaattgaataatgagaatatatggatataaggaggggaatattatatattggggtttgttagggggtgggggagtagggaagggatagtattaggagaaatatgtaatgtagatgatgggttgatgggtgtagtaaattattatggtatatgtatatttatgtaatttgtatgttttgtatatgtattttagaatttaaagtataataataatagaaaaaagagtatttagtatgtgtatagttattgttttagatattgtggggatatgaagtttaaatatagattatgtttttattgggtttatatgttgttgaaaagataggatataaatttatgaaaatttttataatgttatttattaataatatatgataagagtattagaaatgttatttgtgattattttgtttattttagttaagttggatgtttggttg

SEQ ID NO: 1091 - DNA, 8758 bp, Artificial Sequence
  chemically treated genomic DNA (Homo sapiens)
ttttttttttttttttgtttttattttttaatatgtaagtgattagttatttgtttttagtataggtatgtatgttttgtttttgtgttttgttttattttatttttgttatttttattaaataggaaaggaaggttatttttagggttttttttttaaggtgttggattgaggggttagtgagaagggaaggggagggaagggaagaatagttgttttttttattaaagtgtttttgtttttttgggttttttttttttgtagatttatgaggttaatgtatttaggatagaggattaggtgagagatagttttagttttttgttgattaatatattattattaattattgtttgataatttatttttgttatgtattatggaatagtgatgtattatggaattatagattttgtgatatttggtagtaagatttagtttattaaggatttgttaattaagttttttttatttatgtatgtatgtatttatttatttttaaagaaaggtgttttagtatggtttattttgattaagttgttttttttttggtttttgttggtttagtttaagaagttttgagtttttgttttttatttttaatgtttttatgttgagatttgaggtgattatagttttgtttattatatgagtaatatatagatgttttttgtatttatgaattttttgtattataaaggaggaaaattaatgtttgatagaaagattattggtataatttttgtttttttttgtttttttaaatgttttagatgatgaaagatgttggttaaggaatggtggggaggttggagaaaataagttttttttaatttggggttgatagttttttttgtggagaagatataatgttggttttgtttaatttttttttttaatggagggaaaatttggggaagttaggtataggtgtaatgggggtaagttggaataattggtttattagaggaataaaaaagaagttggaaaagtagtttcgagcgtattttttttatttaagttttttggattatgtttgggttttttggtggagttttgttagagttggttagggatgttttagagatgtggtttttttagtagtaattttttttttttttgaaagaaaggagtagagggattttgagtttcgagatttggatagatagattggttagtatttttatttggttggtagggtgtgttagataaggttattgttaggattttgtttttatattgggttttttgtatttatgaattttttgtattatagaggagtaaaattaatgtttgatagaaagattagtggtatattttttgtttttttttgtttttttaaatgttgtttaatggggaaagtttttttttgatttagttgaaaatttagtaggtttttttgttttgtgttatttatataataaatagagttatagttattttaggttttaaatataagaaattaagttatatagtttaaaatatgaaattgttgttttttgtttataaagttgaagtggtttgtgataatgtagtggtatataattcgaataaatggttataagtttttagatggttaggttttatttttataattattttgcgtatttagttaattttagaaattattttttagtttttatttttaggttttttttttttcgttgttttaatagttgaattttttttttttagtttaattgcgtttagtatatatttagtgaaatgtataatatggacgtggtattatgtttggtgttgtgaagaaaattaaagattaataaaaaatgttttttgagtttaaaatatttttttttttttgttagtttttttttttttttttatttatttatttattatttataaatagataaataggtaattagagagtagttagttagaaaggtaggtaggtaaatagatagatagattgatggatagatagatatagtgtggtagatattatttgtagatgcgatagttagatagttagatatatatatgtatatatatatagagataaaaatttatttttatgggaatgtgatttttagataggtgtattagtattatttgggcgttgtgtgaaatgtattttaagttttattttggtttagagtttgtatgttaataagatttttaggtaatggtgtatattaagtattgttataaaagagttaatttcgtaggattagatagtaaagaaggtagtttttagttatataatgtgtgttttgggaagaagatagagatcgaggtaggagtgtaagaggtttattgggagataataaagaaagttaaaagtgataggaagaagaatttattagggaaagtatttagattatgatgttgatttggtatttgtgaaaggaaggaggggaggaagaggggttggatagagttttagagtggaatgtagattttttaaagttttggttaatttgttggggaaatgtagagtaaagattgttattagtggaaatttgtattgagtagaaatggttaggtttttgtaattttgttgtgtttagagggttattttaaaggagtgtggtttttgtattaaagttgaggtagtgttaatagttggagtttgttagttaattgtattttggtagttgaaaagtaaattttttttttaagggagatttgagtagtatatttttatggttattatatgtgatatttgaaggtaattttgttagaaatttataagaattggtaaatgtatgggaaatagatttaaggaaatattatattaaaggaggtttgggttttgtgttttttttggattgtttatgttgtatttttattttttagggaataattttttagaaagtttttgaaagataagttttagagaatttttttttttggggagttcgaggagaatttaggtgaattaatgtagtatttttatatttataagatgtatgaattagtagataagattgttatgggtttttgattttattgtttgtaagtttagtaagttttaggttttttaggaaaaatatttgattttgattggtaattttagagttagagaagaatgaaagtttattggagatgaagtagggatggtatagatatggggaaaggggatgtaaggttttgtggttaattagtgatgtttttatatattgatttttatgtttatatttttttttatttatgtacgtttgtaaagatagttaataatatgtatagttatatagaatgaaaatatttacgtatattaaatttatatttatttttatatataaatttttaaaaagttatatgtatatatattttttaaattttgatttaagtttgtgtgtttatgcgttgttattgtaatatatatttgtgtatttaggattaagtttttaaattatattttttggatagagatatttattgataagaggttttaattttacgtatataaatttgaagtaatatgtagaaataaaaatagataatgaaaatagatatttaaaaatatagttattttatgataatttaaaattaagaaatttttggagattgtgtttggtagttttagatatatattttgaaatagattttttttggttattaatgtttgttaaaattttgtaggggttgagatagggtaggggaagattttttagtgttttaatttagaaagattaatatgttatattagttattattttgttttttgtagtagggaattaaagtttttaggttagatgttggagtgagggagtgtttgtattaggaaaagggattatgtatttttatagaggagtgaaatataggggataagggttaaattttgattgtttgagtttgagttttagtattattagtttttatttgtataagtttgggtgagtttgttaatttttttgtgttttagtttttttatttataaaatggtgatgataatagtatttataaaataggttgttgtaggaatatatagagataatatttgtaaagtgttgagagtgggttggtgtataatgagagttaagtaagtattggttgttattattttatttttgggaatgttttagttttggagattggataatttttttggtttttttttataagttatttttatttttagttttttttatggatttagatgtagttgttcggtttaagatttattaggtaggattagtttttattaggattgtaaaaatcgtttttttttttttttgttgtggtttttgtaaatgggattcgttggagcgggtggaggggttttgttgggttgagattagatagtttattttttgattaggttgtttgtttgggttgttattaggtttgtattggaaataggttagggtatgggaattttgtagggttttaatttttttgtatatttttgtggatttgtaggaagacgggaagagagatgtttttttattgatatatgtattttaaggttcgtaattacgtggttttttttttttttgtaattttttttaaagaaatatcgttatttttttaaaataaaaaggattggtgtttttcgtttttgttttttatatttcgatttagtttaaagtttcgtttttttagtttaaggtatttcgttttttttggagtttattcggtttttagcgggtttttaggtgaattgaaatttagagttatttttatttggttgttttgggaattttagcgttgtcggtataatttgtttttttattttttttatttttttttttttttcgttgggttgtattttttttagtttttttttttttttgttaggggttttagttgcgtttttcggggagatattcgttgttacgagattcgggaggggaagcgggaggagggggagaggaggggaaggcgggggaggcgtcgagggtggaggttaagcgcggcgtagttagagaggggcggttgaaggttgtatttgttggaaggaggtttttcggttgtttggtaacgggttgttagaagagagagaggtagagagtagggtagcggttttttgacgttagggttaagcgaggggatcgcgttagtaattttagttttttttagagaggggtcggtcgatcgttggagcggagtttgacgttaggcgttcgcggagcgtgagtagggggcgcgggagtcggttagttggggcgtagtatgttttttgttttcgcgttatggagatcgttttggtgtttttggagaacggcggtgttatgatcgttagaggaggcgatgaggttcgggtaggttgcggttaggttatagggggagagttttagtgtttttcgacggttgggtttagcgatgggtttaaggagtcggcgttaaaggggcgcggcgcgtagagagacgcggattcgggagtgcggtttttgttttcgttgtcggattcgggagtgcggtttttgttttcgttgttagaggagttgttacggtttcgacggtcgtttttcgaggacgaggaggaagaaggcgatttcggtttgggtacggtggaggattaggttttgggtacggcgtttttgtattattagcgcgtttatattaatattttcgggttgcgttttgagacgtagttgggtattttggcgtagttttttaatatatttttgggggatttcgttaagcgtttgcgttatttcgattttttgaggaacgagtattttttcgatcgtaatcggtttagtttcgacggtattttttattattattagttcgggggtcgtttgcggaggtcggttaacgtttttttggacgtgttcgcggacgagatacgtttttattagttgggggacgaggttatggagcgttttcgcgaggatgagggttttattaaagaagaggagaagtttttgtttcgtaacgagttttagcgttaggtgtggtttattttcgagtattcggagagttttgggttcgcgcgggttatcgttatcgtttcggttttggttatttttatttttattattattttttgtttggagattttgtttgagtttagggatgaacgtgagttgtttcgttatttttcggcgttttattagtttttcgcgttcgtttttggggttaacggtagcggggttatggtttcgttttttggttttacggtggtatcgtttttgtttaggattttggtcgattttttttttatcgtggagattacgtgcgttatttggtttattttcgagttgttcgtgcgttttttcgtttgttttagtaaggtagggttttttcggaatattatgaatattatcgatgtggtggttatttttttttattttattattttgggtatcgaattggtagagtagtagttagggggtggaggaggcggttagaatgggtagtaggttatgtttttggttatttttcgagttattcgtttggttcgggtgtttcgtatttttaagttttttcgttattttaaggggttgtagattttgggtaagattttgtaggtttttatgagggagttggggttgtttattttttttttttttatcggggttatttttttttttagtgtcgtttatttcgtagaggttgataattagggaatttatttttttagtatttttgacgttttttggtgggtagtggttattatgattattgtgggttacggggatatgaggtttattattgttgggggtaagatcgtgggttcgttgtgtgttatcgtcggggtttttattattgttttgtttgtgttcgttatcgtttttaattttaattatttttattatcgggaaacggattacgaggagtcggtagtttttaaggaagagtagggtatttagagttaggggtcggggttggatagaggagtttagcggaaggttagcgggagtaggggatttttttgtaaggttggggggattttggagaatgtagatagtgttcgaaggggtagttgttttttagagaagtgtaacgttaaggttaagagtaacgtggatttgcggaggtttttttatgttttttgtttggatattagtcgggaaatagatttgtgaaaggagatttaggtagattggtggtagtggagtagggaatgggaggtttgttgaatatggatatttatattatatcgtagagtatttgaagttatattgtaattttagtttatttttttttttttattttttttttttttttttcgatttttttattttttttattttttttatgatatttaagggtcgtttatttttaaaaagtattatattttatgacgtaggagttgtggaaatggtgagcgttgtgagatggatgtatttgtagttagttttttatatttagtagagggataatttaaataaaaatgattttaaatagtttagattttaagagattatgtaatttttttatttatgtgttttaaatttgttttatatatgattgtatttgtgtataggggaaaatattatttttatgtttggtaagtggttttttgtattgtagtttagatagagatattttgggtatatttttaagatatatgttgtatttatggaagaaagagttgttttgatgtttttttgtgttatttatattagagttagagattttggtatgggttgttttgttttttgtgtttttaagtttttgttttttttgggatgtggtattggtgttttgtgtttagggtagagtatgtttttgaagaaaggtaaatttgattttttttgtgcgttttaaataatttttgtaattttttttaaaaagtattttaatgatattggaggaatatttttgataatttattgtttttatttttattttaggaaataaaaggttattttgttgaggtaagtgttagtttttttgtagttgatatattttttgaaatttttaaaaatagtttgttattggttgtttttggttttgatattagagtaaacgtattgattggggttagaggaaatttgaaaagtttatgatttgtttggcgacgtttttttagtgtattttttggtgttttatagataatggtgggtgaattttgtttaggttgtttatggtacggacgtttttgtgagatgttttttgaagtagtagtattagtttttatggttagtttggagtagggagggtatttaaaggaaaaaggggattagatttttgatagttttattgggtttttcggtattggtttttatttttttgtttgtaggtttttagttttttttagggtggtttttagtagttttgagaaaagtaagtttgatttttatagatatgaagtagttttggtagttttagtgtgcgagttatagagggatttgtatcggttgtttattgtttttttggtatggtagaggagtacgtaatgtttttatggtaatagtaatagtgagaggttaaatggaaggatttgtttgtttatattaagagttgttttttgtagattgtggttttgtttttaagtaatttttaaatttagaataaatttttttgtttttttgttattggaaggttgcggtaaaatattgtagttggtataatattagttagtatttttttttgggattagttatttgttgataggaattcggagttttacggatttttgttgttgttttttttgttgaatgatttaaagttggggttgttttatatttttattagggtgggttggtgggttggaattatattttttttaggataatagtgggttttacggttagtttttagggtgtggttaggtttttttgtgggtgagaggagatttataagttaatgtttgggaattgtgggtttaaataaaatg

SEQ ID NO: 1092 - DNA, 8758 bp, Artificial Sequence
  chemically treated genomic DNA (Homo sapiens)
tattttatttaaatttataatttttaggtattgatttatagatttttttttatttatagggagatttgattatattttgagaattagtcgtgaagtttattgttgttttgggggaggtgtgattttagtttattagtttattttggtgaggatgtaaaatagttttagttttggattatttagtagaaaaagtaatagtaggaattcgtggggtttcggatttttattagtagatagttaattttagagagaaatgttagttagtgttatgttaattgtaatgttttgtcgtagttttttagtgataagggaataaggagatttgttttgagtttagggattatttgggggtaaggttataatttgtagaaaatagtttttaatgtgaataagtaaatttttttatttggttttttattgttgttgttgttataaagatattacgtgtttttttgttatgttaagagggtagtgaataatcggtgtaggtttttttgtgattcgtatattggggttgttaggattgttttatgtttgtgagaattaggtttgttttttttagagttgttgagagttattttgaggagggttgaaaatttgtaaataaaggaatgaaagttagtgtcgggagatttaataagattgttaggggtttgatttttttttttttttaagtgttttttttattttaggttgattataagggttgatattattgttttagagagtattttataggggcgttcgtgttataaatagtttggataaaatttatttattattgtttatgaggtattaaggggtgtattgaaaagacgtcgttaagtaaattatgagttttttagattttttttaattttagttaatgcgtttgttttgatgttaaaattagaaatagttagtgatagattatttttaaaaattttagaaaatgtattagttgtagaaaaattaatatttgttttaataaggtaattttttattttttgggataaaaataaagataataaattattagaagtatttttttaatattattaaaatgttttttgaagaaagttataagaattgtttaaggcgtatagaaaaagttagatttgtttttttttaagaatatattttgttttagatataaagtattaatattatattttagaaaagatagaggtttggagatataggaaatagaatagtttatattaagatttttgattttaatataagtaatatagaaaaatattaggataatttttttttttataaatataatatgtattttgaaaatatatttaaaatatttttatttgaattatagtataaaaagttatttattaggtataaaaataatatttttttttatatataaatataattatatgtaaagtaaatttggaatatatggatggaggagttatataattttttgggatttgggttatttagagttatttttgtttgggttatttttttgttgggtataggagattggttataaatatatttattttatagcgtttattatttttatagtttttgcgttatggaatgtggtattttttaaaaataggcgatttttgggtgttatggaaagaatagagaaaatggggggatcgagggagggaggaaaggagtgaaaggagaggggtagattgaggttatagtgtgattttaaatattttgcggtataatgtagatatttatgtttagtaagttttttattttttattttattgttattagtttgtttgaatttttttttataaatttgtttttcggttggtgtttaggtagagggtataaagggattttcgtaagtttacgttgtttttggttttgacgttatatttttttagggggtagttgttttttcgggtattgtttgtattttttagggtttttttagttttgtagaaggattttttgttttcgttgatttttcgttggatttttttgtttagtttcggtttttggttttgagtgttttgtttttttttaaggattgtcggtttttcgtgattcgtttttcggtggtagaagtagttgaagttggagacgatgacgggtataggtagggtaatggtgaggatttcggcgatggtatatagcgagtttacgattttgtttttaatagtgatgggttttatgttttcgtagtttatagtggttatggtgattattgtttattagaaggcgttagggatgttagagaaatgggttttttggttgttagtttttgcgaagtagacggtattggagaagaggatgatttcgatgaagaggaagaagatgagtagttttagtttttttatggaggtttgtaaggttttgtttaggatttgtagttttttggagtggcgggagagtttgaagatgcggaatattcggattaggcggatgattcggaggatggttagggatatggtttgttgtttattttggtcgttttttttattttttggttgttgttttgttagttcggtgtttagggtgatgaagtaggggaagatggttattatatcgatgatgtttatgatgtttcgggagaattttgttttgttggggtaggcgaagaagcgtacgagtagttcgaaggtgaattagatgacgtacgtggtttttacgatgaagaaggggtcggttagggttttgggtaggagcggtgttatcgtagggttagagggcggggttatgatttcgttgtcgttggttttaggggcgggcgcgggaggttggtggggcgtcggagggtggcggagtagtttacgtttatttttgaatttaggtagggtttttaagtagaaggtgatgatggagatgaggataattaagatcgagacgatggcgatggttcgcgcggatttagagtttttcggatattcgaagataagttatatttggcgttggaattcgttgcggggtaggggtttttttttttttttaatgaagtttttattttcgcggaagcgttttatggtttcgttttttagttggtagaagcgtatttcgttcgcgaatacgtttagggagacgttgatcggttttcgtaggcggttttcggattggtagtagtagaggatatcgtcgaagttgggtcggttgcggtcgaagaagtattcgttttttagggggtcgaagtagcgtaggcgtttggcggggttttttaggagtgtgttggggaattgcgttagggtgtttagttgcgttttaaagcgtagttcggagatgttgatgtggacgcgttggtggtgtagggacgtcgtgtttagagtttggttttttatcgtgtttaggtcgggatcgtttttttttttttcgttttcgggaggcggtcgtcgaggtcgtggtagtttttttggtagcggaggtaagggtcgtattttcgggttcggtagcggaggtaagggtcgtattttcgagttcgcgtttttttgcgcgtcgcgtttttttggcgtcggttttttgggtttatcgttgagtttagtcgtcgggggatattggagttttttttttgtggtttggtcgtagtttgttcgggttttatcgttttttttgacggttatggtatcgtcgttttttaggggtattagggcgatttttatggcgcgggagtagagggtatgttgcgttttagttgatcggttttcgcgttttttatttacgtttcgcgggcgtttggcgttaggtttcgttttagcggtcggtcggtttttttttggggagagttggggttgttggcgcgattttttcgtttggttttgacgttaagaagtcgttgttttgttttttgttttttttttttttggtagttcgttattaagtagtcgaaaagtttttttttagtagatgtaatttttagtcgtttttttttggttgcgtcgcgtttggtttttattttcggcgtttttttcgtttttttttttttttttttttttttcgttttttttttcgggtttcgtggtagcgggtgttttttcggagggcgtagttggggtttttagtaagggaaaggaggggttgagaagggtgtagtttagcggagggagggaaggagtggggaggatggaggaataggttgtatcgatagcgttgaaatttttagggtaattagatgagaatagttttggattttagtttatttgggaattcgttggaagtcgagtggattttaggaggaacgaagtgttttgggttaaagggacgaggttttgagttgagtcggagtatgagagatagagacgggagatattagttttttttattttggagaaataacggtatttttttgggaaggattatagaagggaggggggttacgtagttacggattttgaaatatatgtattaatggagaagtattttttttttcgtttttttatagatttataaaaatgtataagggggttggaattttgtaggatttttatgttttagtttgtttttagtatagatttggtggtagtttaggtaagtagtttagttaggagatgagttgtttggttttaatttagtagaatttttttattcgttttaacgaattttatttgtaaaaattatagtagggaaggggagaagcgatttttataattttggtgagggttaattttgtttggtgaattttggatcgagtaattgtatttaggtttatgaaggagattgagggtggaggtggtttatgagagggagttagggaggttgtttaatttttaaggttggagtatttttaagaatggaataataataattaatatttatttggtttttattatgtattagtttatttttagtattttataaatattgtttttgtgtatttttatagtaatttattttgtaagtattattattattattattttataaatgaagaaattgaggtatagagagattgatagatttatttaggtttatgtaggtggaaattgatgatgttggaatttaaatttaaataattagagtttggtttttgttttttatattttatttttttatagaaatgtataatttttttttttgatataagtatttttttattttaatatttggtttgagaattttagttttttgttgtagaaggtaggatgatggttgatataatatattaatttttttaggttgggatattaggaaatttttttttgttttgttttaatttttgtagggttttagtaggtattggtaattaagaggaatttgttttaaggtgtgtgtttggaattgttagatatagtttttagaagttttttggttttaaattattataaagtggttgtgtttttgaatgtttgtttttattgtttatttttgtttttgtatattgttttagatttatatgcgtgaagttaggattttttgttaatgaatgtttttatttaaagggtgtgatttggaaatttggttttgggtgtataagtgtgtgttgtaatagtagcgtatagatatataaatttgggttaaggtttgagaagtatgtgtgtatatggttttttaagagtttatatgtgaaggtggatgtgaatttggtgtgcgtaagtatttttattttgtgtgattgtgtatattgttggttgtttttgtagacgtgtatgagtgaggaagggtatgaatatgaaaattagtatgtgaaggtattattggttaattatagggttttgtattttttttttttatatttgtgttatttttgttttatttttagtgggtttttatttttttttggttttgaggttgttagttaggattaggtattttttttggggagtttgggatttattgagtttgtagatagtgaggttagagatttatgatagttttgtttattgatttatgtattttgtaaatataaggatgttatattggtttatttgggtttttttcgggttttttagaggaaagaattttttggagtttgttttttaggggttttttgggagattgttttttgaagaataagagtataatataaatagtttaggaaaagtataaaatttaggttttttttaatgtggtatttttttaaatttgttttttatgtatttgttagtttttataggtttttggtaaaattatttttagatgttatatgtggtagttatggaggtatattgtttaaattttttttaaagaaagaatttgttttttaattgttagagtgtagttagttgataggttttagttgttggtattgttttagttttagtgtaggggttatatttttttggggtagttttttgagtatagtagggttataaagatttggttatttttatttagtgtagatttttattaatggtaatttttgttttgtatttttttagtagattggttaagattttgaaagatttatattttattttgagattttgtttaattttttttttttttttttttttttttataagtgttagattagtattataatttgaatgttttttttaatgaatttttttttttattatttttaattttttttattattttttagtaaattttttatatttttatttcgatttttgttttttttttagagtatatattgtataattgaaagttgttttttttattatttaattttacgaggttaatttttttatagtagtgtttaatgtgtattattgtttgaggattttgttaatatgtagattttgaattagggtagggtttagagtgtattttatatagcgtttaggtgatattgatgtatttgtttagagattatatttttataagaatagatttttatttttgtgtatgtatgtatgtatgtatttagttatttagttatcgtatttgtaaatggtatttattatattatatttgtttatttattaatttatttatttatttatttatttatttttttagttagttattttttagttatttatttatttatttataaatgataggtaggtagatgagagagagggagagagttaatagagagagagagatattttgaatttaaggaatattttttattgatttttgattttttttataatattaaatatggtgttacgtttatattatgtattttattaaatatgtattgaacgtaattgaattaggggaaggaaatttagttgttggagtagcgagggaggggaaatttgggaataggaattgaaaggtggtttttgagattagttaagtacgtaaagtggttgtagagatgggatttaattatttgaagatttataattatttgttcgggttatatattattgtattattatagattattttaattttgtgggtaaaaagtaataattttatattttggattgtatggtttaattttttgtgtttgagatttgaggtgattatagttttgtttattatatgagtaatataaaataaggagatttgttggatttttaattaggttagggaaaaattttttttattggatagtatttaaagggatagagggaggtagaaaatatgttattagtttttttgttagatattgattttatttttttgtggtgtagggagtttatagatgtaggaagtttaatgtgaggataggattttagtagtggttttgtttgatatattttgttagttaggtaaaaatattagttagtttgtttgtttaagtttcggggtttaggatttttttgttttttttttttaagaggaagagaggttgttgttgaaaagattatatttttaaagtatttttagttagttttggtagggttttattaggaaatttaggtatggtttagagagtttgagtaagagaagtgcgttcggagttgtttttttagttttttttttatttttttggtaaattagttattttaatttatttttattatatttgtgtttgatttttttaagttttttttttattaaaaaagaaaattgagtaaaattagtattgtattttttttataagggaggttgttagttttagattagagaaaatttgttttttttaatttttttattattttttggttagtattttttattatttaaagtatttaaagggatagagggaggtaaaaattatgttagtagtttttttgttagatattgattttttttttttgtggtgtagggggtttatagatataggaagtatttatgtgttatttatataataaatagagttatagttattttaggttttaatatggaggtattggaagtgggaaataagggtttaggattttttaggttggattagtaagagttaaagagaagatagtttggttaaaataaattatattaaggtatttttttttaaaaataaataaatatatatatatataaataaggagaatttgattaataggtttttggtagattgggttttattgttaaatattatagagtttgtaattttatggtatattattattttataatgtatggtaaagatggattgttaagtaataattggtaatagtgtattaattagtaaaagattgaagttgttttttatttaattttttattttggatgtattagttttatagatttgtagaaaaaaaaaatttaaaaaaataaaaatattttaatgaaggaggtagttgttttttttttttttttttttttttttttattggttttttaatttaatattttgggaaggaagttttggaaatgattttttttttttgtttgatgggagtgataaagatggagtaaaataaaatataaaaataaaatatgtatgtttgtgttggggataggtggttggttatttgtatgttaagagatggaagtaggagggggagggggg

SEQ ID NO: 1093 - DNA, 6408 bp, Artificial Sequence
  chemically treated genomic DNA (Homo sapiens)
atattgttaaatttattttgagattcgttatataaaaatattatggcgatttagtttagtaggtattgggggtgtggaggatatttagtaaaagtaatgtaataaattatatgtgaagttttaaaaaaattttttaaaaatatagggttgttatttgaaaggtagttaattagttggatttaagttttgataggagaattgtaattgaaggtattagcgtgtgtgagattggggatagttgaggttatattgaagattggagagtttttttttgtaatttttttttagattgtattagaggtaaataaggttaaaaaagaaaatgtaaaaaataaataagatttgaaaaatagttagtgagattatatttttatatttttgtaaaatttttttaggtattttgtagtataaaaggttattggttatttttttagggttttatattatagtttagtggtttttaattttggttataaattaggattatttgggaggtttttaaaaagtttttgagttaggtaggaatttagattaaagatattaaaatttttaggggtgagatttaggaattattattttttaaaagttttttcggtgattttaatagattattaagtagggtttttagattagtagtattagtattacgtgggaatgtgttaggaatgtagatttttaggttcgttttagttttattaaattagaaattttgaaaatagagtttagtaatttgtatttttttttgagatagagtttcgttgtgttatttaggtaggagtgtaatggtataattttggtttattgtaatttttattttttgggtttaagtgatttttttgttttagttttttaaatagttgggaatataggtgttcgttattacgtttgttttatttttgtatttttagtagagacggggttttagtatgttggttaggttggtgttaaatttttgatattaagtgatttatttgttttggttttttaaagtgttgggattataggagtaatttgtattttaataaggttattttaaagtattttaaagaataaggttgaggatggtttgggtttgggaggtttttaaagtagatgtttttggttgtttttttggatataagaaagtttatttggatttaagtaataagtttttttagtgaatttattattatgaattaattgtagatgtaatttttaatttgttgtatggatttattagttttaaattaattaatttgtggatttttaaatgtcgtttgttataattttatttttatatggttatgaagttggaaagattttttaatagtgattggtggtagaattatttgttaattgtgattattttgggtttttggaaattatattatagtattaggtttaggtttgtttgttttttggggtagggttttatgtatttataagtggtttcgggttatttaaaaagaaatggttgagcgttgagtttggatttgttattaaataatttttgtttatttcgatggttagaatggggttaaatgttagttttgtataagaataaggatttgaattttttgagtttaggtagtttaatttttgatagatttttgtatagatttaaaagtttagaaattaggaaaggttataaataatttttgatttttatttatgtttgatttttttataacgtagagaagatagttgttatggttagttataggaaagttaagtttaaatttttaaagttttaaatttttgggtagtaattttttaatgaggtagaaaaattaataaatttttatttaggattattgagtgtgtatttgttatgtgttatatgttgttagttattttatatatttgtttagtgatttaatagttcgtaaatgttagtggtgtttttcgttattttggaaagaaaaaaaaaaaaaatttgattgaataattttaaggaaattgtttaggattatgtggttaggaagtagtaaagttagaatttaaatttgtggcggtagtggaattttaaaatttgagttttttttgttttttatttttgttttttgagattgtggtttagggtgggagatgattgtttttttggaaaagggagttagttagagtttcggagatagtttattggtatttgtttattggagtaagtaggttataaagagttaagttttattggttaaaaggtattaagttttggtggtatttattcgataaatatttatgggtagtttttgtgtggttgcgtgtttagtattaggttggatggtagggtagggatgggataaggggtttggagattttgattatgatgaggttagtaggggttatggtgtgtatagtgttgatttagttttatgtattagagtaggtttcgggaaggaggtgagagttgggttgaattttaagtatgagtaggtattgttgagaagttttatgggttaagaagaaggcgtagtttgagttggagacgtataatgtgtagaggtttcggggttagtagggattatggagtatagggtttgggtatagtggtaatagtggaattggagagggatgtatagatttttaaatttagggtttgtatttatgtagaagattaggagttttattttgaaggtagggaggagttaaggaaggtttttaagatgggaattgttatgatgagattgtagttattagtgagagtgatgtagattttggagtgagtggtgttgttatttagtttaatgaggtaggggttagtttttgataggatagggtggagtgttaattttaaggagtttggggatggttaaagggaattatttttttagtaggttattggacgtatggttttggagtttaaagagagttttgggttatggttatgtaggtgagtttggagtaggtgtagttattttgggagagaggagagtaggaagagaagagagtaggtaatagaattttgagatatagttagagtttagagatgggtagaggaagaggggtttcggaaaggtgttagatgtttttagttggtgttgggtttagggtatgttttataattaaattaatttaatgaagaaatagttttgggtttaagttggagaggagttaggtttttgaggttatttgttttatataagatgatgtgtaatgttatagtttttattttggttgggaaagatagcgtcgtttcggtaagtgttggaatttgtttttttatagcgattttggttataaattgtttttttaaatatattttttatttgtagttataatagttttttcgaggttatgttttattttaggttatgttttatttagttattttaagtttttaagaagtgagtaggggataagtagggtggtttatgtttgtaattttagtaatttggggggtcgaggtgggcggattttgtaagtttaggagtttaagattagtttcggtaatatagggtaattttatttttgtaaaaaatacgaaaattagttagttatggtggtgtatatttatagttttatttattttggagggtagggtaggaggattatttgagtttaggaggttgaggttgtagtgagttaagattgtgttattgtattttagtttgagtgataagagtgagattttgttttaataaaatagaaaaagaaagaattgagtgggagtatttacgtgtgataagtttttagtggttttttttggtttgagtttggaatgtgatattaataatttggtttcggagtttttgttttttagtaggaattgggggtagaggttggtatttgtttaaatttaaataaataaataaataaataaataaaaataagatttgtttttttttagtttattaatgattttaaggttatttagatggggtttttatagtaaattaaatttttgatagaattttatagttatttggagataatttttttaatttttaggtttattttgagtatatagggatagtgatattaagattaaacgatagggaaaatgttattttttgtatagttagagagtagtgaatggaaataaaaggtaatttatgtattattgtttaattaagagagggtattgtgtagatttaagacggtatatattatggattagggagtatgtgagtttattttttttatttgaggttttaagattgtgtacgtgtgtgtgtttgtgtgtgggtagggagggaaaaatatagtataagttataatattggttttttcgaggggagttttttgtgaaatttttttagatattttgaagtttattacgtgatagtatagattttttatttagatgaatgtaattgtttatagagagatgttttgtggtgaaatagattattaattgtacgttgtttttaagggtaattagtttgattagttttgtataagttgttaggaattagttgtatgagatgcgtgattttttttaggtttataggaggttaaggatggggatatttgttttttttttgtttatggagttagtagttatagtagtgtttatttttgggggagaaggtagagaaaagaagtgggtgtttattatgggttgtatataaatattggaagtaagggaatgtatatatttagtatcgtaagtgagttataaaagtatagttatgaggaaaaagaaggagattgaatgagttggatgatttgatattatttaggtaaattaaaatgtatatatgtaattttatacgttataatatgtagtaatgtatattaaagaagtttattttgatggttatttataggggtggagattggagtggtggatggaaatagaagggaattaatgtatttatttatttattaagagaaggtattgtatagatttaagatggtatatgttatggtttgtggagtgttagtttattttttttatttgagattttaaaattgtatacgtgtgtgtgcgtacgtgtgggttttggttaatacgtattttttgatttggggttgtattttttttttaagaggtgtgtttgggaagtttgagttgtagtagtggaattttaatgtttaggatgattttgtttaatattatagcggtgacgttttttttgattaagttgtggtaggagatagtttagtagggtggtaatatgtcgggtttggttcgtaggttttttcgtagtagtgacggtaagttggaggttttttacgtttttatggtattgggatttttcggtttttttattttgggtattatgttgagttatattcgttttaagaagttggagtattcgaacgatttatttaacgtttatatcgagttcgatgtttggtaagagaaggataaggtttatgtttaggttcgggttttggagagttataggtcgtgttatgtcgttgaaaattatttggttatagaataatttaatatatatttttttgagacgaagttttttttatgaattttattattggttaaaattggatatattttgtttggtaatttgattttttaattatattttttttatattttttattgtgatggatattattggatttttttttggttgttgtaaggggtgaggggtggattaatgatattgttttattgtttttttaaaattacgtttttttgtgatagattgttagtggtttttttatatttgtttttgttttgttaaatttagtagaatttttgaggatatggtttttgagaatagtagttgtattttttagatttttttgtagttagtaaggttgtgtgattaagttttggttagtaggtatggaagtgaagattgtaatgtttaagtaatttttggaaagaaaagaacgtgtttttaattaattttgttttgttttttagtggttggatgtggaggaggtggagagtagttatgagattgggaaagaacggggtatttaaagagttatatatatttgggtttgggcgacgtggattttttttattatttattaggttagatttataggagagagaaatttattttatttttttttaagttattgttattttgatttttgttaaggtcgtagaattaatgtttttattgatatatttattttataggattgaatttaaaggtatgatatttttatatttgttataagtatatattgattttgtttttgttatttttgtgtttatttttgtggttttattttttttttgttttttcgttttttattttttttttgtatttattttgtatatatttttttgaaaatatataggtatatatatttatatatatagatatatatatatattttaatttagaaagaatttgttttgtatagggttgagatggaggagaaaaaaatgttttttttagaatgtatattaaggggaaggtgttcggttattgtgggagtagggaaaggtgtttttatttttcgagagttaggggaaggagtggttttgggtagagagggata

SEQ ID NO: 1094 - DNA, 6408 bp, Artificial Sequence
  chemically treated genomic DNA (Homo sapiens)
tgtttttttttgtttagagttatttttttttttggttttcggggagtgggggtatttttttttgtttttatagtgatcgagtattttttttttggtatgtattttgaagggggtattttttttttttttattttagttttgtataaagtaagttttttttagattgaggtgtgtatgtgtgtttatgtatatgagtgtatgtgtttgtgtgtttttagggagatgtgtgtaggatgggtgtaagggaggagtggaaggcggaagggtaggaggaggatagagttataagagtgagtatagaagtgataagggtagaattagtgtgtgtttgtgataagtatggaaatgttatgtttttaggtttagttttataaggtaggtgtattagtaagggtattgattttgcgattttaatagagattagaataatagtggtttaaggaagagtggagtggattttttttttttgtaaatttggtttggtgggtggtaaggaggatttacgtcgtttaggtttagatgtgtgtggttttttgagtgtttcgtttttttttagttttataattgttttttattttttttatatttagttattgggaagtaggataaagttagttaagggtacgtttttttttttttaaggattatttggatattatagtttttatttttatgtttattggttagggtttagttatataattttgttagttgtaagggagtttgggaaatgtagttgttatttttagaggttatgtttttagggattttgttaaatttagtaaggtagggatagatatgggggaattattgatagtttattataaaagaacgtgattttagagaaatagtgaaatagtgttattaatttattttttattttttataatagttaaaaagaaatttagtggtatttattataataaagagtatgagaggaatgtgattagaaaattaggttgttaggtaggatgtgtttagttttagttagtggtggggtttatggggaaggtttcgttttaggaaggtgtgtgttgggttgttttatggttagatggtttttaacgatatagtacgatttgtagttttttaggattcgggtttggatataggttttgttttttttttgttaggtatcggattcgatgtagacgttgaatgggtcgttcgagtgttttagttttttggagcggatgtagtttagtatgatgtttagggtgaagaagtcgaagaattttagtattatgaggacgtagagggtttttagtttgtcgttattgttgcggggggatttgcgggttaggttcgatatgttgttattttgttgaattgttttttgttatagtttggttagaaagggcgttatcgttgtggtgttagataggattattttgggtattaaggttttattgttgtagtttaaattttttaggtatattttttaaaggaaaaatgtaattttaaattaaaaagtacgtattggttaaaatttatacgtacgtatatatacgtatataattttaaaattttaggtgagaggggtgagttgatattttataggttatggtatgtgttattttgggtttgtgtaatgtttttttttgatagatgaatggatatattgatttttttttatttttatttattattttaatttttatttttataggtgattattagaatgagtttttttaatatgtattgttgtatattgtggcgtatggggttgtatgtgtgtattttggtttatttaaatggtattaggttatttaatttatttagtttttttttttttttttatgattgtgtttttgtggtttatttgcggtgttgggtgtgtgtatttttttgtttttaatgtttgtatataatttatggtgaatatttattttttttttttgtttttttttttagagatggatattgttgtggttgttgattttataaataagggggagataaatatttttatttttgattttttatggatttaaaaaaaattacgtattttatataattagtttttggtagtttatgtaagattagttagattggttgtttttggaagtaacgtgtaattggtggtttgttttattatagagtatttttttatgaatagttatatttatttgaatgaaaaatttatgttgttacgtggtggattttagaatgtttagggagattttatagagagtttttttcgaagaggttagtgttgtagtttgtgttatgtttttttttttttgtttatatataggtatatatacgtatataattttaaaattttaggtgagaggggtgagtttatatgttttttagtttatggtatgtgtcgttttgggtttatataatgtttttttttgattgagtaatggtatatggattgttttttatttttatttattattttttggttatgtagaaagtgatattttttttatcgtttaattttgatattattgtttttgtatatttagagtgggtttgggaattggaaaaattgtttttaagtagttgtaagattttgttaggggtttggtttgttgtggaaattttatttaggtgattttgagattattggtaagttgaaaaaaaataggttttgtttttatttatttatttatttatttatttaggtttgagtaaatgttagtttttatttttagtttttgttgggaaataaaagtttcgaggttaagttgttgatgttatattttaaatttaagttagagggggttattgggagtttattatacgtaagtgtttttatttagttttttttttttttgttttattgagatagggttttatttttgttatttaggttggagtatagtggtataattttggtttattgtagttttaattttttggatttaggtgatttttttattttattttttagagtagatgggattataggtatgtattattatgattggttaattttcgtattttttgtagaggtgaggttgttttatgttgtcgaggttggttttgaatttttgggtttataggattcgtttatttcggttttttaaattgttgggattataggtatgagttattttgtttgttttttgtttattttttaggagtttaaagtagttgagtagaatatggtttggagtagaatatggtttcggggggattgttgtaattataggtgaaggatgtatttgggaagatagtttatggttagaatcgttatggaaagataaattttaatatttgtcgggacggcgttgttttttttagttaggatggggattgtgatattgtatattattttgtgtaggataaataattttagaaatttagtttttttttagtttagatttagagttatttttttattgaattggtttaattgtaaaatatattttgaatttagtattagttgaagatatttggtattttttcgaggtttttttttttttatttatttttgaattttggttgtgttttagagttttgttatttgtttttttttttttttattttttttttttttagggtgattgtatttgttttaggtttatttgtatggttatgatttagggttttttttaagttttagagttatgcgtttagtgatttgttaaggagatggttttttttggttatttttaggttttttaaagttaatattttattttgttttgttagagattggtttttgttttattgagttgagtggtaatattatttattttaaaatttgtattatttttattgatgattgtaattttattatggtagtttttattttgaaggttttttttggtttttttttgtttttagggtgaaatttttggttttttgtatggatataggttttaaatttgagagtttatgtatttttttttaattttattgttgttattgtgtttagattttatgttttatggtttttgttggtttcggagtttttatatattgtgcgtttttagtttagattgcgttttttttttggtttatgaaattttttagtaatgtttatttatgtttaaaatttagtttagtttttatttttttttcgaagtttgttttgatatatggggttggattagtattgtgtatattatgatttttgttaattttattatggttaggatttttaggttttttattttatttttgttttgttatttagtttggtgttgggtacgtaattatataggagttgtttatgaatgtttatcgaatagatgttattagaatttaatattttttgattagtggggtttgattttttataatttgtttattttaatgaatagatgttaatgagttgttttcgaagttttaattgatttttttttttagaagggtagttattttttattttgaattatagttttagaaggtaggagtgaggagtagaaagagtttagattttgggattttattgtcgttataggtttggattttagttttgttattttttggttatatgattttggatagtttttttagaattgtttagttaagttttttttttttttttttttaaagtagcgagaaatattattgatatttgcgggttgttgaattattgagtaggtgtgtagagtggttgatagtatgtggtatatggtaggtgtatatttagtggttttgggtaggagtttattggtttttttattttattaagaaattgttgtttaaggatttggggttttgggggtttaggtttggtttttttgtggttgattatggtagttgttttttttacgttgtggagagattagatatgaatgagaattaaagattgtttgtggttttttttggtttttaggtttttgagtttgtgtagagatttgttaggggttaagttgtttgggtttaagagatttaggtttttgtttttgtataaaattagtatttagttttattttaattatcggggtaggtaggaattgtttggtaatagatttaaatttaacgtttaattatttttttttaaatgattcgaaattatttatgaatgtataaaattttgttttagaaaatagatagatttggatttgatattatgatgtaatttttaaaaatttagaatgattataattggtaaataattttgttattaattattgttagagagtttttttaattttatgattatgtgaaggtagaattatggtaggcgatatttgaagatttataagttaattggtttaaaattgataaatttatatagtaaattaagagttatatttgtaattaatttataatagtgagtttattgagaaggtttgttatttagatttagatggatttttttatgtttaaagaagtaattaaaaatatttgttttgaaaattttttaagtttaaattatttttagttttgttttttagaatgttttagaatgattttgttaaaatgtagattgtttttgtaattttagtattttgggaggttaaagtaggtggattatttgatgttaggagtttgatattagtttggttaatatattgaaatttcgtttttattaaaaatataaaaataagataggcgtggtggcgggtatttgtatttttagttatttgggaggttgaggtaggagaattatttgaatttaggaggtggaggttgtagtgagttaagattgtgttattgtatttttgtttgggtgatatagcgagattttgttttaaaaaaaaatgtagattgttgggttttatttttagagtttttgatttggtagaattggagcgggtttgggaatttgtatttttaatatatttttacgtggtgttaatattgttggtttggaggttttgtttggtgatttattggaattatcgggggagtttttagaaaataatggtttttggattttatttttagagattttaatgtttttggtttgggtttttgtttgatttagagattttttagaaattttttaaatgattttaatttgtagttaagattgagaattattgggttgtggtgtgggattttaggaaaatgattaatggttttttgtgttgtagggtatttggaagaattttgtaaaaatatagaaatatgattttattgattgttttttaaattttgtttgttttttatatttttttttttggttttgtttgtttttgatatagtttgaaaagaaattgtagaaagaaattttttagtttttagtgtaattttagttgtttttagttttatatacgttggtgtttttaattataatttttttgttagagtttaagtttagttaattaattgttttttaaatgataattttatatttttaaagaatttttttaaaattttatatgtaatttattgtattgtttttgttaaatgttttttatatttttaatgtttgttaggttgggtcgttatggtatttttgtgtaacgagttttaaaatgagtttggtaatgt

SEQ ID NO: 1095 - DNA, 7690 bp, Artificial Sequence
  chemically treated genomic DNA (Homo sapiens)
ataatatttttaaggttgaaataagaggaaaaatagagtagatttgggatattagggaggaaagcggagggaaacggtttaagggtaagggttagggtagaggttgtaacgggaaattttgacgtttaggagggtaggaatatataggaagggagattgatatgtgtgaggaatatgatttcgaaggaatcggttattagtagtttttatgttatttgaaaatatcgtttttggaatttcgtatcgcgtttattaagattttgttttttttatggtagggtttttttaggagtatatcggtttgtcgtttatttggatttaggttttagggaggattttttttgttttttatagttcggtttttgtttttgttgggaaattatttttgattggtagagtttttgttttgtagtgaaattatagggatttgaattttatgttgagaattaagtataggttttaggtttagggtaggtttttgaggaagaatgaggtgggtttttaagggttgtcggggtagagtattttgattttgaggacgttagtgttttttataggataggagggagttttgattttaaggatattagcgttttttataggatagaagggagttttgtttcggatttttaggtagtgggagtttatgttgttggtttgtatggttaggtttagagtagagtgaaggaagattttatagttggttgatttttatttttataataatttaattaatgaaagttttattagtataatgttagttttgtatggaaaaggtaagggttagttattttttttgttatgtttttaaacgttagtttcgtgtttagaatagagttgttgtttggtaaaaatttaatttagtgatttatttttttaagatagttatagtgttttgggtgttggagatttagtagttagaaaggtaggatattgtaatgggaagatgatgttttggtcggtgataagttagatgtagagatattaataagttttttttaggtagtttttcgtgttgtgaaagaattagtgtgattgagggttgagaggaggggtgtggttaggttgttttggatatatgtttaaaaaataaattatcgttatttacgataataaagatagggaattaatttagttgttttttaatggtgaattggttacggaaaatgtgtatatatatattatggaatattatatagttataaaaagaacgagattacgtgttttgtagtaatatggatgtagttgtagtttattattttaagtgaattaacgtaggaatagaaaattaaatatcgtatgtttttatttataagtgggaggtaaatgttgagtatatatgggtataaagatgggaataatagatattggggaatttaagagggggaaggaagagaagaagcggggaagggttaaaaaattaaatattgggtattatgtatattcgttatttgaatgattatattaatcgtattttaaattttagtattatacgatatgtttatgtaataaatttgtatatggattttttgaatcgaaaagaaaagttgaaattattaaagataaatgaataaattaattagtgttgatagatttatttattaggtttaggggattattgttttttaggatggtatttttgggttgggttttatagggtttattgtttttgggtggtatttatagtaatgtttttaaaggttattgatatttaaaatatttgaaatattttgggttagttaggatttttttttttaagggttaggggaggataattgattttttagtattaaggaaaggtttatgtgtagaggggtttaaattatgttgggattttaggtggatgtttttgtgtttatttggtatgtgttttatatttatttagagatatgtgcgtacgttgagtatataattattttattataaatggatattatatgagttttggtgtgaggttatttggatagtttttagtaagatggtaatttagattattagatggcgatggtaagttttgggaatatatatttaaatttttttttttaataatttaaagttaatttatatatttattttaaggtaagttatttttataatttgtggtttattagttgtgattttgggtgaattatttttttataagaattttaggtttttttttcgtgaaatggtttaataatttgttgggagagttgagagatttaatggattaatgcgtgaggggtttgttggagagcgaagttgaataaatttatgtgaatagttttttatggagtgatatagagcgatgaagtaacgtttagcgttttataggtttgggttggtaggtgtagttttttttattttatataattttgtgtgtgcggggttaaggatagagtttagagtagaagtttaggttgtattgtagggcggtttatgtagattttttttgtaatggggttttcgtttttagtgttttgtgggatttcgaagtattagttattattgttgtttttgcgtttttgttttgtgtatttgttaatgggtgagatagaagttttattattaaatttggtttttttagttttttaaaattgttatagaacgttatattttgttttatttattatatttttttttttttagaaacgttaaaattaaggaaataaagttttttatatattatttttagtttttaaatttgattaaaggataattattaagaaagaattgagtttgaagggtaaggattgtaaggagagttttatttattttttgaaatgattagattgttagttttattttattaatatttttgtaggtttaatattggggagtatacgttagtgattttttttagtttttttttatttaattcgtttttttgttgtttttgaaggttgttttgtttttttttacgtatttggagtgtaggttgataggatttttttgaggatatatttgtcgttaattgtaaggtgagcgttttatatagttttaattttcgtggttattttatgtttaggtttatgatagttattgatatgggcgattttttgttggggttgtgggttagatgagaaaaagaaattttttttattttttttgagaagatataggttttatggaagttggaatttatagagggaaaggttggaaaggagatgattttttaattagtttttgagttgttatagttttttagagttttggagaaataattggtattaagattttttggatatatttagaagatttaggatgaggaataatgtgtttatttgttggttaaagaggtattatttaggagaagaggtaggtttttatttattgtaggtgggttgtggagaatttaattattatttgcgtttatttagattttttttttgggatagtttataatgatgtaggtaaagtggagtagagataaagaagttataggataatagtgtttttttttgttttgtttttaggtttatttgttatgaattttgtttttgtttttttttgtggtttttttggttaatttgtatgtattgtagggaggtttaagtttttgtaagtggaaaggttttggttatggtttttattaggaagacgtttatgtttttatgtgatcggtagtaaaatggaaatatagggttttattattaattagttttagtgtttaggagtgttatttaattttttttatcgagggtaatttttaggagaatttgatttatttcgtatgaggatttttgtttttttattaaaagacgttatttgaaattttcgatgtagttattttgggttagttgtattagtgtcggttttttaatattcgttttagtatttttttgttttcgttttttgtatgtatttattttagttattttgatttttttatttgagggattagggagtattagttttttagttttttttttgttttttatgtttttggacgtgtggtcgcgttatgttggaatttatttagtggtaggggagataatttaatgatttattttatattggaggtgttgggagtaagtttttttaaaatttggttataaattggttttaaaattggttataaataaaatttttgtagtattgtaatatgtttataatggttttgatgtttatattggaaggttgtgggtttacgggaatgagggtaaggaatatttggtttgattagggtgggaaaatcgtttaaaggtatttttaagttataaataatagtttgagcgatttgtgttttaaggatatgtttttgttgtagttaattagtttaatttatttttttaattcggtttatttttttattttttataagggatatttttattgcgggagggtgtttagggtgggtttgagggatagtttggggttaggggttgtggtcggaaggggagttcgttggaggaggttgggaggtgaggttcgaggggttaggagtttttttgtgtaggttttgtatgttttggggggtttttggtattgagtaggggagggataggtatcgatttagtttttataggttttttgtggttgttatggagattggggggttatgggtagaggtagagaggttggtaagttgtgtttcgaattggttgggtaggtattgttagatttaggttttgagggtgggagaaggggtcggattttaaatagattttttagagtttttagtgtgggagtgaggtgtggagttgaggtttttggttggagttgttgggggttcgaagggggtggttattcgtattgggaaggcggagtggggagttggtttgggtaagattagagtacgatcgtgggttaattagggtggaagcgttttttagttacgtttgggggttttgggatgggggtagaggagttcggagttattagtttagttagatatgttgtcgtttttgttgtaggagtcgttttgtttggagttagtttgggggcgagttagggttttttaatttttcgggatgatcgcggttagtcgggttaatttttatagtatcgtgttatcggaggaggacgggttgtatttggttattatgtcgggcgttaacggtttcggtaacggtaaggtgtatacgcggcgtaggtgtcgtaatcgtttcgttaagaagaatggttagtgtaatattgagttcgttaatatggacgagaagttatagcgttatttggttgatatgtttattatttgtgtggatattcgttggcggtatatgttgtttattttttcgttggttttttttgttttttggttgttgttcggtattattttttgggttatcgcggtggtatacggtgatttggagtcggttgagggtcggggtcgtatattttgtgtgatgtaggtgtacggttttatggcggttttttttttttttatcgagacgtagattattatcggttacgggttgcgttgtgtgacggaggagtgttcggtggtcgtttttatggtggtggtttagtttatcgtgggttgtattatcgatttttttatgattggtgttattatggttaagatggtaaggtttaagaagcgggtatagacgttgttgtttagttataacgtcgtggtggttttgcgtgacggtaagttttgttttatgtggcgtgtgggtaatttgcgtaagagttatattgtggaggtttatgtgcgcgcgtagtttattaagtcgcgggttatcgaggagggcgagtatatttcgttggattagatcgatatcgatgtgggtttcgataagggtttggatcgtatttttttggtgtcgtttattattattttgtatgagattgacgaggttagttcgtttttcggtattagtcggtaggatttggagacggacgattttgagatcgtggttattttggaaggtatggtggaggttatagttatgattatttaggttcgtagtttttatttggttaatgagattttgtggggttatcgttttgagttcgtgtttttcgaggagaagaattagtataagattgattattcgtatttttataagatttatgaggtgttttttacgtttcgttgtagtgcgaaggatttggtagagaataagtttttgttgtttagcgttaattttttttgttacgagaacgagttggtttttttgagtcgtgacgaggaggatgaggcggacggagattaggacggtcgaagtcgggacggttttagtttttaggttaggtatgattttgatagattttaggttggcggcggggttttggagtagcggttttatagacgggagttagagatttgagttaattttggtcgatatgtagtatttattttcggttggggagaggtttcgcggtcgtttaggggtttcgggtttgagtagaacgggtttagtgttttgggttgtagatttagtagcgttttagtcgttttatgtttttttgtaacggttttagaagtttggtcggagagggggtagttagagcggtagttttcggttttagaggttattataggtttagggtaaagaagtggttttttggggggttaggttacgagggttagggtttttgtttgaagatggagttgtagtttgcggggaagtagtttagttcgatggtgggtttagtttttgttgtttaaggttggttagttgcggtgttttttgttggtttttaatttggggagaaatatcgggttttagtttttttgattttagtttgggtgagattgtttataaaaaaaaaaaattattatgtaattgaaaaaatttttttttaatttatagggggtaaaaagaataattagaattttatgggtttgttaggatgtagtagttggttgaaggttttagagggtttttcgaggtgggattggttttttttcgtgtgtgtgggtattatagtttttgggtaagtagggtgttttgggatcgtattttatcgagtttacgagttagttaggttttgtttgtgatagaaaaattaagattatgttaatgatcgtaataaaagttttttattgtcgttggggtggtgggtggggttgggaagaaattggtttgagtttttagagtttgtttttgtattttagagatgtgttttagggttaggtatgggatttgttatcgagggttttttttcgtattttcgatttttttgttttgtttttttttttatttttgtttaggttttcgtttaattttatagtgaggggtggttaggagttataggtcgggatggttttttgggaagggaagtcgggattttaggttaggaggaagttggtagtttcgtttttattgggtttatagtgtgagtcgtgttttagagatttcgggttgttttgttttttttgggtttgtttatttttttttaattttgttttattttattttttttatatttttattgttgaagtttttttagtttttttgtttgttttgtgaaggtggtaggggttaggtttgtttgatataggattatattttgttttttttttatttggagtagtatagtagagtttaggtagggtatagttaggttttggttagcgttgaatggtagaggaaagattttaggaaaggagaggaatcgttatttttttttgttaattgggatgattggggagggttacgtttatttaaagttgaattagaaattagtcgtggaatagaatttttgtcgagttttttagggtcgtttttttattatttttttttaggttgaggtattatgg

SEQ ID NO: 1096 - DNA, 7690 bp, Artificial Sequence
  chemically treated genomic DNA (Homo sapiens)
ttatagtgttttaatttgggggagggtggtggaggagcggttttggaagattcggtaggaattttgttttacggttggtttttgatttagttttgaatgagcgtggttttttttagttattttagttggtaggagggggtggcgatttttttttttttttaagattttttttttgttatttagcgttgattagggtttggttgtgttttgtttgaattttgttgtgttgttttaggtgagggagggataggatgtggttttatgttaggtagatttggtttttgttatttttataaggtagatagaggggttggaggaattttagtagtggaggtatgggaggggtggggtgggatagggttggggggagatgagtaagtttagaaagaataggataattcggagtttttaaggtacgatttatattgtgggtttagtggggacggggttgttagtttttttttagtttgggatttcgatttttttttttaaggagttatttcggtttatagtttttaattattttttattgtggaattgggcggaggtttggatagaaatggagagagaagtaaaataggaaaatcgagggtgcggggaggaattttcgatggtaggttttatgtttggttttgagatatatttttaaggtataaaggtaaattttaaaagtttaaattagtttttttttagttttatttattattttaacgatagtagaaagtttttattacgattattaatatggttttgatttttttattataaatagagtttagttggttcgtgagttcgatgaagtgcggttttagagtattttgtttgtttagggattgtggtgtttatatatacggggagaggttagttttatttcggggaattttttggagtttttagttagttgttgtattttggtagatttatggaattttaattgttttttttgttttttgtgaattaaaaaaaaatttttttaattgtatggtaattttttttttttgtaaatagttttatttaagttaaggttaagaaagttgaaattcggtgtttttttttaagttaaaaattagtaaggagtatcgtagttagttagttttggatagtagaggttgggtttattatcgagttgagttgttttttcgtaggttgtagttttatttttaggtagaagttttggttttcgtggtttggttttttaggaggttatttttttgttttgagtttgtgatagtttttgaggtcgggggttgtcgttttggttgtttttttttcggttaaatttttgaggtcgttgtaaagaaatataaaacgattaaaacgttattgagtttgtaatttagggtattgggttcgttttgtttaaattcggggtttttgagcgatcgcggggtttttttttagtcgggggtggatgttgtatgtcggttaaggttggtttagatttttgattttcgtttgtagggtcgttgttttaggatttcgtcgttagtttggagtttgttaaagttatgtttggtttgggggttgaggtcgtttcggtttcggtcgttttggttttcgttcgttttatttttttcgttacggtttaggaaggttagttcgttttcgtagtagaaggagttggcgttgggtagtaggaatttgttttttattagatttttcgtattgtagcggggcgtagagggtattttataggttttgtggaagtgcgagtagttaattttgtattggttttttttttcgaagagtacgggtttaaagcggtgattttataggattttattggttaggtaggagttgcgggtttgggtggttatggttgtggtttttattatgttttttaggatgattacgattttaaagtcgttcgtttttaggttttgtcggttgatgtcgaagagcgggttggtttcgttaattttatgtaagatggtgatgggcgatattagaaagatgcggtttaggtttttgtcgaagtttatatcgatgtcgatttggtttagcgggatgtattcgtttttttcggtgattcgcggtttgatgagttgcgcgcgtatatgggtttttataatgtggtttttgcgtaggttatttatacgttatatgaggtagagtttgtcgttacgtagggttattacggcgttgtggttgaatagtagcgtttgtgttcgttttttgggttttgttattttggttatgatggtattaattatgaaggagtcgatgatgtagtttacgatggattgggttattattatgaagacggttatcgggtattttttcgttatatagcgtagttcgtagtcgatggtggtttgcgtttcgatggagaagaggaaggtcgttatgaagtcgtgtatttgtattatatagggtgtgcggtttcggtttttagtcggttttaggttatcgtgtgttatcgcgatgatttagaagatgatgtcgaatagtagttaggaggtaaggaaggttagcgagaagatgagtagtatgtatcgttagcggatgtttatataggtggtgaatatgttagttaggtagcgttgtgatttttcgtttatgttggcgaatttaatgttgtattggttattttttttgacgaagcggttgcggtatttgcgtcgcgtgtgtattttgtcgttgtcgaagtcgttggcgttcgatatggtgattaggtgtagttcgttttttttcgatgatacgatgttgtaggggttggttcggttggtcgcggttatttcggggggttgggggattttggttcgtttttaggttagttttaggtagggcggtttttgtaatagagacgatagtatgtttggttgggttggtggtttcgggtttttttatttttattttagggtttttagacgtgattggaggacgtttttattttgattgatttacgatcgtgttttggttttgtttaagttagttttttatttcgtttttttagtgcgaatggttatttttttcgggtttttagtagttttagttaaaaattttagttttatattttatttttatattgagggttttgaagagtttatttaggattcgatttttttttttatttttaaggtttgaatttaatagtgtttgtttagttagttcggggtataatttgttagtttttttgtttttgtttatggttttttagtttttatggtagttatagagggtttgtggaagttgagtcggtgtttattttttttttgtttaatgttagaggttttttaggatatgtaggatttgtatagggaagtttttgatttttcggattttattttttagttttttttagcggatttttttttcggttatagtttttggttttaggttgttttttaaatttattttggatattttttcgtaataaaagtattttttatgagaaatgaagggatgggtcgaattaaaggaatagattgggttagttaattgtagtaggagtatgtttttaaggtatagatcgtttaggttattgtttgtggtttaagaatgtttttaagcggtttttttattttggttaggttaggtgttttttgtttttattttcgtaaatttataattttttagtgtgggtattagggttattatgaatatgttatagtgttgtagagattttgtttatggttagttttggggttaatttatggttagattttgggagggtttgtttttaatatttttaatgtggggtgagttattaaattgttttttttgttattgaatagattttaatatagcgcggttatacgtttaagggtatgggggatagagggggagttgaagagttgatgttttttgattttttaggtggaggggttaagatgattgaggtgggtgtatgtagagggcgggggtaggaaagtgttggggcggatgttggagaatcgatattagtgtagttaatttaaaataattatatcggggattttagatggcgttttttgatagggagataagaatttttatgcgagatgagttaggtttttttgggaattgttttcggtggggggaattaaatggtatttttgaatattagggttaattaataataaaattttatatttttattttattgtcgattatatggagatataaacgtttttttgatgggagttatagttaaagtttttttatttgtaagagtttggatttttttgtagtgtatgtaggttgattagggagattataagagggggtaggggtaggatttatggtaggtgagtttgggagtagagtagagagaagtattgttgttttgtggtttttttgtttttgttttattttgtttgtattattatggattattttagggggagaatttggatgaacgtaggtggtggttgagttttttatagtttatttgtagtgagtaaggatttgtttttttttttgaatggtatttttttagttagtagatgggtatattgttttttattttggattttttaaatgtgtttaagaagttttagtgttagttgtttttttaggattttgggaggttgtggtagtttaggggttgattgggagattattttttttttaatttttttttttatgagttttaatttttatgaagtttgtgtttttttagaagagatgggagaggttttttttttttatttagtttatagttttagtaagggatcgtttatattagtggttattatgggtttgagtatgaagtgattacgggaattggggttgtgtgaaacgtttattttgtagttggcggtaggtgtgtttttaggggagttttgttagtttgtattttagatgcgtggaggagggtagggtagtttttagggatagtagaagagcgggttgggtgagagagggttaggaggaattattgacgtatgttttttagtgttaaatttataaaaatgttgataggatagaattaatagtttgattattttaaaaggtaaataaaattttttttataatttttgttttttaaatttaatttttttttggtaattattttttgattaaatttgaaaattgaaaatgatgtatggagagttttatttttttaattttgacgtttttagaggagaaggagtgtagtagatggagtaaaatgtagcgttttgtggtaattttgaaggattggagagattagatttggtagtgaggtttttattttatttattagtagatatataggataaagacgtaagagtagtaatggtgattgatgtttcgaggttttataggatattgagaacggaggttttattgtaggaggggtttgtatgagtcgttttgtagtgtagtttgggtttttgttttgaattttgtttttagtttcgtatatataggattgtgtgggatgagggaagttgtatttgttagtttaggtttgtggagcgttgggcgttgttttatcgttttgtgttattttataagggattgtttatatggatttgtttagtttcgttttttagtaggttttttacgtattagtttattggattttttaatttttttaataggttgttgaattattttacggaggaggaatttgaggtttttatgagggaatagtttatttagagttatagttgataggttataggttgtggagatggtttgttttgggatgagtgtgtagattgattttaaattgttaaggaggggagtttagatatgtatttttaaaatttattatcgttatttggtagtttgaattattattttattgggaattgtttaggtgattttatattagagtttatgtgatatttatttatgataaggtggttgtgtgtttagcgtgcgtatatatttttgagtggatgtgaggtatatgttagatgggtatagagatatttatttggaattttagtatggtttgagtttttttatatatagatttttttttggtgttgggaagttaattgtttttttttgatttttggaagggaaggttttggttggtttagaatgttttagatgttttaggtattagtaatttttgaggatattattgtggatgttatttaggaatagtgggttttgtgaggtttagtttagagatgttattttggagaataatggttttttgggtttagtgggtgagtttgttagtattgattgatttatttatttatttttaataattttaattttttttttcgatttagggggtttatgtgtaggtttgttatatgggtatatcgtgtgatgttgaggtttggggtacgattgatatagttatttaagtaacgagtgtgtatggtatttaatgtttagttttttaattttttttcgttttttttttttttttttttttttgaattttttagtgtttattgtttttatttttatgtttatgtgtatttaatatttattttttatttgtaagtgagaatatgcggtatttggttttttgtttttgcgttaatttatttaggataatggattgtagttgtatttatgttgttgtaaagtacgtgatttcgttttttttatgattgtatggtattttatggtgtatatgtatatatttttcgtagttagtttattattgaagggtagttaggttggttttttgtttttgttatcgtgaataacgatgatttattttttgaatatgtgtttaggatagtttggttatatttttttttttagtttttagttatattggtttttttatagtacgaaggattatttgaaggaagtttgttaatgtttttatatttggtttgttatcgattagagtattatttttttattgtaatgttttgtttttttggttgttagatttttaatatttagaatattgtggttattttaaaaaaataaattattagattaaatttttattaagtaataattttgttttgagtacgaagttagcgtttgagagtatagtaggaaaaataattggtttttgttttttttatgtaagattgatattgtgttggtagagtttttattgattggattattatgaaaataaaggttagttagttgtggaatttttttttattttgttttgagtttggttatgtaaattagtaatatgagtttttattgtttggggattcgaagtaggatttttttttgttttgtgagggacgttggtgtttttggggttagggtttttttttgttttgtgagggatattggcgtttttagggttagggtgttttatttcggtagtttttggagatttattttatttttttttaggagtttgttttgaatttgaggtttatgtttggtttttagtataggatttaaatttttgtagttttattgtagagtaggaattttgttagttagagatgattttttagtaggagtaagggtcgggttgtggagggtagggaaggttttttttggggtttgagtttaggtgagcggtagatcggtgtgtttttgggaggattttgttatggagggagtagggttttagtgagcgcggtgcggagttttaggaacggtgtttttaggtagtatgggggttgttggtgatcggttttttcgaggttatattttttatatatattagtttttttttttatatgtttttgtttttttgggcgttagagtttttcgttgtagtttttgttttgatttttgtttttggatcgttttttttcgtttttttttttgatattttagatttattttatttttttttttattttaattttgaaaatgttgt

SEQ ID NO: 1097 - DNA, 6104 bp, Artificial Sequence
  chemically treated genomic DNA (Homo sapiens)
taagtgggatttaattaaagagttgttgtatagtaagagagattgttaagggaataaatagataatttatagaatgggagaaaatattagtaaattttgaattgataaaggtttaatatttaaagtttataaagaattaataaattaataagtaaaaaaataattttattaaaaagtgggtaaaagggtcgggcgcggtggtttacgtttgtaattttagtacgttgggaggttaaggtgggtagattattaggttaggagatcgagattattttggttaatatggtgaaattttgtttttattaaaaatataaaaaaaaaaaaaaaaaaaaaaaattagtcgggcgtgggggtgggcgtttgtagttttagttattcgggaggttgaggtaggagaatggcgtgaatttaggagacggagtttgtagtaagtcgagattacgttattgtattttagtttgggtgatagagtaagattcggttttaaaaaaaaaaaaaaaaaaaaaaaaaaatataaaaaaataaaaagtgggtaaaagatatggtagatagtttttaaaaagaagatatataaatagttaaatatatgaaaaaatgtttattattgattattagagaaatgtaaattaaagttataatgagatattattttacgttagttagaatggtttttgtttaaaaagttttaaaataatagatgttggagaggtagtagagaaaggggaatatttatattttgttgacgggagtgtaaatgagtttagttattatggaaggtagtttggagattttttaaagaattaagagttgaattattattcgatttagtagtttcgtgtgttgagtttatatttaaagaaaaattagtcgttttattaaaaagatatatgtatttaaatatttatggtagaaagatatgagttaatttaggtgtttgttaatggtagatcgaataaagtaaatgtgatatatatatattatggaatattatgtagacgtgaaaattatgttttttgtagtaatatggatgtagttggaggtcgttattttaagtgaattaatgtagaaattgaaaattaaatattgcgtggttttatggattataagtgagggttaaatattaaatttatgtggatataatgatgagaataagagatattggggaatataagagtggggaggggggaaggggagtaaggtttgaaaagttatttgtgggtgttgtgcgtattacgtgggagatcggatcgtttgtattttaaattttagtattatgtaatatatttttgtgataaatttgtatttgtattttttgaatttattaaaaaagttgaataaaatggaaatttttggtatgggagaaaaaaaaaaaaaatagatgtaagttagaagaggttacgtaaaaattttttatttttgtatttgaatgaggattattagtatgtatttaggatgacgtttatttaaatatttttgttttttggaaaggtttaggattaaggattatttagtagttaagagtatttttagattttagattgtggtttttaggtattatttttttttgaaagaaattagggtttttggcggattttaggtttgtggtagaagatgtgtaagttaagtttggagtatttattatagtagaaggtagggaagttattagaggttttttagggttatgttattggaatttgaaggggtttttgtttttttttttttttttaagttgaagatgtagtgggtaagttttattgaaaataatagaggaagtggatgagttgtattgatggggtttagattttaagtttattttgatattgaggggtaaaattagtggattttgatttgtatttttttaaagatttgtggaggttaatagggagatcgtttatgatgttgaattttggtaagtaaacggagagaatttgatatgtgttttagtcgtgattaatttgtgaattgtaattcggggaaatttagtagttgatggggttgcgtttttttttgggattttcgtagatgtttgaggcggtagtgttgttgaagttttgttaggttttagtttttggtgaggttagggatttcgtatgtagcgttatagttgttaatttttttaaagtagtaaaggttttcggatagtgtatagaaagtgtttttatttataatgtttttttgtttggatggatggatggatggatggatggatggatggatggatggatggatggatcgatcgattttattaagtttcgtgttttaagtataagtttattggaaatattcgggttagaggaacgcgttaaatgatattataggaggttatttgtagaattttagtggtgggggatggttttgtaggatatatgatttgatttttttagtaagttaatgattaagaaataacggagagaaggaggaaagaattatttatttattaattgtgatatatggttttagttaggtttttaataaatgatgataaatattggattaaattatttttggtttgttgtatgttttatttttgtttatgtcgtatttgttatggtgtatttttgattttcgtgtttagttgggaggttttggggttgttgggatgtttttgtgaatggttttttttttttttaggtataggggttttatggggttttggagtagatagattagagtttgtatttagtttttagttggttatgttattttaattgtaaaacgagagacggatttttttgggacgcggtggtggggatattgtggtttgttttttttgggcgtttcgtggcgttcggtggtgtgaggttaggatgtggggcgtggtgtttagggattgtgtggtttgtttggagttgggtagagataaagtatgtatgtgatattttttgattttaggttataataggggtaggggtggggggtaattagggtttttagaggataattttatgtagttttttattgtagggtttggagggagtaggtgaaggtttatttgttttaggtaatgaggagttgtgcgggtttgagatagttttggtttttttaagggtatgtaggggttattgttagtttgtagttttttttgtgggggtaggttgtggtattgtggcgattggtagtattgattttttttaagttaatcgggtagggataagttagtttgttgtttcgtttatagtagagggcggttttgggggtgaacggttgatcgtgagggcgtggtttttttttttagattatttcggaggtttttttcgtttttttgtttataaagagttttttttttgtgttgagaggtttgggttttagaggtagatgaatggagtcgtgaaattaggtagggatttttttttgtttaaaatttatttttttttttatgtagtataggtggttaaaatttgcggttgggttagaggattggtttagtaagaatttttttttttttaaatgtggttatttgttagttagaaaaggtgtgtggtttcgtagttttttagataaattgaatttaatagtagttgacgtgaatttttgttttttttttaggttttagagtcgtattttagtgtaggtgtggaagtttagtttttttaaaatttagataggttttggtgttttgattgttatttttagggggttttttattcgagtttttgtttgtagtgtttatgggtagtagaggtgttcggagatgtaatagggtttagatttttattagtttgtggtttagttgggggtaggatttcggggtagggtgagtttttgcgtgatttgattttttgtgggtaggtcgggtagggtggttgtagggcggcggagtttgtgttgttggtttgtatttttttggttggatagatattgcgtttatatttttggttttttaaagggttttgtggttggtggagggtagtaatgttttaagggaggagtaggtgtttaagtttttaggtggttttgcgggtataggtatttgtttattttgtggtattagttttgttttttagtttaaggttttggtttttataggttttttttttttttttttttttttttttttttttttttttttgtggttttaaggtttatagtagaaaggttttagtttgtgtttatgtgttttggaggttttttaggtatagggattgttagtttagttgtaagtggattttggatcgtaaatttgtatgggtttttttgttaaagttttgtgtttattgttggggaacgttggggatttcgtttttgtggggtagtggggttgggtgggagtaattttttattcgggtggttgtggtcgaggtttttatgagagggtggtaggtgtgtttttatagtgggggattagatttttttttggttttaaagattgttttaagtttttggaggagtattttgttttaggttggggcgtgattgtttttggttgagggttgttgtttgtgtaggtggtttttttgtcggttttgtttgttgtatgggggtgtggttttttgtggatggtttttgttttgggtggtattgttgtaggatttgggttttcgggggtgttcgggagtcggatgggttttatttttttggtttttattgggtttaggagtggcgatttgtgagttaatggtcgtggttgggggtagtttggggtgttgagaggttttgggtagttattttgtttttttgagtttgtttttatgtgtttttggggttggaattcggtgttcgatttggtgatgggttaggtgtgattaggtgtgtggggttcggtttgtatgtgtagggttgtttgaaggtttgtggggttatttgatgttttttttttttttagttttggagaggatggttttttaggtcgtttcgtagtagatttgtagtttggttgttgtcgtttttgaaatagtttttgaagttttgttcgggaagggaattttgagtgtggaggagataagtttgttgattgggtgagtcggtcggggcgggggtggtttttttttttttttttttttgtagtttttatggtttggggttgtgagaggttcgggaaggtattgtttttgcgtttgtatatgtgtgtgtttggagtgtaggatggtattggtgtcgggtttggatttatttagtttagattacggttgtttttgtttacgtggtttttgtttttatttataattttaggtttttggttttcgggaatttgaggtttgtggttgttgtggattttgggaaagagtttgtgttttttgagttagtgcggggtttggtatggagtaggtatttcgggggtggatagataggtagaggaagggatgggtaggtggatggggggttgaattgtggttagttatgggtggcgggtagatgggtggatagttggatagatgaagtattgggtgggtggagagagaaaggggtgggtggacggagggatgggtagggagagaaatggatggggtatgttgtttttagtatttattgggtgtagttgtttgttgtttgttgttttgggggaaggtttggagagggtttttcggtgagtgtggatttagttagtttagttttaatatagttgggatgtattgttgtttttttcgttattttagtagttgtttagagatgagatttagttttattgtgtttttttgggatttataagaatttttttttgggttgagggggcgttgttgtgggtgtattttatggagagttttaaggagttagggaggagttttttggtggtttgggttttggattggtgggtgttgggtgggtttttatggttgtttttggggttgttaggtttgtaaggtagataggtttttggatttgagtgtggttgtggacgagggtagcgtcgttattagaggcgatgtttagggttattttttttgatttgtttttttttttttttgatttgttttttttttttgacgggtttgtttttgagtttgatatttgtttgggggttttcggcgaaggtcgttggtttttagaatgtattatttttttttggtatgacgggaattatttgtgatattgttattatttcgttgtaatttgggtagtagttgttatgattttattatgtgtttttcgtgaggtttttatttgtt

SEQ ID NO: 1098 - DNA, 6104 bp, Artificial Sequence
  chemically treated genomic DNA (Homo sapiens)
aataggtgggggttttacggggggtatatggtgggattatgatagttgttgtttagattatagcgaggtggtggtaatgttataggtggttttcgttatgttaggaagagatggtgtattttagaaattagcggttttcgtcgggagtttttaggtaggtgttaagtttaggagtaggttcgttagagagaggaggtaagttagaaggaggaggaggtaagttagagggggtggttttagatatcgtttttgatggcgacgttgttttcgtttatagttatatttaagtttagaggtttgtttattttgtaggtttggtagttttaagaatagttatgaagatttatttagtatttattaatttagaatttaaattattagaaggtttttttttggttttttggggttttttatgagatatatttatagtaacgtttttttagtttagggaaggatttttgtgaattttagaaagatatagtggggttgggttttatttttggatagttgttgggatggcggaaggagtagtaatgtattttagttgtattgggattaggttggttgagtttatatttatcgagaggttttttttagatttttttttaggatagtagatagtagatagttgtatttagtgggtgttggaagtagtatgttttatttatttttttttttgtttattttttcgtttatttatttttttttttttttatttatttagtattttatttatttagttgtttatttatttattcgttatttataattgattataatttagttttttatttatttgtttatttttttttttgtttatttgtttattttcggggtatttattttatgttaggtttcgtattggtttaggaagtataggtttttttttagggtttatagtagttataggttttaaattttcgagagttagaaatttggagttgtgggtgagagtaggggttacgtaaataaaagtagtcgtgatttgggttgagtaaatttaggttcggtattagtgttattttatattttagatatatatatgtgtaggcgtaaagatagtgttttttcgggttttttatagttttaggttatggaagttgtaggggaggaagggaagaggggttattttcgtttcggtcggtttatttagttagtaggtttattttttttatatttaaggtttttttttcggatagagttttagaggttattttaggaacgatagtaattagattataaatttgttgcgaggcggtttgagaagttattttttttaaggttgaagaaaaggggggtattagatggttttataggtttttaaatagttttgtatatgtagatcgagttttatatatttgattatatttgatttattattaggtcggatatcgagttttagttttagagatatatgaggataaatttagagaggtaaggtggttgtttagggttttttaatattttaggttgtttttagttacggttattggtttatagatcgttatttttggatttagtggaggttaggagagtgaggtttattcgattttcggatattttcggaaatttaggttttgtagtagtattatttaggataggggttatttataggaggttatatttttatgtagtagataagatcgataagagggttatttgtataggtagtaatttttaattagaagtagttacgttttagtttggggtaaagtgtttttttagaggtttgaagtagtttttggggttagagagagatttggttttttattgtggagatatatttattatttttttataagggtttcggttatagttattcggatggggggttgtttttatttagttttattgttttataagagcggagtttttagcgttttttagtagtgggtatagggttttggtaaaggggtttatgtaaatttgcggtttaaggtttatttatagttgggttgatagtttttgtatttgagaggtttttaaaatatatggatatagattggagtttttttattgtgggttttggagttataggaaaaaagggaaggagggagggagggagggagggaggaggtttgtggaggttagggttttgagttgggaagtaggattgatgttatagagtaaataagtatttgtattcgtagggttatttgggggtttgggtatttgttttttttttggggtattgttgttttttattagttatagagttttttgaaagattagggatatgggcgtagtatttgtttagttagagaaatgtaggttagtagtataggtttcgtcgttttgtagttattttgttcggtttgtttatagagaattaggttacgtagggatttattttgtttcggagttttgtttttagttgggttataggttggtaggggtttgggttttgttgtattttcggatatttttgttgtttatgggtattgtaagtaaggattcgagtgaggggttttttgggggtggtagttaggatattaaggtttgtttgggttttggaggaattgagtttttatatttgtattggggtgcggttttggagtttagaggagaaataggggtttacgttagttattattaaatttagtttgtttgaaagattgcgaaattatatattttttttggttagtagataattatatttaaaaaaaaaaaaatttttattaaattagttttttgatttagtcgtaggttttggttatttgtgttgtatgggaaggagagtgggttttaagtagaagggaatttttgtttgattttacgattttatttatttatttttgagatttaggttttttaatataaagggggaattttttgtaggtaggagggcggagggggttttcggggtggtttggggggagggattacgtttttacggttagtcgtttatttttagggtcgttttttattgtggacggaataataagttgatttgtttttgttcggttggtttagaggaagttagtattgttagtcgttatagtgttatagtttgtttttatagagggagttatagattggtagtgatttttatatatttttaaaggaattagagttgttttagattcgtatagttttttattatttaagataggtaagtttttatttgttttttttaagttttgtagtgaggaattatatggggttgttttttaggaattttgattgttttttatttttgtttttgttatggtttgaagttagggagtgttatatgtatgttttgtttttgtttagttttaggtaggttatatagtttttggatattacgttttatattttaattttatattatcgggcgttacggggcgtttagaggagatagattatagtgtttttattatcgcgttttaaggaagttcgtttttcgttttgtagttgaggtaatatggttagttgggagttgggtgtaaattttggtttgtttgttttagagttttataaagtttttgtgtttgggaaggaaggaagttatttataaaagtattttaataattttaaagttttttaattgggtacgggaattagaaatgtattatggtaggtgcggtatgggtaaaaatggaatatgtagtaaattagaagtaatttaatttaatatttgttattatttattgaggatttaattaaggttatatgttataattggtggataggtgattttttttttttttttttcgttattttttggttattgatttattgaggaaattaggttatgtgttttatagagttattttttattattgggattttgtaagtggttttttgtagtattatttagcgcgtttttttggttcgagtatttttagtaaatttgtatttagagtacgaggtttggtgagatcgatcgatttatttatttatttatttatttatttatttatttatttatttatttatttaggtaaggaagtattgtggatgggagtattttttgtgtattgttcgaaggtttttattgttttggagaggttggtagttgtgacgttgtatgcggaatttttgattttattaggagttggagtttggtaggattttagtagtattgtcgttttaggtatttgcgggagttttaaagaaggacgtaattttattagttattgggttttttcgagttatagtttataggttaattacgattgggatatatgttagatttttttcgtttgtttgttaggatttaatattatgagcggtttttttattgatttttatagatttttagagaaatgtaaattaaagtttattggttttgttttttagtattaggatgaatttgggatttgaattttattaatgtagtttatttattttttttgttatttttagtgaggtttatttattgtatttttagtttggggagaagggggaagataaggatttttttaagttttagtgatatggttttagggggtttttgataatttttttgttttttgttgtgatgaatattttaggtttagtttgtatattttttgttatagatttggaattcgttaggggttttggttttttttagggggaaatggtatttagaggttatagtttggggtttagagatgtttttagttgttgagtggtttttggttttgggtttttttaggaaatagagatatttaagtaaacgttattttggatgtatattgatagtttttatttaaatgtagggatggaggatttttgcgtaattttttttaatttatatttgtttttttttttttttttttatgttaaaagtttttattttatttaatttttttaataggtttaggaggtataagtgtaggtttgttataaaggtatattgtatgatgttgaggtttggagtataaacgattcggttttttacgtagtgcgtatagtatttataggtaattttttaaattttgtttttttttttttttttttatttttgtattttttagtgttttttgtttttattattatgtttatatggatttgatgtttagtttttatttataatttatgagattacgtagtatttggtttttagtttttgtattaatttatttaggataacgatttttagttgtatttatgttgttgtaaaggatatgatttttacgtttgtatagtattttatggtgtatatatattatatttgttttattcgatttattattgataggtatttgagttgatttatgtttttttgttatgaatgtttaggtgtatatgtttttttggtagaacgattaatttttttttgggtataaatttagtatacgggattgttggatcgaatggtagtttaatttttggttttttgggaaatttttaaattgttttttatggtggttggatttatttatattttcgttaatagggtgtaagtgtttttttttttttattgtttttttagtatttgttgttttgagattttttaaataaaggttattttgattggcgtgagatggtattttattgtgattttgatttgtatttttttgatgattagtgatgagtatttttttatgtgtttgattgtttgtatgttttttttttaagaattgtttattatattttttgtttattttttgtttttttgtgtttttttttttttttttttttttttttgagatcgagttttgttttgttatttaggttggagtgtagtggcgtgatttcggtttattgtaagtttcgttttttgggtttacgttatttttttgttttagtttttcgagtagttgggattataggcgtttatttttacgttcggttaattttttttttttttttttttttttgtatttttagtagagatagggttttattatgttagttaggatggtttcgattttttgatttggtgatttgtttattttggttttttaacgtgttgggattataggcgtgagttatcgcgttcggtttttttgtttattttttaatggggttgtttttttgtttgttgatttgttaattttttgtagattttgaatattaggtttttgttagtttaaagtttgttaatatttttttttattttgtaggttatttgtttatttttttggtagttttttttgttgtgtagtagttttttaattaggttttatttg

SEQ ID NO: 1099 - DNA, 6338 bp, Artificial Sequence
  chemically treated genomic DNA (Homo sapiens)
ttaaattttgtttttttaggtttttgtggggtcgtttgtttttttgaaggcgtagtgacggggaagtagttttttttatttttattgggaggtacggggtggtggtttgggaggttttgttttttagtgttcgtaggggttattgttattggtgtcgaggtttttagaacgtaggtgaagttgagtatttgggtatagattttatttatgatagtatagcgttaaaagagtataaaatttggtttgttttagtaggggttataattcgcgggggttattagtattatgtagtcgttttgtataaatttatagtggtagttttcgttttttcgatttcgttgttgacggttttatataggagggcggttagaggaagtttatatgttttttaagttattatttatgtttggttttttggggtttttgttcgtttgttttttttgttgttgttttttgttgttaagatggagtttcgtattattgtttaggttggagtgtaattatgtaatttcggtttattgtaaattttatttttcgggtttaagtgagtttttttttttagtttttcgagtagttgggattataggcgagcgttattttgttcggttaattttgtatttttagtagagacggggtttttttatgttggttaggttggtttcgaattttcgattttaggtgttttatttgtttcggttttttaaagttttgggattataggtatgagttattgtattcggtttgttttgttttttttttgagacggagttttgtttttgtcgtttaggttggagtgtagtggtatgattttagtttattgtagtttttatttttcgggttcgagtgatttttttgttttagtttttcgagtagttgggattataagtgtttgttattatgtttggttaatttttgtgtttttagtagagacggggttttattatgttggttaggttggtttcgaatttttgattttagatgatttatttatttcggatttttaaagtgttgggattataggtatgagttattgtttttagtttttatttttgaatttaattaattaattttttttttttttttttttttttttttttttttttttttttttgagatagggttttgttttgttgtttaggttggagtgtagtggtgtaattatagtttattgtagtttttaatttttgggtttaagtgagttttttgttttaattttttgagtagttgagataataggtatgtattagtaagtttagttaatttttaatttttttttttttttgagatagggtttttttttgttattaaaggtggagtgtagtggtgttattatggtttattgtagtcgggattttttggatttaagcggtttttttattttagttttttgggtagttaggattataggtaggttattaagtttggataatttttgtagttttgtagagagagggtttttatgttgtttaggttggtttcgaatttttgggtttaagtagtttatttattttagttttttaaaattttggttttataggtatgagtcgtttggtttggtttcggttttttatttttggttttattattttagtgtcgagtttgtgagattggagttatgatttagtaggattgtatttgtatttgagggagagtataggcgtgggttttggagggtatcgagtttgttttgtgattagtattatatgggtagggttattttgtgggttttttttggtagtgatttagatgtgttttagtttgttttttaataattattgattttgggtttttttttgcgttaggttttagggaggatagttcgggaagttcgggggagttcgggtagtaggcggttatagtttttgtggtttgttttttgttggggagggagtttattagaggattttggggatagatgagttggttttgatcggtaggagtagttagttttggtagtataatttttatgttttttggtcgtttagtgtagtttagtgacgtgggatattggggaggttttgaggttatttgtttggaggagattagagaaggggttgggtttgtaggtttcggggagaggatggtgttggaggtgttgaagggatagcgttcgcgtggaattcgttgttgttttggtcgtttgggcgaagattgattgtttttttcgttggagttgggtattacgtacgtttgaattttgtttattttttttggagttttgtcgatgcggttttggtaaagattgtttgagtttgaacgttttttttatttatttttatataaatggaattttttttgtttggatgaaatttattttaattgggtatttttacgatttattttgtttgggcgtagaggaggggatagggggtaggtatgcgggtaattagattgttgataatgtagttcgtgggtgtgtaagatataaaattaaaaatataaatgattaatgagttagttttttgaaaggatattttaaataaaggaggaagtaaggatttttaagttttgatgtaggatttattttttagaattttttaaggtgtggtaaagttgttggagttaacgttatttgtagacgggagaatcgcgagttgtagggtgtaaagttttatttgtattttgagtcggtttttttagttcggtatttttacgggggatgttattttcggttatttttaggaggttgtgaagttagtcgatggttttttaagattttagtagggttttttttttttttttttgaaaaataagatgaataggtttgttttttttaatgttttggatattagagtattttaatttttgtttttattttagttttggtgtatttgtttaaacgggaattggggttattttttttttattttttgtggattagttttgattttgggttttattgggttttgatattaaatttgagatgattgtttgtttaggagaggttacgtgtagttcgggtattgtcgaggggtatcggatagtttggggtttttttttataggatgaggggttttagttttgtagggtttatattttgagttacggttgttttttcgggttttttggtgagtgggaaagattagcggtattagttagcgtgtgtagggagatgttacggtgtttttttttttttgtatattgaagtttttttttttttttgaaagtattaggttggtgtttttttttttaataatcgagagaaatcgtagtcgtttggggtaagtttattttatgttggtaattatagttaatgcgtgggtatagaggtagggaggcggggatttagaaagtatttttggatgtgtataagtttgtgtaagttgtcgtttatttttaacgttttggataacgtataggttagtattttgtttgtatcgatttttttgtatttagtttagttaaaaataaaataataataataaaaataggtttcgtggttattagttttggaaattaaagggtaaatataatttaagagtttattttgtattagggttagggttgttttatgagtaggttatttgcgaggacggcgttagcgatttagtagagggtttttttttgggtagaatttatggtgttaggcgaacgtgtaaataggttggatgtagttagagacgtattcgaagatgatattttttttggatgtgtagaggaaggtttagtggcggggtattttatagggcgggtagtattgagtcgtaggggttttttggttttttagtagtagttttagagggattttttttaggatatatggttgtcggtaggggggaggttattttcgcgtatttgtttttaaggaaatatcgttttatttgtgtttaggaggtatagatttgttttttttgtttcgaggtgtggtattgggttttttgttggtttgtttgttgttttggggttattttttagtttttgtttttgttataggttttttttggggtttgtataattaagtttaggttttttggggggttttaaggttttttaggagtgatttttttttattttttattttatggtttttgtttttttttttgtttttcggtttttgtggttatttttttttttttgggttgttttttttgtagggtgtttttagtttttatagattttttttgtatatattttggggtttagggggttttattgtttgggtaattttgatatcgagagtatgaggttattatgggttgagttttaatagagttttggggagagtttttatttttattttttttcggaggcgtttatttttagggtttagttgagaagattttagttttgtttaggcggttgggtatcgttttgggattttaggagcgttggggttattaggtaggtttatttggttagtattatcggatttaaaggtgatcgtagggttagtgtgtatatggtcgggggattgggtaggtttagtttagagttttggtttcgcgggttttggttttttttgttttttttttttttttttttgttttttttttttttttttttatttttttttttttttttttttttttttttttttatttttgttttttttttttatttttgtttttttttttttcgttttcgttatttttttttttttttatttttttttttttttttttttttttttttttgtttttttttttttcgttttttttttttttttttttttttttttttttttttttttttttttttttttttttttttttttttttttttttttttcgtttttttttttttttttttttttttttttttttttttttttttttttttttcgattggcgtcgcgggggttaacgcggggcggggcgaggcggcgggcggagtcggcgcggtcgcgggttaggcgtcgaggtgcgcgcggagcgaggtggtcgtagcgttttcgcgcgcggtttaagttcggtaggagtgcggaatcgtcgtttcggttatgcggttttcggtcggggggtttgggttggggttcgcgtcgtttttcgcgtttcgttttcgttgagtttgagttcgattcggggcgtttttcgttaggtattatggtgtagaagtcgcgtaacggcggcgtatatttcggttcgagcggggagaagaagttgaaggtgggtttcgtggggttggatttcggcgcgttcgattttattcgggacggggcgttgttgatcgtcggtttcgaggtttttaagcgcggtagtatttttagtaaatttcgcgcgggcggcgcgggcgtcgggaagttttttaagcgtaacgttttttatcgtaagttgtagaattttttttataacgtgttggagcggtcgcgcggttgggcgtttatttattacgtttacgtgtgagtggtcggcggggttttcgtggcgatttttatggcgatttttatcggcgattttatcggcgatttcggttaggttggttgcggcgggtttggttttttgtttttgggtttgggttcggggtcggcgtttttcggcgggagtgttgggtcgagatcggagagcgattgtatagcgcgcgggtaggaaggatttcggggtcggggtcgtttaggtcggggtgggggttttaggttcgtaggatagagacgtgcggtcgttttagttttttttttagtttgggaggttttttttcgcggtttttgcgtcgaataaagggtcggtcggggagggacggcggtagcgttgggtttggatttttcgggattttcggggattcgcggggttggggtcgttcgattaagcgagggcgggggggaggggtttggtttgtttttcgttattttttcgagtcgtttttttttagattagggtgagtttttgggtttttgagatgggggaggggtttttttatgatttttttattttagttcgggttgagcgtagttgtttgttttgttttttcggcgtcgacgtttttttttggtttcgcgaatttttttagtttttgcgtttagtttttgcgttgttttatttttgtagtcgtcggtcgttttcgtgtatatttcgggtttaggatttttttttggtagagcgaggttcgggggaggggttgcggtagatttgggatttttagttttgggtttggaaggggttgtttttttttttcgggcgaggtttagggaacggttgttttttggggtagggttggcggggggcggtcgaagtttgcgttcgtgtgtatttgggtgttcgtatgtggaattgtacggttcgttgcgtgtgcggtttgtgcggtcggtgtgtatagttttttcgcgttagggcgtttgtttttttattttagttgaataagggattcgttgagtttcgggatcggttattttgtgtgagaggtat

SEQ ID NO: 1100 - DNA, 6338 bp, Artificial Sequence
  chemically treated genomic DNA (Homo sapiens)
atgttttttatataaaatggtcggtttcggagtttagcgggttttttgtttagttgggatgggagagtaagcgttttggcgcggggaggttgtgtatatcggtcgtataggtcgtatacgtagcgggtcgtgtaattttatatgcgaatatttaggtgtatacggacgtaggtttcggtcgtttttcgttagttttgttttaggaggtagtcgttttttgagtttcgttcgggaagaggggatagttttttttaggtttagggttgggggttttaggtttgtcgtagtttttttttcgggtttcgttttgttaaggaggggttttgagttcgggatgtgtacgggggcggtcggcggttgtagagatgggatagcgtaggagttgagcgtaggagttgagggggttcgcggggttagggaggggcgtcggcgtcgagggggtaggatagatagttgcgtttagttcgggttggggtgggggggttatgggagggttttttttttattttaggaatttagaagtttattttagtttgagggagagcggttcgggaggatggcggaggataggttagatttttttttttcgttttcgtttggtcgggcggttttagtttcgcgggttttcgagagtttcggagagtttagatttagcgttgtcgtcgttttttttcggtcggttttttgttcggcgtagaggtcgcggggaggggttttttaggttgaggagggggttggggcggtcgtacgtttttgttttgcgggtttggagtttttatttcgatttgagcggtttcgatttcggaattttttttgttcgcgcgttgtataatcgtttttcggtttcggtttagtattttcgtcggggagcgtcggtttcggatttagatttaggggtagggagttaaattcgtcgtagttagtttggtcggggtcgtcgatggggtcgtcgatgggggtcgttatgggggtcgttacgggggtttcgtcggttatttatacgtaggcgtggtagatgaacgtttagtcgcgcggtcgttttagtacgttgtagaggaaattttgtagtttgcggtagaaggcgttgcgtttggggggtttttcggcgttcgcgtcgttcgcgcgaggtttgttgaggatgttgtcgcgtttgggggtttcggagtcggcgattagtagcgtttcgtttcgggtggagtcgggcgcgtcggggtttagttttacgaagtttatttttagtttttttttttcgttcgggtcggggtatacgtcgtcgttgcgcgatttttgtattatggtgtttggcgggaggcgtttcgggtcgggtttaggtttagcgggggcggagcgcggggggcggcgcgggttttagtttaggtttttcggtcgggagtcgtatggtcgaggcggcggtttcgtatttttgtcgggtttgggtcgcgcgcggagacgttgcggttatttcgtttcgcgcgtatttcggcgtttggttcgcggtcgcgtcggtttcgttcgtcgtttcgtttcgtttcgcgttaattttcgcgacgttagtcgaaggagaggggaggagaagagagggaggggaagggaggggagagggagggacggggaggggaggggaggggggaaggagaggagaggggaggagagaagagggaaagggaggggaggggagggagaggggacggggagaggggagataggaggggagggggaggggaggagaggggaatgggaggggaggagagtggcggggacggggagaggggagataggagtggaggggggagataggagtggagggggaggggaggggggagaggagggggagtgggggagggggaggggagggtagggggagaggagggggaggtagaagggattaaggttcgcgggattagagttttgggttgagtttgtttaatttttcggttatgtgtatattgattttgcggttatttttgagttcggtagtattaattaagtggatttgtttggtggttttagcgtttttggggttttagagcggtgtttagtcgtttgagtaggattggagtttttttagttgggttttgggagtggacgttttcgggaagggatgggggtaggggttttttttaagattttgttagggtttagtttatggtgattttatgttttcggtgttagggttgtttaggtagtaggattttttagattttagggtgtgtgtagggagggtttgtggaggttggaggtattttgtaaggaaagtagtttaggggaaagggggtggttatagaggtcgggaggtaagaagaggagtaagggttatggggtgggggatgggagagagttatttttagagggttttgaagttttttaaggggtttggatttagttatgtagattttagaaggggtttgtggtaggggtagggattggagggtggttttagggtagtagataggttagtaggaagtttagtgttatatttcgggataaaggaggtagatttgtgttttttggatatagatgggacggtgtttttttgggggtaagtgcgcggaggtggttttttttttgtcggtagttatgtgttttgggaggggtttttttggagttgttgttgggagattaagggatttttgcggtttagtgttgttcgttttgtgaggtgtttcgttattgggtttttttttgtatatttaggaggggtgttattttcgagtgcgtttttgattatatttagtttgtttgtacgttcgtttggtattatgggttttatttagagaaaggttttttgttgaatcgttggcgtcgttttcgtaggtgatttgtttataaaatagttttaattttggtgtagagtgagtttttgagttgtgtttgttttttggtttttagagttagtggttacggggtttgtttttgttgttgttgttttgtttttaattaggttgaatatagaagggtcggtgtaggtagaatgttaatttgtacgttatttaggacgttggggatagacggtaatttatataagtttgtgtatatttaggggtattttttggattttcgtttttttgtttttgtgtttacgtattggttgtgattattagtatgaagtgggtttgttttaagcggttgcggtttttttcgattgttaagggaggaggtattagtttggtgtttttaggggagggagaggattttagtatgtagaaggaagagagtatcgtggtatttttttgtatacgttggttggtgtcgttggttttttttatttattagaagattcgagggagtagtcgtagtttaaaatgtaaattttgtagggttggggttttttattttgtggggggaagttttagattattcggtgtttttcggtagtgttcgggttatacgtgattttttttgggtaagtagttattttaggtttgatgttagagtttagtgggatttaaggttagggttgatttatagaggatgaaggaaaagtgattttagttttcgtttgagtagatgtattagagttgagatgggagtaaggattaaggtgttttggtgtttaggatattgggagagataaatttgtttattttattttttagaaaaaaaaggggaaaattttgttgaggttttggggagttatcggttggttttatagttttttgggggtggtcgagagtggtatttttcgtggggatgtcgggttggaggggtcggtttaggatgtaggtggagttttgtattttgtagttcgcggttttttcgtttataaatggcgttggttttagtagttttgttatattttggaaggttttggaaagtgaattttgtattaaggtttgaaaatttttgtttttttttttgtttaggatgtttttttaaagagttagtttattaattatttatgtttttaattttgtgttttgtatatttacgggttatattgttagtaatttggttattcgtatgtttgttttttgtttttttttttgcgtttaggtaaagtgggtcgtgaaaatgtttagttggggtaaattttatttaagtaggaggaattttatttatgtaaaaatagatgggaaaagcgtttaggtttaaataatttttgttaagatcgtatcgataggattttagagaggatgagtagaatttagacgtacgtggtgtttagttttagcggaggagatagttagttttcgtttaggcggttagggtagtagcggattttacgcgggcgttgtttttttagtatttttagtattatttttttttcggaatttgtaagtttagttttttttttggttttttttaggtaagtaattttaaggtttttttagtgttttacgttattgggttgtattaagcgattagagaatatgaagattgtattgttagaattggttgtttttgtcgattaaggttagtttatttgtttttaaagttttttggtgggttttttttttagtagaaagtaaattataggggttgtgatcgtttattgttcgggttttttcgggtttttcgaattgttttttttggagtttggcgtagagaggggtttagagttaatggttgttggaggataaattgaagtatatttgggttattgttagggagaatttatagggtaattttgtttatatggtgttggttatagagtagattcggtgttttttagaatttacgtttgtgtttttttttaggtgtaggtgtagttttgttgggttatgattttagttttataggttcggtattggaatggtgggattaaaagtgaaaaatcgaggttaggttaggcggtttatgtttgtaagattagagttttgggaggttgaggtgggtagattgtttgagtttaggagttcgagattagtttgggtaatatagaaattttttttttataaaattgtaaaaattatttaggtttggtggtttgtttgtgattttagttgtttaggaggttgaggtgggaggatcgtttgaatttaggaggtttcggttgtagtgagttatgatggtattattgtattttatttttggtaatagagagagattttgttttaaaaagaaaaaaaaattaaaaattagttgggtttgttagtgtatatttgttgttttagttatttaggaggttgaggtaggaggtttatttgagtttaggagttggaggttatagtgagttgtgattatattattgtattttagtttgggtaatagagtaagattttgttttaaaaaaaaaaaaaaaagaaaagaaaagaagaaagaaagaaaaaattaattaattaaatttaaaaatgagggttaggagtagtggtttatgtttgtaattttaatattttgggagttcgaggtgggtggattatttgaggttaggagttcgagattagtttggttaatatggtaaaatttcgtttttattaaaaatataaaaattagttaggtatggtggtaggtatttgtaattttagttattcggaaggttgaggtaggagaattattcgaattcgggaggtggaggttgtagtgagttgaaattatgttattgtattttagtttgggcggtaagagtaagatttcgttttaaaaaaaaaataaaataggtcgggtatagtggtttatgtttgtaattttagaattttgggaggtcgaggtaggtggaatatttgaggtcgagagttcgggattagtttgattaatatggagaaatttcgtttttattaaaaatataaaattagtcgggtagggtggcgttcgtttgtaattttagttattcgggaggttgggaaaggagatttatttgaattcgggaggtggagtttatagtgaatcgagattgtatgattgtattttagtttgggtaatggtgcgagattttattttaataataaaaaataataataaaaaaaataaacgaataaaaattttaggaaattaagtatgggtagtgatttgagaggtatatgagttttttttggtcgtttttttgtgtggggtcgttagtagcgggatcggggaggcggggattgttattgtgagtttgtgtaagacggttatatggtgttggtggttttcgcgggttgtggtttttgttagaataggttagattttatgtttttttgacgttgtgttgttatgggtgggatttgtgtttaggtgtttagttttatttgcgttttgagggtttcggtattagtgataatagtttttgcggatattggaaagtagggttttttaggttattatttcgtgttttttagtggaaatggagggagttgttttttcgttattgcgtttttagaaaaatagacgattttatagaggtttggaggaataagatttaa

SEQ ID NO: 1101 - DNA, 9204 bp, Artificial Sequence
  chemically treated genomic DNA (Homo sapiens)
aaataaatgaatatggaaagaaaaatatagtaaatatgataaagttgttaatgtaaatatgtaattaataaatggttatatttaaaaatataatagtttttagaaaagagagttgatgttttttataatattttttatttgtaaaagtaatatttttttggtttgaaaaaaattatagaaatatatgaagtaaaaagtatatgtttttatttttttgtttttgtgttttaattatttttttaaggtaggtatttttttggtgtgtatttttttagatattttttgtaaaattttttattatgtatgtatgtttttatgtattttttttttatatttatatttatattttaaagaaatatagaaaatattatttttttttttagttagtgtgttattttgttatttagggtggaatgttgtggtgtaattatagtttattgtagttttagttttttggtattaagtaatttttttgttttagttttttaaattgttgggattataggtatgagttattatatttggttaggaaatatttttgaatagttgatgtttttaggcgatgaaggtatgtgtggaagatatttgatgaaaggttttggtaataagtattttaaggaagaaaattaaatatttattgaatttttattattattattattattttatattttatagagtatttttatgagatgattttatttgagtttcgtaatagtttttaaggtaggtaagaattattatttttattgataaatgatgaagttgttgtttgaaatgattaaaagataatgtttaaggatattttaaatttttatttttattaaattaaggaaaagataatggaaaagttagtgttgtattggtttgggtatttttttgattatagttatttaaaatagatttttttttttttaattatggaaatttttaaatacgtaaaagtagagagaatagttaaatgaatttttaagtattattgtttaatttttatagttattttttttaatttttttaaaattatattttaagttttaggtttaatgtgtaggtttgttatatatgtatatatgtgttatgttggtgtgttgtatttattaattcgttatttatattaggtatattttttattgttattttttttttttttttttattttataataggtttaggagtgtgatgtttttttttttgtgtttatgtgtttttattgtttagtttttatttatgagtgagaatatgtggtgtttggttttttgtttttgcgatagtttgttgagaatgatggtttttagttttatttatgtttttataaaagatatgaatttatttttttttatggttgtatagtattttatggtgtatatgtgttatatttttttaatttagtttattattgatggatatttgggttggttttaagtttttgttattgtgaatagtgtcgtaataaatatatatgtgtatgtgtttttatagtagtatgatttataattttttgggtatatatttagtaatgggatggttgggttaaatggtatttttagtttagatttttgaggaattgttatattgttttttataatggttgaattagtttatagttttattaatagtgtgaaagtgtttttatttttttatatgttttttagtatttgttgttttttgattttttaatgattgttattttaattggtgtgagatgttattttattgtggttttgatttgtatttttttgatgattagtgatgatgagtatttttttatgtgtttgttggttgtataatgtataaggtgtaaggaagggatttagttttagttttttatatatggttagttagtttttttagtattatttattaaatagggaattttttttttattgtttgtttttgttaggtttgttgaagattagatggttgtagatgtgtggtattatttttgagggttttgttttgttttattggtttatatttttgttttggtattagtattatgttgttttggttattgtagttttgtagtatagtttgaagttaggtagtatgatgtttttagttttgtttttttggtttagatttgttttggtaatttaggtttttttttggttttatatgaattttaaagtagttttttttaattttgtgaagaaagttattggtagtttgatggggatggtattgaatttataaattattttgggtagtatggttatttttacgatattgattttttttatttatgaatatggaatgtttttttatttgtttgtgtttttttttattttattgagtaatggtttgtagttttttttgaagaggttttttatattttttgtaagttggatttttgggtattttattttttttgaagtaattgaatttttatagttattaatttttgataaatttttatataatttgttaagatatggagtttaaaatattgttggtaatgtaattaaatttggagattatggagagtaatttatgtagtgtgttttgagtatgaataatgtatattttgtatgtataagtttagaaaagtagttggagataagaagtgtttaaagattaaattaaatttgttttgggtgaggttattataatgattttttatttaagtttattttgatattatttttattatcgtaattttagtttttggtttaatgtttagtatatagtaggtgtttaaaaattgttgaatgaatgagtttgtttagtagtttagattttagtagtatgaagaagtttatgtattgtagtataagtaatttttgtagaatgttttttaatgtgtatttggtgttttttatgtttaagatttttattagttgtgttggggtttattttaagtgttttatatgtagtaatttttttaatttttgtaagaattttatgaagaaggtattattataattttttttgtgttttatagataagttatttgtaagttggtaaagattatatagattataagcggtagatttgggaataaaatttagagtttgtgtatttagttattattttgttgtggtatttgaatagtatttatggaatatttaatatatttggggtattttgttaggtgttttattgttgggttaatttataaaagttatttttttgtaatgttagataacgagagggtgttgtatatggaatagttttttttttttttttttttattttttttttttttaatagattttgttattttttttgtgaatttaaggtatttttaagtgttgtgtgggagggaatgtggtagattgattttattgagattttgttaaattttggttttgcggttattaaagacgtattattttttttaagatttttaaagggggttattattacgggtttgtaggttttggtttgtatttagaggagatattatttttttaaatgagatatggaagaggaagtgttatgaattgtaaataaggttgatagggaattgtttggtgatggggatggagaaaaattgttttttttaaattaggttttattttttatttttttatttaattttgttagagtttattttattttatttgttgagtttattagtaggaagagaggagtttttttaaagatttttttttttttttaaataaatattttttagataaatatgagtatatttatatagtagagtattatgttaatattgaaaagatggaaggatggagttttgttcgtagttagtttaggtaatatagtgagattttgtttttatataaaaataaataaataaataaataaataaataaataaataaaagatggagttttaaaggttgatgtagaacgaatttttagtgtatattataaagtgaaggttgggtagggtggttcgtgtttgtaattttagtattttgggagattgaggtaggaggatggattgagtttaggtattggagattagtttgggtaatatagtgagattttgttttaaataaataaattaaatttaaagggaaaaaagttaaggtttaaatagtatttatattaagtaattgtgggaagagaagggtgatatgtttatatatttgtgtttaagaatttgtttggaaaaaaaaggaaatataaaaatgtttttgttaaaagaaaagtttttttattttaagtttttttgtgtttttttaaaatttttttttgttatatatatttattatattttagtattaaaatattttatttgttaatttggaaaagtaaaagcgtgaatatagtaaatatttaaaaatagatgaagataagtaataggttatattaattgtatataattaatttagtttgaattaggtgtagatataataattttgtgtgtttattttggtgaagaatggttttttaggttgttattaaaaagtatttttgggaggtaaaagatataggtatttggaagatttatatttaatgaagttaggggatatttgatgttattttttaggtgtggggagatatggatagaaaattagaaggaacgaatgtggttaggaaggaattggagtttttttttaaatagttgttataagaagtttatatacgtggagatagttgtgattagaataaagttgtgttttggatgttttttttggcgatttgggttagagtagtttagttgtgtgcgaaatgggaatataaatggtttggggagttgatatagacgcgagatattcggatgaggggcggattggtcgaacggagagtttttttttcgattcggtttcgtttcgtatggtttcgttttcgcgttttagagtttcggtattagtttttattttgtattgagtttcgggatttcgggagagcggttaatgtgtggtcgttgcgttttttttgtttgcgtcgggtattatttgcgcgtcgtagaaagttcgtttggtagtttggatattttttttaatcggtattcgtagacgtttttgtagtcgcggtcggcgttcggttttttagttttgtgcgtttaattgttttgcgttgcggggtgtcgcgagttttattttcgcgtttttttttttagataggcgttgggagaaagaatcggttttcgagttttgggtatttcgttcggttcgaggtgtaggatgtagagtaaggtgttgttggtcgtcgttttgtggttttgcgtggagattcgggtcgtttttgtgggtaaggagtttattttggaggaggaaggtagataggtcgggtgagggcggagaggatttgaaagttagatttaattcggaatcgtagagttggagagttggataggatttgatattttgcgattttttatttattagtggggaaattgaggtttagagattggtttaagattatttagcgagtttgtggtcgtttgtgttttagtttagttttttttttaggattttggtttgcgatagggatttcggttggagtatgttttgagatgtcgatatatttttaggtttttgggaggttggggtgggaaggcgtttggggttggtaggtaggaggtgttttcgtaggcgagaataggcggtgaaaagttgtttggttgcgcgtaatattttagttcgggttcggggaagaaaattttgtcggaattttaggtcgggtttttcggatcggacggtatattcggttttgtttttttggggattcggttcgttgttgtttttatgttcgaatatatttgtatattattgtgtgaagtggggtttggagcggagagaaattttttttttttttttggtgtaggacgtcgttttttttgtagagcgaagaagggggggaatagggatttgttttgggggttttgatagtttttttaagggtttttaagtaatagttaattgttttgcgtaaagtattgtatattttttaaagcgttgtggtttttggtgtaagcgtatagttagaagtttaagtttcgaaaattttttttgtgggttttggtatttagttttagtgttatttttttttttttttgtcgtttaaaattttcgttttttttaattaggaatatatacgttttttatgtaatagttgtttgtttttttttttttattttttttttttttttaattttttagataatattttttttttgtagttagtttgttgatatttagatttttattttttgtagggtgagaaaggggaaagggttagagaaagaaaaaaaaaaagtcgaataatttagggaaaaaaattttttattttttaagataagaattatatgttttagaagatatttatatttatatatagtattaggattatttgtttatggttattgaattttttttataatgatttggtttaacgggtttagtttattatggatatttatttgttttagataagttttttttttttttttttttgggtagagaatgaaggtttggaatatgtggttgttttgtattttataaagaagtgagttgtttttaagtttggggtgttttttagcgtagtagtaacggtaggtcggtcgttttgaatataatggtgaatttgtttttttggagtgtattatttgtttaattggattgggttgtaattggtgttattaaattttagagatagaggtattgttgtttttttttttcgtttttgagttggaagggtaatagtgtataaattaattaatattggttatgggatttgaatatagaagggttttttattgagtagtagtatgtgtattttttatagttatttttttagaattttttgaagagtttagtttaagtttgttaatgaaaacgaatgatatttaatggagtaaaaataaaaaataaaaaattatgttggtttataaatatgaatttgaagttattgagagttttgttgaatagatttttgttgtaaacgtgtttttagaatagtatggtatagttttagttttttatgaatgaaggatatatttttttttttttaaaatatttgttatataggaaagtgtgtttagaatgtgatttgtggtaataaattatgagagatttttaagagtttttgattttggtagtcgagtgggtatagtttattgagaattatttttattgttatttgtttttttataagaatgtgtttaaataatggttttttttttatttggatggtagtgtgaattgtatattatgtttttagtattttttttaatttagtgttttttagttaagtttgaaatttgtgttatttaaatgaattgtttttatttttttttttttagataaagtgggattttaggttttattttgtttttaaatattttggttttttgtttgtttgttttgggggtagttattttttttatattaaaaagtattgtgtaggttgggtgtagtggtttatttttgtaattttagtatttagggaagtagaggtaggaggatcgtttgagtttaggagtttaagaagtgtttgggtaatatagcgagattttattttttatttaaaatataaatgtaattttcgttttacgtataaagtattgtgtaaattaattaaatatgattatttagattagtaattgtttaagagtggtttatagattatttgtggtaggataatttgaaatgtttgttaaaatgtagatttgtagatttagggatattttgatagagtttaaagttttaagaataaaattgttttaaatataagttagtattaatgttagttaatttttgagatatattgatataatttagtttttagttttttaaaaattatattattgatttaaaaattatgatattgattagttatgttagtaatttattttgtatatttgtgtggtgtgtgagaatatgtgtagttatttatttattttgtttgtatttgtttatattgggatttttagatttaatgtattggatgtttgtattgggtatttatttatattttttttatttatttcgttttatatttcgttttatttgtttatatttttttatttgtttagtaaggttaatgttagtttaggtttagggagttatttttttttagttgatatgatttagaaagtttgggagtttgtttaatattaattatttttttaaagttggtattttttaggttttgatatttattaagattttagtatagtggataattttttttttttttatgtttttttaatattttatagttttttatatttagttgatagagaatttagttattttgttgtagagtgatttatggtgaggaatttatgttatggtatttttttggtttttattttttataggtaaagataagttttttatgtttgaagtttgatgttaggatgagtttagggttttgatgaataagtttagattttttaattgtaatttattagtattgtatttaaaaaaatttatatacgtttttaaaaaagggtaatgttaatgaattataatagagagaaaagtatattagtttgtatgtatgtgtgaaattgggaaaattttttacgaaaatatttatatattttttaaaaaaagggtaatgttaatgaattatagtagatagaaaagtatattaatttgtatatatgtgtaaaattgggaaaattttatatatatataaaagtatattaatatgtatgtatgtgtggaattggggaatgtttttttttttttagttttttttttttgtttttaatgtatagtttttatgagttattattttagttgtggtagtttggttattaggggaagcgtattagaaaattgataaaggaaaatgagataaggttatagatttttttattttttttagggtacgtagatgaattatataaaaattcgtttaagtgggattcgttaattagtaatttagttaaatgtgtatattttatgttttataagaaatgttagtgggtttttttttaagggagtgagattattagatgaaggtttatttggttttaatgtttcgtatttttttgtaagattttgaagttggtaatgtaggaaaataggaattttattttagttttatgaattgtagaattgttgtgttggtttatgattatttgtttattttttttgttatgatatagtttgtgaatttttattgagaatggtgaaaagtaaatttttagttttatataatgaattgttgaagaggttttttaaagtatagagtatgtattgtttatggaaggtgttttttattaggtttaatttagtggtaattatatttatttatttaatttgtttttagg

SEQ ID NO: 1102 - DNA, 9204 bp, Artificial Sequence
  chemically treated genomic DNA (Homo sapiens)
tttagaaataaattaaataaatgaatgtagttgttattgagttagatttaataggaaatattttttataaataatgtatattttatattttaaaaggtttttttagtaatttattgtataaaattgggaatttattttttattatttttagtaaaagtttataagttgtgttataataggaagaatgggtagatggttataaattaatataatagttttgtaatttatggagttagggtggagtttttgtttttttgtattgttaattttaaggttttataaaaggatacgggatattgaaattaaatgaatttttatttgatgattttatttttttgggaaaggatttattgatattttttatagaatataggatgtatatatttgattaaattgttgattaacgaattttatttagacggatttttatatagtttatttacgtattttgaagggagtgagagaatttatgattttgttttatttttttttattaattttttagtgcgttttttttggtaattaaattgttatagttgaaataatggtttataaagattgtatattaaaagtaagggagagaaattgaggaagagaaaatattttttaattttatatatatatgtatattaatatatttttatgtatgtgtggaatttttttaattttatatatatgtgtaaattaatatatttttttgtttattgtaatttattagtattattttttttttaaaaagtatatgaatattttcgtgaaaaatttttttagttttatatatatatgtaaattaatgtatttttttttttattgtaatttattagtattatttttttttaaaaacgtatataaatttttttaagtgtaatgttaatgaattataattgggagatttgaatttatttattaaagttttgaatttattttgatattaagttttagatataagaaatttgtttttatttataagggataagaattagaaaagtattatggtatagattttttattatgggttattttatagtaagataattgaattttttgttaattaaatgtgaagagttatgaggtgttgaaaaagtatgagagaaagaaaaattgtttattatgttagggttttaataaatattaagatttagaaaatattagttttaaaaaagtaattgatgttgggtaggtttttaagttttttaagttatattaattaagaaaaaatgattttttaggtttaaattggtattgattttgttgggtaaataagagagtatgaataaataggacgaagtatgagacggaataaatagagagagtataagtaaatatttagtgtaaatatttagtgtattgaatttgaggattttaatatgaataaatgtaggtaaaatgaataagtgattgtatatgtttttatatattatatagatgtgtaaaataagttattgatataattggttaatattatggtttttaagttaataatatggtttttaaaaaattggaaattaagttatattaatatattttagaaattaattggtattggtattgatttatgtttagaatagttttgtttttaagattttagattttgttagaatatttttgggtttataaatttgtattttaataagtattttaaattattttattatagatggtttatgggttatttttggatagttgttggtttgggtggttatgtttaattaatttgtatagtattttgtgcgtggaacgggggttatatttatgttttaaatagagaatggggtttcgttatgttgtttaggtattttttgaatttttggatttaagcgatttttttgtttttgtttttttaagtgttgggattataggaatgagttattgtatttagtttgtatagtattttttaatatgaaagaaataattgtttttaaaataggtaaataaaaaattaaaatgtttaaaagtaaaatgaaatttggagttttattttgtttaagaaaaggaaaatgaaaataatttatttggataatatagattttaaatttgattggggaatattaggttgagaaagatgttgaaaatatgatgtataatttatattgttatttaaatgagaaaaaaattattatttgggtatatttttgtgagaaaataaatggtagtaaaaatgatttttaataaattgtgtttattcggttattaaaattagaaatttttgaaggttttttataatttattgttatagattatattttagatatatttttttgtgtaataaatattttaaaaaagaaaaggtatgttttttatttataggaagttgagattatgttatattattttagagatacgtttataataaaaatttatttaataaggtttttaataattttaaatttatatttgtagattaatatagttttttgttttttgtttttgttttattaaatgttattcgtttttattggtaagtttgagttggattttttagaaagttttaaagaaataattgtaagaggtatatatgttattatttaataaaaagtttttttatgtttaaattttataattaatattaattaatttgtgtattgttatttttttagtttaaagacgggaaggaaaaataatagtgtttttgtttttagaatttgatggtattaattatagtttaatttaattaagtaagtaatgtattttaaaagggtaagtttattattatatttagggcgatcggtttgtcgttattattacgttaggaaatattttaggtttaaaagtaatttatttttttgtggaatatagagtaattatatgttttagatttttattttttgtttagaaagggggagagagagggtttgtttgggataaatgagtgtttatggtggattggattcgttgaattaagttattataaagaaaatttagtaattatggatagatgattttggtattgtatgtgggtgtgagtgttttttaagatatgtgatttttgttttagggagtaagaaatttttttttttgaattattcgattttttttttttttttttttgattttttttttttttttattttgtaaagggtggaaatttggatattagtaaattggttgtaggaaagaaatattatttaaggggttgagagagaaaggaaagtgaggaagaaaagatagatagttattgtatgaagaacgtgtgtgtttttaattgaaggagacggaaattttaggcggtagggagaggaaggaatggtattaaagttaggtattaaggtttataggaaaggttttcggagtttgaatttttgattatgcgtttatattaaggattatagcgttttgaaagatgtgtaatgttttacgtaggatagttggttgttatttggagatttttggggaagttgttaaagtttttaggataagtttttattttttttttttttcgttttgtaaggagagcggcgttttgtattaaggaaggaaaaaaagttttttttcgttttagattttattttatatagtggtgtgtaagtgtgttcgagtatgaagataataacgggtcgggtttttaaagaggtagaatcgagtgtatcgttcgattcgggagattcggtttgagatttcggtaaggttttttttttcgggttcggattaggatgttgcgcgtagttagataattttttatcgtttgttttcgtttgcggaggtattttttgtttgttaattttaggcgtttttttattttagttttttaagagtttgagggtgtgtcggtattttaggatatgttttagtcgaggtttttgtcgtaaattagagttttagaaaaggaattgggttagagtataggcgattatagattcgttgggtaattttgggttagtttttgagttttagtttttttattggtaaatgaaagatcgtaaaatgttaagttttgtttaattttttagttttacgatttcgagttagatttggtttttaggtttttttcgtttttattcgatttgtttgttttttttttttagagtgggttttttatttatagaggcggttcgggtttttacgtagagttatagggcgacggttagtagtattttgttttgtattttgtatttcgagtcgggcgaaatgtttagaattcgggagtcggtttttttttttagcgtttgtttagagaaggaggcgcggaggtggaattcgcggtatttcgtagcgtaggatagttgagcgtatagggttagggagtcgggcgtcgatcgcggttgtaggggcgtttgcgggtgtcggttagagaggatatttaggttgttagacggattttttgcggcgcgtaagtgatgttcggcgtaggtagaggaaacgtagcgattatatattgatcgttttttcggggtttcggaatttagtgtagggtgggagttggtgtcgaaattttagagcgcggaggcggggttatgcggggcggggtcggatcggaggaggggtttttcgttcggttagttcgttttttattcgggtatttcgcgtttatattagttttttaagttatttatatttttatttcgtatataattggattgttttggtttaagtcgttaggagagatatttagagtataattttgttttggttataattgtttttacgtgtgtggattttttgtggtagttgtttggaggggaattttaatttttttttgattatattcgttttttttggttttttgtttatatttttttatatttggggagtgatattaaatgttttttaattttattaaatatgaattttttagatgtttatgttttttattttttagaggtgttttttaatgataatttaaaggattattttttattaagataaatatatagaattattatatttatatttaatttaaattagattgattgtatataattaatgtaatttgttatttatttttatttgtttttaaatatttattgtatttacgtttttatttttttaagttgataggtgaaatattttaatgttgaaatataatgaatgtatatggtaaaaaaaaattttggaaaaatataaaaaggtttagagtgaaaagattttttttttggtagaggtatttttatgtttttttttttttttaagtagatttttaaatataagtatgtagatatgttatttttttttttttataattgtttggtataaatgttatttgagttttggtttttttttttttaaatttgatttatttatttgagataaggttttattatgttgtttaggttggtttttaatgtttggatttagtttatttttttgttttagttttttaaagtgttgggattataagtacgagttattttgtttagtttttattttataatatatattggagattcgttttatattaatttttaaagttttattttttatttatttatttatttatttatttatttatttatttttatatagaggtagggttttattatgttgtttaagttggttgcgaataaagttttatttttttatttttttaatgttggtatagtgttttattatatagatgtatttatatttatttgggaggtatttatttggggaggggagagaatttttaaagaaatttttttttttttgttagtaaatttagtaaataaaataggatggattttggtaaagttggataaaggggtgggagatggaatttggtttggagagggtagtttttttttatttttattattaaataattttttattagttttatttatagtttatgatatttttttttttatgttttatttaagaagatagtgttttttttgaatgtaaattagaatttgtaggttcgtggtaatagttttttttagaagttttggaggaaatgatgcgtttttgatggtcgtaagattagaatttggtagagttttaatgaaattagtttattatatttttttttatatagtatttagaagtgttttaggtttataaaaaaaatggtaaagtttgttaaaaaaaaaaaagatagaaaagaaagaaagaaaggttgttttatgtgtagtattttttcgttatttggtattgtaaaggagtgatttttgtgagttaatttaatagtaaggtatttagtaaagtgttttaaatgtgttgagtgttttatagatgttatttagatgttatagtagagtagtagttaagtgtatagattttggattttatttttagatttatcgtttatgatttgtgtgatttttattaatttataagtaatttatttatgaaatataaaaaaaattataatagtattttttttatagggtttttataagaattaaaggagttattgtatgtaaggtatttggagtaggttttaatatagttagtaaagattttggatatagaaagtattagatatatattaagaaatattttgtaaaggttgtttatattataatgtatgggtttttttatgttgttgagatttaaattgttaagtaggtttatttatttaatagtttttgagtatttattatatgttaggtattgaattaggaattggggttacgatggtgaaaataatgttaagatgagtttaaatgaggaattattgtaatagttttatttaagataaatttaatttaatttttaagtattttttgtttttagttatttttttgggtttgtatatatagaatatatattgtttatatttaaagtatattgtataaattattttttatgatttttaaatttggttatattattaatagtattttggattttatgttttaataagttatatgaagatttgttaaaggttaataattgtggaagtttaattgttttaaagagaataaaatatttaggaatttaatttataggggatgtgaaggatttttttaagaagaattataaattattgtttaatgaaataaaagaggatataaataaatggaagaatattttatgtttatggataggaagaattaatatcgtgaaaatggttatattgtttaaggtaatttgtagatttaatattatttttattaagttattaatgattttttttatagaattggaaaaaattattttaaagtttatatggaattaaaaaagagtttgaattgttaagataaatttaagttaaaagaataaagttggaggtattatgttatttgattttaaattatattataaggttatagtaattaaaatagtatggtattggtattaaaatagagatatagattaatggaatagaatagaatttttagaaataatattatatatttataattatttgatttttaataaatttgatagaaataagtaatggggaaaggattttttatttaataaatggtgttgggaaaattggttagttatatgtagaaagttgaaattggattttttttttatattttatatattatgtagttaatagatatatgagaaaatgtttattattattggttattagagaaatgtaaattaaaattataatgagatagtattttatattagttagaatggtaattattaaaaagttaggaaataataggtgttagagagtatgtggagaaataggaatatttttatattgttggtgggattgtaaattagtttaattattgtggaagatagtgtggtaattttttagggatttaaattagaaatattatttgatttagttattttattattgggtatatatttaaaggattataaattatgttgttataaagatatatgtatatgtatgtttattgcggtattatttataatagtaaagatttggaattaatttaaatatttattaatgatagattggattaagaaaatgtggtatatatatattatggaatattatgtagttataaaaaaggatgagtttatgttttttgtagggatatggatgaagttggaaattattatttttagtaaattatcgtaaggataaaaaattaaatattatatgtttttatttataggtgggaattgaataatgagaatatatggatataggaaggggaatattatatttttgggtttgttgtggggtggggggaggggggagggatagtagtaggggatatatttaatgtaaatgacgagttaatgggtatagtatattaatatggtatatatatatatatgtaataaatttgtatattaaatttagaatttaaagtataattttaaaaaaattaaaaaaaataattgtggaagttgaatagtggtatttaaagatttatttgattattttttttatttttacgtgtttgaaagtttttatgattaaaaaaaaaaaaatttgttttaaatgattgtaattaaagggatgtttaggttaatataatattaatttttttattgttttttttttgatttggtgaaaataaggatttggaatgtttttgagtattattttttaattattttaggtagtagttttattatttgttaatgaaaataataatttttatttattttaaggattgttacgagatttagatgagattattttatggaagtgttttataaagtgtaaaatggtgatggtggtaataaggatttaatagatgtttaatttttttttttaaagtatttgttattaaggttttttattaggtgttttttatatatatttttatcgtttaagaatattagttgtttaaaaatattttttggttaggtatggtggtttatgtttgtaattttagtagtttaggaggttgaggtaggaggattgtttgatgttaggaggttgaggttgtagtgagttatgattgtattatagtattttattttgggtgatagagtgatatattgattaaaaaaaaagatagtattttttatatttttttgagatatagatatagatatagagaagagatatatggagatatatatgtataatagaaaattttgtagaaaatatttagaagggtatatattaaaaaaatatttattttggggaaatgattgaggtatagaggtagagggatgagaatatgtattttttgttttatatatttttataattttttttaaattaagaaagtattatttttataaataaaaaatattataaaagatattaatttttttttttaggggttgttatatttttaaatatgattatttattgattatatgtttgtattgataattttgttatgtttattgtatttttttttttatgtttatttattt

SEQ ID NO: 1103 - DNA, 5457 bp, Artificial Sequence
  chemically treated genomic DNA (Homo sapiens)
ttagatttttgtagtatttatttttgtttttttagaatttagttgttatgggaattagtttaagttagtttgttagaggggttttatggaggagatttgaggtattttggttaatagttttagttaattaagaattatgtgtgtgagattattttggattaggtagttttgaaatggtttgttatgtgaaattaaagatgtaaatgagtatagaggatattttagttttttttaatttgttaatttatagaatggagagttaattttttttaagttattaaataaggggttgtttattatggagtaataagtaattggtatatttgttaagagggagattatatagtttgttttatttttttgttttttattgttttaagtgagatatttaaatataagaataaatgtttgttgggtacggtggtttatgtttgtaattttaatattttgggaggtcgaggcgggcggattatttgaggttagtagttcgagattagtttgattaatatggagaaatttcgtttttattaaaaatataaaattagttaggtgtgatgatatatgtttgtaattttagttattcgggaggttgaggtaggagaatcgtttgaatttgggaggcggaggttgtggtaagtcgagattgtattattgtattttagtttgggtaataatagtaaaattttgttttaaaaaaaaaaaaaaaaaaaaaaaaagaataaatgtttgtttttttaattattgagttttgggtggtttgtaataaagtattattatggtagtagttgattaagattttggttttagtaagaatttatgtaaatttttttgaggaaatatatgttgaattgatataatttattagagtttttgtatttagagtattatttttaaaatttgttggattaggaagaaaaatgtggtggtatgtagaaaatattaaaaagaaaataaaaaaggataaagattttttttttgagttgtttttatttatatataattaaaattttagatttttgagtattttttttaagtttttgatatatttaagtattaatatagttattatttgtttagtatattttagttgatttaataaaaatatagaggttatgtattttagtttttttagagttatatatttataaaagaaaaatgtatataaaaatgaaaatattggattaggtgtagtggtttatgtttgtaattttaatattttgggaggttaaggtaagagatcgagattattttagtaaatatggtgaaatttcgtttttattaaaaatataaaaattagttggatatggtggcgtgtatttgtagttttagttattcgggaggttgaggtaggagaatcgtttgaatttaggaggcggaggttgtagtgagttaagattacgttattgtattttagtttgttgatagggcgagatttagttttaaaaaaatatatatatatattatatatattatatgtataatatgtattatatatataatatatataatatatatataatagaaggtgtatatataatatatataatatagatatatatatatgtgtattatatataatataattttatatttatttatgtatatatatatatatatatatatatatatatatatattgaaagaggtttatttatttattatttaaattattttaaaatttattttgtggtatattgaatttataagttatttttttttaaaggagttttttaatttttaagtattgttttttttgaaagagtaattagtgtattttaaaatttgttttttatgatttgtttttttattattttttgggtaaagtttttaatattgtttgtgatgttaaggtttatttcggtttatttagaattgggtttattgttttttagggggtagttttttagtggttattattgtaatcgagtgattttagaagtaaattgttagttatgtgtatatttgagagtgttataatagatagattaatgttttgtttttgattttgatattatatttattgtagatggtagttgattatggatagaatattgtggtaaaggttatgatttttagatgatgaaattggatgttagagagtttgagaatattagtttttaaaattgttattttataaggttaagtagtgaaatatagtttaaaaagaagagtttagatgaaggaagatgtttattatgaagaaatttttaaaaaatagatatttagtgattgagaggtttaatggttaaggttttggtttaattttcggttttgttaattattaattttgtaattttgagtaagtttattgtatttttatatttttttgatcgtttatttataaaatggggaaaataaaagttgttattttttttagaaagttgttgtgaagattgaaggaaaatgtataagtaaaatatttagtatatttttagtataaagaaggtgtttcgtaaaaagtggttatttttattattattaatattttattttgatattattatggtatgaaataaaattttttggaattaaaataaatagataggataattgagggtaagaaggaggtagtattcgaaaagataaatgtggtttatgtgttatagttgttaatatattttttttcggggtttagatttgagtgaaggttgttgtattttcgtgattgggtatggttgtgttggtgatgatttattatggagtaggatatgggtgataagaagaagttttgtttttgagatagtttttaggatggaggttgtttggtttttaggaggaggttgagtaggaatggtggatttggtagttgtgttgttttatttttgtggttggtttagtttttttgatagggagagaatttaagtttaggttgtggtggttgtttataggtaaatgttatagagtatattttatttttaatttttttttattaaatttaagtggtttttattattatttttttagggaaatattagtttaggggttttgattgatagaaaaggagtgaggaagggaatatgtgtgaaggaagttaaaagtttatggggagagtattggattttttgtggaagggaagtttgaagaggaggtattattagggtgtatttatatagattaaatatttttagaattttgagttagttttttttttttattttgatttttattttttttttaattaaaattttattgttcgttggtattattatttttttagttatgtagaaatgtaatttggagtttttttgtggttttattataaattttttttttatttaatttattgttatgattttattttatataatttttttttttacgtattttttttttttttgttatttttttggtcgggttttttttttattatttttgtaatattaaattaattattttgttttttgttttttatttaattagtttagatttttaatattatatcggcgttttttagatattattgtattttgttatatttttttttaaaagttttattttttttaatgtttttttttttaatgtatgaagttttgatttttttttatgatttttatgatattcgattagttggttttagggggtataatggttttattttatttttttatatttatttttattttggtaagtgtattaaggttttagtatagtgttgatggaatttggaaatatcgttaggggattatttgtaagattaatttaataaattatattattttttttttgggatgaggaaataaggatagagttgaaatatttttttttagaaatgtgtttgttttttttagattataggtaagggtttaatatgatgtgagaaagaggatttttggtttggaatgtaatttatttttattaatatttagaaagtattttgggtgggtaggaatgaaaattagatattgtatatgttatgatatagtttttaattattaaggagatgaagaggtaagttattagtgtaatagaaagtagaatgaaagaaagaggggtttagtaaagttttatttttttgtagaaggtatgagattttatgaggtaggtataggtaagtattatttttattttttagatgataaaatttgtttatttgttttagagtttaagtggtttgtttattgttatagagttaataattagtagattagggttttttagttgggtgattttttgaatgtatgattttgttagtagttagtagagttatgaaatatcgagagaaataattaagtatgtttgggaatagtgtgaatgggtatggagttgggaggttttttgggaaaggtggtatttgatttgggaattgatgaattttagaaaagttaattagagaggtgtgaaaataaaattaaaatggagattgggtttgaaaaatttttaggtaaataaagttaaagattttaaaaatagttatatttttgttaaaattataaatataaattaaatttaatttgggttaatttttgataaatgtttataataaataaaatttaattttagttaatgataagtagttaattaatatatgattatgtgattagggattttttaaaaagttatttaaaaaatgtaattatgtaattgtaaattaagtaaataatgttttattttgtttttataattttttaataaatgtttgtttttgatattttgttatcgtaatattaaatttttgtcggtttggtgttttttaatttatgaattgttttttatttaaataaattttttaaaattttattgtgttttatattttttttaatatagaagaaatgagagaaggaagaatattttagaaataaaggaattttatgggtagagttatagtgtaagataaaaggagtagattaagggtaagattgtttggggagtgaagattttttttttttttttttttgagaagttgagataaagggggaggagaagtttgggtgttttttattgataagtaggttttatttagaggttagttttgtgtgtttggggataaggcgaaagagtagtagaagtgttttttttttaggattaaggaattggggcggggggtgttttttggattttagtttttcgaattagtttttagagtggaattaggaaggattttggagttatagaagatagatagatggtaagtttttttttggagttagaggtttagcggggaggggtgagggtggttgtgtgtaaaagttttgtttttattggaggggagggaatgtaaggtttatagagtagaaaggtggggagagagggaggtaatgggagatggatcgagaaatggtatatttagggggataggttcgttttgaagtttatttgggattattgtttcgagataaaaatatgtgtgtgggggtagggtaggtagcgaggtattaaaatggtttgataaaattttttttaatgtattattttttgaattagttttttttttttttttttttttttatttattttagg

SEQ ID NO: 1104 - DNA, 5457 bp, Artificial Sequence
  chemically treated genomic DNA (Homo sapiens)
tttgaagtgagtggagggagaaggaggagagagaagttggtttaggaaatggtgtattgaagagagttttattaggttattttgatatttcgttgtttgttttgtttttatatatatatttttatttcggagtagtgattttagatgggttttagaacgaatttgtttttttgaatgtgttatttttcgatttattttttattatttttttttttttttatttttttattttgtaagttttatatttttttttttttagtgggggtaggatttttgtatatagttatttttattttttttcgttaagtttttgattttaaaaggggatttattatttgtttattttttgtggttttagaattttttttggttttattttaggagttgattcggaggattggggtttaggaaatatttttcgttttagttttttgattttggagaaggggtatttttgttgttttttcgttttgtttttagatatataggattggtttttgggtggagtttgtttattagtggggggtatttaggttttttttttttttttattttagttttttaggggagaagagggagggagtttttattttttaagtaattttgtttttggtttgttttttttgttttgtattgtgattttgtttatgaagtttttttatttttaaaatattttttttttttttattttttttgtattaaaaaaaatatgaggtatagtaaaattttaaagagtttatttaagtaagaagtaatttatgaattggggagtattagatcgataaaggtttagtgttgcgatgataaaatgttagaggtaagtatttattgggaagttatagaagtaaaatgaaatattatttgtttagtttgtagttatataattgtattttttaggtaattttttggaaagtttttagttatataattatatgttagttggttgtttattattggttggggttaagttttatttgttgtaagtatttattagaaattgatttaagttaagtttaatttatgtttgtagttttagtaagaatatggttatttttaaggtttttggttttgtttgtttgggaattttttaggtttagtttttattttaattttgtttttatatttttttgattggtttttttgggatttattaatttttaggttaaatgttattttttttaggaggttttttagttttatgtttatttatattgtttttaagtatgtttaattgtttttttcggtgttttatagttttgttggttgttggtaaagttatgtatttaaaagattatttagttaggagattttaatttgttaattattagttttgtgataataaataagttatttaaattttgaggtaggtaagtaagttttgttatttggaaaatgagggtaatatttgtttatgtttattttataggattttatgttttttataaaagaataaggttttattgagttttttttttttttattttgttttttgttatattgatagtttgtttttttatttttttagtgattgaaaattatgttatagtatgtatagtgtttggtttttatttttgtttatttaagatgttttttaaatgttaatagaaatgaattgtattttaagttagaaatttttttttttatattatattaagtttttatttgtggtttgagagaggtaagtatatttttgggggaaggtgttttaattttgtttttgtttttttattttaggaaaaaaataatgtaatttattaggttagttttgtaaatgattttttggcgatatttttagattttattagtattgtgttagggttttggtgtatttgttaggatgagggtgggtgtggagaagtggagtaaagttattgtgttttttggggttagttggtcgggtattatgaaagttataaagaaaagttagaattttatatattagaaaagaaagtattgggaaaaataaggtttttgaggaaaggtgtggtaagatataataatatttaagaaacgtcggtgtggtattggggatttggattgattggataaaagataagaaatagagtggttagtttggtgttgtaggagtgatgaagggagggttcggttaaggggatggtagaggggagggaagtgcgtagaaagaaaaattgtatggaataaagttatggtaatggattgaatggaggaggggtttatgatagagttatagaggagttttaagttgtatttttgtatgattaggggaatagtgatgttagcgaataatggaattttgattaaggggggagtaggaattagagtgaggggaaaaagttgatttaggattttagaggtgtttggtttgtgtgggtatattttgatggtgttttttttttaaattttttttttatagaaagtttaatattttttttatgggtttttagttttttttatatatatttttttttttattttttttttattaattaaagtttttgagttgatgtttttttaggaagatgataatggagattatttagatttgataagagaaagttgaagatggagtgtgttttgtgatatttgtttatggatagttattatagtttggatttaggttttttttttgttagagaagttgagttagttatagggatagggtagtatagttgttaggtttattatttttatttagtttttttttgaaggttaagtaatttttattttgggagttgttttaggagtaggatttttttttattatttatattttattttatggtgagttattattagtatagttatatttagttacgggagtgtagtagtttttatttagatttaagtttcgagaagaggtgtgttaatagttgtggtatatggattatatttattttttcggatgttgttttttttttgtttttaattgttttgtttgtttattttaattttaggaggttttgttttatgttataatagtattaaaataaaatattggtaataataaaaataattattttttacggagtattttttttgtgttaggaatgtgttaaatgttttgtttgtatatttttttttagtttttatagtaattttttgagggaaataatagtttttattttttttattttatagatgagcggttagagagatatgaaagtatagtgaatttatttaaagttataaaattaataattagtagaatcgagaattgaattaaagttttaattattgagttttttagttattaagtatttgttttttggaagtttttttatagtaaatatttttttttatttaaatttttttttttaaattatgttttattgtttggttttgtgaggtgatagttttggggattagtatttttaaattttttaatatttagttttattatttgaagattatggtttttgttataatgttttatttataattagttgttatttatagtggatgtggtattaaaattaaggataggatattaatttgtttattgtgatatttttaagtgtgtatatgattggtaatttgtttttaagattattcgattgtagtgatagttattaagaagttattttttaaagaataataaatttagttttgagtgaatcgaagtaagttttgatattataagtaatgttgaggattttgtttagaagatgatggagaaatagattatggggggtaggttttggggtgtattgattgtttttttaaaggaagtaatatttgagaattggggagtttttttgggaaagagtagtttgtaagtttagtatattataaagtgggttttgaaataatttaagtgataagtagatggattttttttaatatgtgtgtgtgtgtgtgtgtgtgtgtgtgtgtgtatatagatgaatatagagttatattatatatagtatatatatatatatatttatattatatatgttatatatatattttttgttatatatatattatatatattatatatgtaatatatattatatatataatatatataatatatatatatatttttttgagattgagtttcgttttgttagtaggttggagtgtagtggcgtgattttggtttattgtaattttcgttttttgggtttaagcggtttttttgttttagtttttcgagtagttgggattgtaggtgtacgttattatgtttagttaatttttgtatttttagtagagacggggttttattatgtttgttaggatggtttcgattttttgttttggttttttaaagtgttgggattataggtatgagttattgtatttggtttaatatttttatttttatatatattttttttttatagatatatgattttaagaagattaaaatatatagtttttgtatttttattaaattaattaaaatatattaaataaataatagttgtattggtatttgaatatgttaaaaatttgaagaaaatgtttagaagtttggagttttaattatgtatgggtagaaatagtttaaaaggaggatttttgtttttttttattttttttttggtattttttatatgttattatatttttttttttaatttaataggttttgaagatagtattttgaatatagagattttaataagttgtgttaatttaatatatgtttttttaagaaaatttatataagtttttgttaaaattaaggttttagttaattattattataataatgttttgttataaattatttaaaatttaatggttagaggaataagtatttattttttttttttttttttttttttttttgagatagagttttgttgttgttgtttaggttggagtgtaatggtgtaatttcggtttattataattttcgttttttaggtttaagcgatttttttgttttagtttttcgagtagttgggattataggtatgtgttattatatttggttaattttgtatttttagtagagacggggtttttttatgttggttaggttggtttcgaattgttgattttaggtgattcgttcgtttcggttttttaaagtgttgggattataggtatgagttatcgtgtttagtaagtatttatttttatgtttaaatgttttatttggaataatgagaaataaaagaatgggataagttgtgtggttttttttttagtaaatgtattagttatttattattttataataaataattttttatttggtggtttaaaaaaaattggttttttattttatggattggtaaattaggaagagttgaagtattttttgtgtttatttgtatttttggttttatatagtaggttattttagggttatttagtttaggatggttttatatatatggtttttggttggttggggttgttggttaaggtgttttagattttttttatgaggtttttttagtaggttagtttgggttagtttttatggtaattagattttaagagagtaagagtaaatgttgtaaggatttgg

SEQ ID NO: 1105 - DNA, 6000 bp, Artificial Sequence
  chemically treated genomic DNA (Homo sapiens)
cggttgttcgttttggggtgtatgaaatttttaatgagatttagtattagttgtagtttttggatattcgcgtttttatttacgattaggagttgggttattttaataattattatggcggtagtagtagtagtgggggtagtagggttttagttttagttttagttttttcgggttttagtgaggagttgttgcggtagttggagtagcggttgtaggagttttgtttcgtgtgtttggtcgggttagatggttttcgtcggtagtagtaggaggatagggagcggttgcgagcgatggagaagttgttggtttcggtggaggagcggtaacggtatttcgtagggttggcggtgggtcgtaggtttttttaggaatgttgttttttagagttgggtcggcgattggtagagttggagcgtaggttggatgtcgtggtcggtttagtgatagtgttgagtgggcggcgaggtatagagttgggaggagtcgcggggtagggaggttattttttaggttatattagtttggtttttcgtttgtttcgtttggaggatcgttttaattttattttgggtttttcggaggagtaggaggagagttggtttggggtttttggggggttgagttattggttgtttgttgttcggggtcgattagagtagttgggggggttgttggttaatgtgagcggggagttgggggggcggttggatttgttggaggagtaggtggtaggggttatgtaggtatgcgggtagttttgttttggggtttttggggagtaggatttttaagttagcgagatttttagtgttttggagcgtagggtgttggatagtgaggggtagttgcggttggtgggtttcggtttgtatacggtggaagtagcgggggaggttcggtaggttacgttggagggattataagaggttgtgggtcggttttaggatcgtgtggatgtttaggatgagatagttgtagagtttatattacggttgaattttattgcggttcggttaggttaattggaggggttgttgtaggtttatggggatgagggttgtggggtttgtggcggagtttaagaggaattaggtcgttttcgggatggtgtggagcgttgtttttgttttttgttgttttttcggggttttggggttggtttaggtgttgggggtttaagtcgtgggtttttggacggttttagcgtgtttgggggtagtttaggtttagtttgtaggttttgtaaggagagttttttgaggttatttttagttttagtttttttaatgatttattgaatgagttttagattattgtggagggttagggcgttgatttggttgatttgggggtaattaaggatcgtattatttttgagattaataggttgtagtaggaggttatagagtatgttatagagagtgaagagcgttttcgaggtttagaggagggataagtataggtcggttagtgttttagtttagaggggcgattgggtcgttttgagggtgtttgtgaacggttggatattgtggttgggggattgtagggtttgcgcgagggtttttttagatacgtggttgggttttgggttgggtttcgggaaattaatattattagttagatgtaggtagttttgttggagaagttggtcgggggataggcgggtttgggtaggcggttgggtgtttttaatagttttttgtagtttttggaggatcgtttgtattagtttagtttgaaggattttattggtgaggggataaaaggtatgaggggattttttttaagttttttatttttttttttttttttttagtttagtttttaatttatttgttttttttttgttttttttaatatgaattgtagttttagttagtattttaggtgttatagtttgtttgtaagagatgatgtaaggttttagttttcgttttttttttggttgtttattaggtttgtgggtggagagaggatgttgttttgttagttagggatttagtatatgtagtaagggattttatggtttttttagtttgtaaagttttatttgttttatttattttttttttgtttatgaagttattatttattttttttatttattggaaattttttttatggtttttttttaatttaattttgttattgtagggtttgtaggagaggttgggtttttagggttttttgggttgtagggatttttaggttttgttggatttttaggattattaggtaaggacgggtaagagggttttatcgggttattaggtatgtgtattgagatttttgttgtagttagggttgttattgttttttttaattttgattttcgttggtagttttaggtttgatattttattttgaatttgataaggggaattgggtattatttgatcgataagggaaaattagaggaaagtgaggaggaattgtgatagttattgtgtttggttaatgggtattaggaggttaatggataatgttggttttattgtagtattggagattaaagttgagtttattatagttgtttggggtgtgaaaggttgggatggtttagtagttgaatagaatggattttatttatttttgttttttttgatattttaatttttgttttgaagtttacgtagtatcgagtataataggagagttttagtagatgtttgttgagtgatttagtgagagttgttttattttttattgtttttttttttttttttataggtttttaaggtgaatagggtgagtgttttttatttgattttggagggagaagtgattaggggttggaggatagaggttttcgggtagttttgggttggggatttagtaggggaagggggttggtattttgttttgagtattttttttaatatttattttttttatttaggagtggagggggtattagtagtttttgtgttttaagtggtatttttagttgttttgagtttgtttcggtttgaattaggtacggtttttttcgatagagttttgtttaatgatggaggttattatgatttagagataggtagttttgggaggggttgggttgaacggttggagaaatgggtgaggtgtgtagtgatatttttttatttttgtttttttcgatagtgtgaatttttattttttgatttggggagatttcggttttttttttatttatttatttttaggtagtggggagaagaagtagttatttatttatttagtagatttttattggggtttgtttttgtttaggtattgttttaagtgttgggaatgtatagtgaataaagtttttagttttttgtcgtttatattttagtgaggtgaaaagatttagagggtttttttttagtttaggagttttggtgcgtttttcggagtttttttggtttttttgattgttatttttgtttttaggcgtgtttatagcgttattggttggacgttatttgttgagcgcggtgttgattgggtatcggtacgagaaagtggaggtcgtgttgtttcgttttaattagggcgtggttcgcgtagatttcggtggttacgagtttgagggtttggagaataagtcggtggtcgagagttagtttagttcgggtattttgggcgtttttagttttattttgtcgttgtaggtcggggatacggtttgcgtcgatttggttatggggtagttggcgtattcggaggagtcgtttattatttttagcggggttttgttttatggggatttagagtttgaatacgcgtagattggggtttcgttcgacgtgtttacgtcggttgaagagatagcgggggcggcgggtttttggggtttcgtttgagacggggtatttagttttgggcgagcgtcgtattcgggttcgtagcggtatcgcgtttagagcggtttttttttacgttcggggcgcgtcggtttagggaggttcggggtcgtttatgtagatttttggtttggcgcgattttttaagaatttttttagggtcggtttgcggaggagtcgattttcgtatttttcgttttttttattggttttttaggtcgattttttgggttttaggttttttcgcgcgggcgtcgtttatcgttatattaaacgatcgaggaataaagatatttggtttttttaaaaaaaattaaacgaatcgttttgttacggtacggggtcgggggttgtcgggcgtgtatagggtacggggcgggagagacgacggttttcggagaggatttcgggtttcgtattgcgttcgtcgttttcgttcggttcggggcggttcggggttggtttaggtagtaagcggcgttcgttcggtttttgcgacgtttttttcgtgttacgttcgtttcgtcggcgttcgttagggggcgttttgcgttttcgttacgtgaggttgcggtttattcggcgggttttgttttttcgcggcggaggcgtggtttcggttgggattaatcggggcggggcggggcggggcggggcggggtcgtcgcgatcgcgggttttaggtagggttgtagatgcgaggtttagttgtatttcgcgtgtttcgggtcgggagtcggagacgtaggtgtaggagagtgcggggtaagtagcgtattttttttttgtattttcgagatcgtttagtcgcgttttaaaaaggtttgtattagttgtgagtttatttgataagcgaggaaattaaggttgagaagtgggaggcgttgttatttgtaggtttaggtaatttgttacgggaagatcggggattaagatttttgggttggtttttttagattcgttcgggttttcgggtgtcgcgaggaagggttttgtttttttcgttttttgtatttttggtcgttgtaggtggttttttggaggaggagtttttacgcggaggaggagttagggtagttgggagcggggatattatttttttggataagaggtagaggtcgggaggaatttcgttagtcgggcgggtaggaagttttgggagtagttttatggaagagaagtagattttgtgcgtggggttagtggtgttggacgttattagtttggtggataagtattttaaggaggattcggagataaggtaggggcgtttaggttttttaggggattttaggggttgttgtagtttagtatttgtgttagcgatcgaggttgtagagatttcgtagtgaggttttgagaattcggttttaaggtcggattcgcgttttttattcgggaattttgggggggtttttagtatgatagaagagaggaaggaattgaggtttttaataagaagatttaggatttaatagtatcgtgttagttaatttttattttaatttaggtattaggtgttaggtgttaggtattaggatttttattttattgataagtatagatttagagattaaggggtttatttaggggtatatagttatttgtttttgttgtttttttttaaattttaagtttatgtatttgttttttattaatatttatttttaatttatttatttatatatttcgtatttatttttgagaaagatttgaggtagtttatagtaaaaagtatgtatagttaaattgttggagaatatttaagattatggtatttgagttttaattatagtttagggtttgttggtattggaggtaaatatgagatgttatgggttatgtatggatagagttggtttatgagttttggtaagtttttttttggtgttaaattttaagaggagtttattagaagttttttttatagaggttaatgaatatcgtttagtagtgggaaatattttttttagttgtttgttagaaattgaagagttagttgttggttttttttttttttttttttttttttttttgagatgtttaagaatgttttcgattttttggatttcgggaattcgtcgtttttagttttttaaagtgtttggattaaaagttgtagttattaatattcgttttttagatgtttttaaaaggagat

SEQ ID NO: 1106 - DNA, 6000 bp, Artificial Sequence
  chemically treated genomic DNA (Homo sapiens)
atttttttttaaaagtatttgaggggcgggtgttggtggttataatttttaatttaagtattttgggaagttgaaggcggcggattttcgaggtttagaaaatcgagaatatttttgggtattttaaaaaaaaaaaaaaaaaaaaaaaaaaagaattaataattgattttttagtttttagtagataattgagaaagatattttttattattaaacggtgtttattgatttttgtgaaaaggatttttggtaaattttttttggaatttagtattaggaaaaagtttgttagggtttatgaattagttttatttatatataatttatggtattttatgtttgtttttagtgttagtaagttttgagttatagttgaagtttaaatattatggttttaaatgttttttaatagtttaattgtatatattttttattgtaagttattttaaattttttttagaaataggtgcgagatatgtggataaataagttagaagtaaatgttgatgagaggtaagtgtataggtttggggtttaaaaagaaatagtagaagtaggtagttgtgtgtttttggataagttttttggtttttgaatttatatttattagtaaaatggggattttgatgtttgatatttgatatttgatgtttgagttgaaatggaaattggttaatacgatgttattaaattttgggtttttttattaaaggttttaattttttttttttttttgttatgttgggagtttttttaggattttcgggtagagggcgcgggttcggttttgaagtcgggtttttagggttttattgcggggtttttgtagtttcggtcgttggtataaatgttggattgtagtagtttttggggttttttaggggatttgggcgtttttattttattttcgagttttttttagggtatttgtttattaggttgatgacgtttagtattattagttttacgtataggatttgttttttttttatgaggttatttttagagttttttgttcgttcggttgacggggtttttttcggtttttgttttttatttaggaggatggtgttttcgtttttagttgttttggtttttttttcgcgtgggagttttttttttagggagttatttgtagcggttaggggtgtagggaacgaaaggagtagggttttttttcgcgatattcgaagattcgagcgggtttaggaaagttaatttagaggttttggttttcggttttttcgtagtaggttgtttgggtttgtagatggtaacgttttttattttttagttttagttttttcgtttgttagatggatttatagttgatgtaaatttttttaaagcgcggttaagcgatttcgagaatgtaaagagaaaatgcgttatttgtttcgtatttttttgtatttgcgttttcgattttcgattcgggatacgcgaggtatagttgggtttcgtatttgtagttttgtttgaagttcgcggtcgcggcggtttcgtttcgtttcgtttcgtttcgtttcggttagttttagtcgaggttacgttttcgtcgcggaggagtaggattcgtcgggtgggtcgtagttttacgtggcgggaacgtagagcgttttttggcggacgtcggcgaaacgggcgtgatacgggggagacgtcgtaggagtcgggcgggcgtcgtttgttgtttgagttaatttcgagtcgtttcgagtcgggcggaggcggcgaacgtagtgcggaattcggggtttttttcggaggtcgtcgtttttttcgtttcgtgttttgtgtacgttcggtagttttcgatttcgtatcgtagtagaacggttcgtttagttttttttagaaaaattaagtgtttttatttttcgatcgtttagtatggcggtgggcggcgttcgcgcgggggagtttggagtttagggaatcgatttggagggttagtggagggagcggagggtgcgaggatcggttttttcgtaggtcggttttggaggggtttttgggggatcgcgttaggttaaaagtttgtatgggcggtttcgagtttttttgagtcggcgcgtttcgggcgtggggagaggtcgttttgggcgcggtgtcgttgcgggttcgggtgcggcgttcgtttagggttaggtgtttcgttttaggcgagattttaggagttcgtcgttttcgttgtttttttagtcgacgtagatacgtcgggcgggattttagtttacgcgtgtttaagttttgggtttttatagagtagggtttcgttgaagatggtgagcggttttttcgagtgcgttagttgttttatgattaggtcgacgtagatcgtgttttcggtttgtagcggtaggatgaggttgaagacgtttagggtgttcgggttgggttggttttcggttatcggtttattttttaggtttttaggttcgtagttatcggagtttacgcgggttacgttttggttggagcgggatagtacggtttttattttttcgtgtcggtgtttagttagtatcgcgtttagtaagtagcgtttagttagtggcgttgtgaatacgtttggggataaggatagtagttaggggggttagggaagtttcggggagcgtattagaatttttggattgaggagggattttttgggtttttttattttattggaatgtgagcggtagggaattgggggttttgtttattatgtatttttagtatttaaaatagtgtttgggtaggagtaggttttagtaaagatttgttgaatgaatgaatgattattttttttttttattgtttgagaatgaataaatgaagaaagagtcggggtttttttaaattagagaatgaagatttatattgtcggaaaaggtaagaatgggaagatattattgtatattttatttatttttttaatcgtttaatttagttttttttaggattatttgtttttggattataatagtttttattattgagtaggattttgtcgaaggggatcgtgtttggtttagatcggggtaaatttagagtagttgaaaatgttatttggggtataggggttgttggtgttttttttatttttgagtgggaagggtggatgttaaaggggatgtttagggtagagtgttagttttttttttttgttggatttttagtttagggttgttcgaggatttttattttttaatttttagttatttttttttttagaattaaatgaaaggtatttattttgtttattttgaggatttgtgagaagaggaaagggagtagtgagaaataaagtagtttttattaagttatttagtaaatatttgttgaggtttttttgttgtgttcggtgttacgtggattttaaagtaggaattggggtattaagaaaaataggaataggtagggtttattttgtttaattgttgggttattttagttttttatattttagatagttataatagatttagttttagtttttagtattgtagtggggttaatattatttattagttttttaatatttattaattaaatatagtgattattatagtttttttttatttttttttgatttttttttatcggttaggtagtatttaattttttttgttaagtttagagtggaatgttaagtttggggttgttagcgggggttagggttggagggggtagtggtaattttgattgtagtaagggttttagtgtatatatttggtggttcgatggggtttttttgttcgtttttgtttggtgattttggaggtttagtagggtttgggggtttttgtagtttaggaggttttgggggtttagttttttttgtaggttttatagtgataaaattgagttgaaggagggttataaaaggagtttttaatgggtaaggaaggtgggtggtggttttatgaatagggagaagatggatggaataggtggagttttgtaggttgagggggttatggggttttttgttgtatatgttggatttttggttggtagagtaatattttttttttatttataggtttagtgagtagttagagggagggcgggagttaggattttgtattattttttgtaggtaaattataatatttggaatattggttggggttgtaatttatgttgggaaaagtaaggagaaagtagatgagttggaagttgggttgggggagggagaagaaaaataaggggtttgaaaggggtttttttatgttttttgtttttttattagtgaggttttttaggttgagttggtgtagacggttttttaggagttgtagggagttgttaagggtatttagtcgtttgtttaggttcgtttgtttttcgattagtttttttagtagggttgtttgtatttggttggtggtgttggtttttcggagtttagtttagagtttagttacgtgtttggaaaggttttcgcgtaggttttgtagttttttagttatagtgtttaatcgtttatagatatttttaagacggtttaatcgtttttttaagttggggtattggtcggtttgtgtttgttttttttttaggtttcggaagcgttttttattttttgtagtatgttttgtggttttttgttgtagtttgttaattttagaaatgatacggtttttggttgtttttaggttagttagattagcgttttggttttttatagtggtttggagtttatttagtgagttattgagggagttgaagttgagaataattttagagagttttttttgtagggtttgtaggttgagtttgagttgtttttaaatacgttgaagtcgtttaggggtttacggtttgggtttttaatatttggattagttttaggatttcgaggaggtaatagggggtaggagtagcgttttatattatttcgaaggcggtttagttttttttggatttcgttataggttttatagtttttatttttatgggtttgtagtagtttttttagttggtttagtcgggtcgtagtgagatttagtcgtagtgtgaattttgtagttgttttattttgggtatttatacgattttggagtcggtttataattttttgtaatttttttagcgtggtttgtcgggtttttttcgttgtttttatcgtgtgtaggtcggagtttattagtcgtagttgttttttattgtttagtattttgcgttttaaggtattgaggatttcgttgatttgagagttttgttttttaggggttttagagtagagttgttcgtatgtttgtatggtttttgttatttgtttttttaatagatttaatcgtttttttagtttttcgtttatattggttagtagtttttttaattgttttagtcggtttcgggtagtaggtagttagtggtttagttttttaggagttttaggttagttttttttttgttttttcgaagggtttagggtggagttgaagcggttttttaggcgagataggcgggaggttaagttggtgtagtttggggggtggtttttttgtttcgcggttttttttagttttgtgtttcgtcgtttatttagtattgttattgagtcggttacgatatttagtttgcgttttagttttgttagtcgtcggtttagttttggagagtagtatttttgagggggtttgcggtttatcgttagttttgcgaggtgtcgttgtcgtttttttatcgaggttagtagtttttttatcgttcgtagtcgttttttgtttttttgttgttgtcggcggaagttatttagttcggttaggtatacggagtaggatttttgtaatcgttgttttagttgtcgtagtagttttttattggggttcggaggggttgaggttggggttggggttttgttgtttttattgttgttgttgtcgttatgatggttgttgaggtgatttagtttttggtcgtgggtggagacgcgggtgtttaggagttgtagttggtgttggattttattgagggttttatgtattttagggcgggtagtcg

SEQ ID NO: 1107 - DNA, 5252 bp, Artificial Sequence
  chemically treated genomic DNA (Homo sapiens)
gttttaattgaaatgatttattttgggagtagattaataattgagatggtgttaggaatgttaaaaagtttttgttagttttaaatattgataaataaaatttaattaaagttttagaagaaaatataaaggaaaattttataatatcggatttggtagtgattttttagatgtgataataacggtataggttattatagaaaaaataaataagttagattttatgaaaattttgaaatattgtgatttaaaagataatattagttattttatatggtaaggaaaaagaatttttaagacgatattattaaagtaaaaagataatttatagaatgggagaaaatgtttttaaattatattatttgtaagggattaatatttagaatatatagataatttttaaaatttaattataataaatttaatttaaaaatgggtaaagtattgaaatagatatttttttaaagaatatacgtatgaaaagatatttagtattacgaattattagggaaatattaattaaaattatattagatgttattttatattttttaggatgggtattattaaaataataataataataataataaagtttttatatattaataataaattatttaaaaaagtttataagaaaataagtttatttgtaataattatagaaaataaaatatgtaggaataaatttatttaaggagtagaaagatttgtatgtaaaagttataaaatattgatgaaaaaatttaagaaataaataaataaatcgaaagatattttatgtttacggattagaaggattaatgttgttaaaatgtttattttatttaaagtgatttaatgtaattattattaaaaatttaatgatattttttttatagaaatagaaaaaatagttttaaaatttatgtggaattataaaagattttaaataattaaagttatttagagggaaaggaataaagttggaagtattatattatttaaatataaattatattataaaattatagtaattaaaataatatagtatttgtataaaaatagatatatagattaatggaagtgatttatagtttaggaaaaaaatgtatgtatttagggttaaataatttttgggatgtgttaagaatatataatggagaaggaatagtttttttaataaatgggattgggagattgtatgtttatatgtagaagaatggaagtggatatttgttttataaaatatataaagttaatttaagatagattaatgatttaaatgtaagatgaaagattataattttagtaatttgggaggttaaggtgggtagattatttaaggttaggattttaagattagtatggttaatatggtgaaatttcgtttttattaaaaatataaaaatagttgggtgtggttgtgggtgtttgtaattttagttattcgggaggttgagataggagaattatttgaatttaggaggtagaggttgtagtgagtcgagatcgtattattgtattttagtcggggtaatatagtgagattttattttaaaaaaaaaaaaaaaattattaaaagaaattaagggaaaattttattggtttgggtaaaattattttggatattaatttaaaggtttaggtaataaaagtaaaagtagataaataatattatattaaattgaaagtttttgtaaagaaaaaaaaaatttaataagtggaaagataatttatggaatgggagaatatatttgtatttatatatttaataaggaattaatatttaaaatatataagaaatttaaataatttaatggtaagaaattaaataatttaatttaaaaaaatgggtaaagtatttgaataaatatttttaagaataagataaattattaaaaggtatatgaaaaaatgattagtattattaaatattagttaaataaaaattaaaattagaatgagatattattttatattttttagaatgattattaatagtttgggtatggtggtttatgtttgtaatttaggtattttgggaggtcgaggtagggagattatttgaggttagtagttcgaaattagtttggttaatatggtgaaattttatttttattaaaaatataaaaattagtagagtttggtggcgtatatttgtagttttagttattttggagattgaggtaggggaatcgtttgaatttaggaggtagaggttgtagtatatcgagattgtgttattgtattttagtttgggtgatagagtaagattgagttttaaaaaaaaaaaaaaaaaaaagattattattaaaaatataaaaaataataagggttaacgaggatgtggagaaaagggaatatttgtatgtagttgatgggaatgtaaattagtataattattatggaaaatagtttggaagtttttgaaaaaattaaatatagaatttttatatgtgtttgtaatttaattattgcgtatgtatttaaaggaagtggaattagtatgttgaagagatatttgtatttttatgtttatagtcgtattatttataatagttaagatgtggaattatttttattgtttatttatgggtgtatggataaagaaaacgtggtatacgataggaacgtaatgaagtattatataatttttataataaagaaggaagtttttttatttgtgataatgtgaaaaaatttagaggatattatgttaagggaaataatttaggtatagaaagataaatgttatatgattttatgtgtggagtgtaagaagtggaatttagaggaatagtaaaatggtcgtcgaaagaatttgggatggagagagattgaagagatgttggttaaaggatgtaaaattttagttagaagaaatcggtttaagagatttattgtatgttttggtgattttagttaatagtaatatatggtgtattgaatattattaagagattagattttatatgtttttattatatatataaaatatataagtatgtgaaaaaataaatatgataaagaggttgttttatttattttataatgtgtatttatatgaaaatattatgatggatattataaatatttttttttttattaattaaatttgttttggttttttttttgagatgtagttttattgttgttgtttaagttgaggtgtaatggcgtgattttcgtttattgtaatttttgttttttaggtttaagcggtttttttgatttagttttttaagtagttgggattatagttgcgtattatttcgttcggttatatttgtgtttttagtagagatagggtttcgttatgttggttaggttggtttcgaattttagattttaggtgatttattcgtttcgtttttttaaagtgttagattttaggttgagatattatatttagtttgtatattgattttttgtttttaaattgtgttgaagtttgttttttagatgtaggagtttttgggtagagattatggggtttttaggtatagaaattattttatttttaaatagaggtaatttgattatttttttttgttattttttttttatttggatgttttataatttttttttttttttgatggttttgtttaggattttaagtattatgttgaataggatggtgagagtgggtatttttgttttgttttatttatgaagggaattttttttagtttttatttatttagtatgatgttggttgtgggtttgttataggcggtttttattatattgagttatgtttttttaatgtttagtttgttgagggtttttaatatgaagaaatgtttagtaaaaagtatgttttatatgtgtgttgagaagattatgtggtttttgtttttagttttgtttaggtgatgaattatatgtattgattgtgtatgtttaattaattttgtattttaagaataaagttgatttgattatggtggatttattttttgatatgttgcgggatttagtttttagtattttttgtggatttttgtttttatgtttattaggaatattggtatgtagtttttttttgtttaatgtttttttttgtttttagtattagggtgatgttagttttatagaatgagtaaaggttattttgggtaaatagtgagatttatttttttttaaaaattatgagttttataaatttaaaatgtatagtgaaaaagtttttataaattttagaaagataggtgtaaataagagatatttgtaagaatgatagtatattaaatgtgtagattttaatttttagttattgtaatattttagtattaagttggaggatgttattagtttgatattttttttttaaatgagagagagaaagaaagatatataaataatatagggagaaaaaaagtatacgttatagagagataaaaagggagatagggaattgtgaatttggatttttgtgttataagataaattttagataatacgattagatttttaattgatatattgtgtttttgttaataaggtggaattttatgatgcgaaataattatatagttttttttattgggatttaaattattttatttgtttttggtttaataggaaaaatataattatggaaaattatgatgatttatttaatacgattgttttatagtgttaataaaatttattaggtattttgtatattatatattaaggagagtttgaattttaggtagaaataaaaaaaaatatattaaatttttttatgtgagtgtagaatttaatcgtttcgtgtaggggtaagtgagtttgagatgtgttttgagtttggtcgttgcgtatgatgtgaagtgataagtttagtttgtagtttttagaaatttttattttttttttgattgatttattatttgaattttatatgacgtagaagaagtttatttatgttttttttatatgttgtggttaatgtgttaattgtacgattcgggttttttattatattttttgtatcggttagtcgagtcgagttattgcgttttggtagtagaagttgtattatgtttatgttatttacggttattattttggtatgttttggtgagttttggaagggaaggagtattagggttatattatgggtttgtagattgggtgtttttttagtagagagttatgttttgaagtaagtgagtggtgaggatgagttaatttttagtttagcgtggcgtttagtggtttaggaggaaagggtaggttgttgtcgagatgaatagtttattatgatttttttttgtagg

SEQ ID NO: 1108 - DNA, 5252 bp, Artificial Sequence
  chemically treated genomic DNA (Homo sapiens)
tttgtaaagaaagattatgatgaattatttatttcggtagtaatttattttttttttttgagttattgggcgttacgttggattgaaaattaatttatttttattatttatttgttttagaatatggttttttgttggggagatatttaatttgtaggtttatagtgtaattttggtgtttttttttttttaggatttattaagatatgttaggatgatgatcgtgggtgatatggatatggtgtagtttttgttgttaggacgtagtgattcggttcgattgatcggtgtagaggatgtggtgaggggttcggatcgtgtagttgatatattgattataatatgtgaaggggatataggtaggttttttttacgttatatgaggtttaagtggtgaattagttaagggaggaatgagggtttttgaaaattgtagattagatttgttattttatattatgcgtaacggttaggtttaaaatatattttagatttatttatttttgtacgggacgattgaattttgtatttatatgaggaaatttgatgtatttttttttgtttttatttgagatttaaattttttttgatatgtaatatgtaaaatatttaataggttttattaatattatagagtaatcgtattaaataaattattataattttttatggttgtattttttttgttaagttagaaatagataaaatgatttaaattttagtagaaaagattatatagttatttcgtattatagaattttattttattagtaaaaatataatatgttaattgaaggtttggtcgtgttatttagaatttgttttatgatataagagtttaaatttatagttttttgtttttttttttgtttttttgtaacgtgtgttttttttttttttgtgttgtttgtgtgttttttttttttttttttatttgaggaaaaaatattagattgataatattttttaatttgatattggaatattgtaataattgaaggttgaaatttatatatttaatgtgttgttatttttataaatgttttttatttatatttatttttttggagtttgtaagaatttttttattatgtattttaaatttgtaaaatttataatttttaaaaagggatgggttttattgtttgtttagggtggtttttatttattttataaggttggtattattttgatattaaagatagaaaagaatattaaataaaagaaaattatatgttaatatttttgatgaatatagaggtaaaaatttataaaaaatattaagaattgaatttcgtagtatattaaaaagtgaatttattatgattaagttaattttatttttagggtgtaaggttggttgaatatatataattaatatatgtgatttattatttaaataaaattaaaaataaaaattatatgatttttttaatatatatgtagaatatattttttattaagtatttttttatgttaaaagtttttaataagttaagtattgaagaaatataatttaatataataagagtcgtttgtgataaatttataattaatattatattgaatgagtaaaagttggaagaagttttttttataagtgaaataagataagaatgtttatttttattattttatttaatatagtatttgaagttttagatagagttattaggaaagagaaagaattataaggtatttaagtaagaagagagtagtagagagaggtagttaaattatttttgtttgaagatgagataatttttatatttagaaattttatagtttttgtttaaaggtttttatatttgagaaataaattttagtatagtttaagggtagaaagttaatgtataggttgggtgtggtgttttagtttgaaatttagtattttgggagggcgaagcgggtggattatttgaggtttggagttcgagattagtttggttaatatggcgaaattttgtttttattagaaatataaatatagtcggacggggtggtacgtaattgtagttttagttgtttgggaggttgagttaggagaatcgtttgaatttgggaggtagaggttgtagtgagcggagattacgttattgtattttagtttgggtaataatagtgaaattgtattttaaaaaaaaaattaaaataaatttaattaatgaggaaaagggtatttgtggtgtttattatgatgtttttatataggtatatattgtggaatggatgaaataatttttttattatatttatttttttatatatttgtatgttttgtgtgtgtggtgagaatatgtaaaatttaattttttagtaatgtttaatatattatatgttgttattaattggagttattaagatatataatagattttttgaatcgattttttttaattgaaattttgtattttttgattaatatttttttaatttttttttattttaggttttttcgacgattattttattgtttttttaggttttattttttatattttatatatgagattatgtggtatttgtttttttgtgtttggattgttttttttaatataatgttttttaagtttttttatattgttataaatgagaggatttttttttttgttgtaaaggttgtatagtattttattacgtttttatcgtatattacgttttttttgtttatgtatttatagatgggtagtaagggtgattttatattttggttgttatgaataatgcggttgtaaatatgggaatgtagatatttttttaatatattgattttattttttttggatatatgcgtagtagttggattgtagatatatatgggaattttatgtttaatttttttaggaatttttagattgttttttataatggttgtgttaatttatatttttattaattgtatataaatgtttttttttttttatattttcgttaatttttgttattttttatgtttttgataatggttttttttttttttttttttttgagatttagttttgttttgttatttaggttggagtgtagtggtataatttcggtgtattgtaatttttgttttttgggtttaagcgatttttttgttttagtttttagagtagttgggattataagtgtgcgttattaaattttgttaatttttgtatttttagtagggatggggttttattatattggttaggttggtttcgaattgttgattttaggtaatttttttgtttcggttttttaaagtgtttgaattataggtatgagttattatgtttagattgttaatggttattttaagaggtgtgaggtgatattttattttagttttaatttttatttagttgatgtttagtaatgttaattatttttttatatattttttggtgatttgttttatttttagaaatgtttatttagatattttgtttatttttttaagttgggttatttgattttttattattgagttgtttgagttttttatatattttggatattaattttttattagatgtatgggtgtaaatatatttttttattttataggttgtttttttatttgttgagttttttttttttttgtagaaatttttaatttgatataatgttatttgtttatttttgtttttgttgtttgggtttttgggttaatatttaaaatggttttgtttaagttagtggagtttttttttgattttttttagtagttttttttttttttttaagatggagttttattgtgttgtttcggttggagtgtagtggtgcgatttcggtttattgtaatttttattttttgggtttaagtgatttttttgttttaatttttcgagtagttgagattataggtatttataattatatttagttgtttttgtatttttagtagaggcgggattttattatgttggttatgttggttttggaattttgattttaggtgatttgtttattttggttttttaaattgttgggattatagttttttattttatatttaagttattaatttattttgagttgattttgtatgttttgtgaggtaaatgtttatttttatttttttgtatgtggatatgtagttttttaattttatttattaaagagattgttttttttttattgtgtgtttttgatatattttaaaaattgtttgattttaaatgtatgtattttttttttgggttatgaattatttttattggtttatgtgtttgtttttatgtaagtattgtgttgttttaattattgtaattttgtaatgtagtttgtgtttaggtaatgtgatgtttttaattttgtttttttttttttagatggttttggttatttgagattttttgtggttttatatgaattttaggattgttttttttatttttgtaaaaaaaatgttattggatttttgataatggttgtattgaattattttggatagaatggatattttaataatattaatttttttgattcgtgaatatggaatatttttcgatttatttgtttattttttgagtttttttattaatgttttatagtttttgtatatagatttttttattttttgggtgaatttatttttgtatgttttgttttttgtagttattgtaaatgggtttatttttttgtaaatttttttggatagtttgttgttaatgtatagaaattttgttgttgttgttgttgttgttttgatgatatttattttaaggggtatgaaatggtatttggtgtagttttagttagtatttttttaatgattcgtgatgttgaatatttttttatgcgtatgttttttggagaaatgtttgttttagtattttgtttatttttgaattgagtttattgtgattgagttttaggagttgtttgtatattttggatgttaattttttataggtggtgtggtttgaaaatatttttttttattttgtgggttgtttttttattttgataatatcgttttaaaagttttttttttttgttatgtgaagtaattgatgttgttttttgagttataatattttaaaatttttataaagtttaatttgtttattttttttgtagtagtttgtgtcgttgttgttatatttaaagaattattgttaaattcgatgttgtgaagtttttttttgtgtttttttttaagattttaattaaattttatttgttaatatttaggattgataaaagttttttaatatttttggtattattttagttattgatttatttttaagatggattattttaattaaaat

SEQ ID NO: 1109 - DNA, 6078 bp, Artificial Sequence
  chemically treated genomic DNA (Homo sapiens)
aaaaagtcggtcggatatagtggtttatgtttgtaattttagtatttcgggaggttgaagttaggagattgagattattttggttaatatggtgaaattttatttttattaaaaatataaaaataaaattagttaggtatggtggcgggcgtttgtagttttagttattcgggaagttgaggtagaggaatggcgtgaattcgggaggcggagtttgtagtgagttgagattgtattattgtattttagttttggcgatagagtgagatttcgttttaaaaaaaaaaaaaaaaaaaagtttacgagtatttcgaaataaataggtttaattttaaattttttattgtttattaataagtatttttatgttttgttggatgggagtatatgtagttttataatatttttggttatataggtttattgaattttaatttttttatttatttttttttattatttttatttttgtggatttaatttagttttttgttttttttgtggattattgtattaggttttttattattttttttttgttttaatttttgtttttttttaagttattttttattgagtttttttattatttttttaaaaatgtaaattttagtataataggttgtagtttaaagttttttagtgatttttcgtagtttagaggatgaggtttttatttcggagtatttatagtttttgtttatttttgtggtttcgattttttttatttttttttaagttttatttttttgattgggtagtattttttgttttttttattttttatgttgttttttgtttttagtttcgtgcgtttgtattttttattgttggaatatttttttttttttttttttttttcgtttttgattttttagagtttaatatttatttttttgggaggttatatgagtttattggataggtgtttttttgtgtgtaaatattattgtgtatggttttgttagagtattttatgttatgtaatttttgtttttttatttatttttttttttatttgttggaaattttgtgagggtagtatttgtgttttgtttaatttggtatttttgatatttaatatattatatttgatatagagatgtttaattaatattgaatgaaagttggaacgaagattatatattatttttttttagatttataaattgtgaagtggttattgttagtatagaatttaatcgggggattgtattaatttatttatttttttaattttatggataaaagatttttagatgattgttgaaaattaagaaaagttattaaaaagtaaatttgaaaaggattatatttttgttgtagtaattttatttttggttaggaatgtatatttaataattaattagaagtaggtaagttttatttatatagatattaattattaagtaatttatgatagtaaaaaaattggaaaaaaaagagagaaatgattaaatatttagaattatggtatatttataaaattgaatattatattgttattaaatagtgtgtttttaaaggatttttagtgatttgtaataatgtttatgttatttgtgaaaaagttggatagaaaattgaaaatatattaagattttaaattatgtaaagggaaaaaaattttatatataaatagagaaaaaagaaaggaatatattaaaataaattttttagtgattgtattttgagtgttttttttgttttttataatttttggtattttttaaattttttataataagtattttttatagttagaaatataataaaatatttttaagttcgagattttagttgtgttagttgtatttgtgtggtattattatttttttttttgttgatggtgtattagtttttttttggggatgtatttttttttattttaggtttttggtgtgaagtggatttttgatttcggttttaggggtgggtatatgatttagatatggttaattagtatattttatttttttggtttttttttaatgggtatatgatttaagttaggttagtgagattcggttttttttataaatttttataggagatgtttatgggggtaggaaaattttatttcgttggtattagtgagttgtaagtttagagttgttttgagtgtatataaggttggtaaaataatataggaaagtattgaggataaaggtggaggaaagtgtacgtgtatttgtgtatatatgtatttatatatattcgttttttaagttttgataattttgagtttttggatttaggaaagtttgaaatattattgtttttggattttttggttataagagttaatatatttaggtttttttgtttgtttgtttaatttaagttgtttttataagttgtaatcgagagtttttgttaaaagaattatgaaaataatgaaatatataaagtataatttttgaatatgtttaggattattataaaatatagtatagaattaatttatatattttatttgagatataaaatatttttattattgttaatgttttattggatattgttgatttataatatagttttttatatattatagtatatatgtttatttatagtgttttatatatatgttttttttttttatgtaataggtagtgggtattattaaaaatagttaataattttaaaggtataagtattggaggttttttgttgtggttagtattaaaattttaatttttggatttaaggagatttagcgtgttttaaggttgggttgggagatattttagggtatggttttttttgtaattagtatagaaggattttaatattgtgttaattaataaggttaaattggtgtgtattggttgaatataagttttgttagtagatattatagttttttatttgagtatttattttttttgttggattgtgaatttttttagatagagattttgttttatttatttatgtgggttttatgtttatttaggtgtttaaaagatatttgttgaatgaaaaataggaatgacggtttaatatggtataattttttatttagttttttttttttttgatagaagtttcgtgtttagaattaaattgtaatatggtttttttttatttatttttttgaagatgttattttttttaatattagttgattgaagaagaaaattgtaaatttttttttttaggtataatgttgatattttaatttatagtgatttttttttaatataaaatgaattttagaaataaattaagattttagaaatttatgattgttttgagtggtattttttatttgttattttaagaaaaatatgagatttgatggtttagagtatagagatttttggtattttagtttttttatagtcgtatgattcgaattttttgttgggagattgggatgtaggtttttatatttgattataaggattgtgagggtaggggttatatttgtatatttgtttattaataatagtatttttggtatttagtttttttttgttttatagtagatattaaataaatgtttgttgagtgagtaaatatttatatttaaagagaggtaattatatatattgattatttgattattttttagtattgataatttttaagtgattagttttaaaaattattttttttatattaatttgggtttttatattattaaataataggagagtttttaatattaaatgaagtggggtagttgggtaattgtaaattttggatgatattttagagaagagtttaggtgtatttgttttatttttttttttgatgggtatttgttatttatttttttatttttaagtttttaggagggatgttttattagtttattagaatgtatagggaaagtttattttttttggagtaggttttttaataagtgtttaagttttgggtttttttttattataataataaatatatttgttttattttttttataaagttgttatcgtgagtatgaaaagacgagtcgttgtggggaagaattattaatttttatatagatattgttgttgtttttcgtttaaggatttattatgagattgtgggtaaggtattttttgggtagtgaaatcgggtttaagagaattattgtatttttattttgtttttgggatcggtaagggtagttaagagttttagttttaaaattgtcgtttgttatagaggtagagaaattattattggggttggtagcgttggggggaggggggaaaacgtgtatgaaaatttgggtttttagagtaaatttcgttacgcgttttttatcgtttttgtttttatataagtttcggtaggggttttttgggcggaggttacgtcgattaataggaatttattgtgtttttataggttacgaagtaggtggagaaattgagtagaaataattagcgaaatcgggtttagtttttatcgcggtgttaggagtttttaataggtttggaggggaatgtcggggtttaattttttaacgtttttttttttatttttatgttatttttacgagtagcggcgtttagttttttttcgttcgaacgtgttcgaggggcgggtagtcgatttttattgtttggggagtatttggtaggtggcgggttcgtgttttaacgtgtgcgtggtgtttagttttataaagcgagcgggtagtatttttttggttcgggaacggttttagtttggtcgtttatattttaggggtggaaaggtggagagagaaaggggtttcggagttaagagcggggagagagggcgcgcgcgttttttttttttcggcgggtacggtttttcggtattaatacgtcgaaagagtaggggttagacgtcgtcgggaagaagcgagattcgggcgggcgcgagggaggggaggcgaggaggggcgtggtcggcgcgtagagggagggcgttgggaggaggggttgttgttcgtcgttcgcggttttgggggttcggttttgtcgcgttcgttgtatttgggcgagagttggaacgtggattagagttcggattttatcgtagttatcgcgatgagaggcgttcgcggcgtttgggattttttttgcgttttgtttttattgtttcgcgtttagataggtgggatatcgcggttggtatttcgatcgtgcgattattcggcgaagtttgtgtttgggagggtggtattcgttagggtgtattcggagagaggattgcgggtttttagtgttcgtgcgttttagttttcggggagattttaggtggttttcggatttttcggcgttttgtttcgtttatttgcgcgaggagattttagttgttggtggtgggggacgcgaattcggggtttttcgggaatggggatagtaagagggggttaggcgtgagcgaggttgtaggtttcgtgcgagtttggggtggtttttgtgtcgacgttgcgcggggggcggaggcggggggtttaggggtttgtatcgagcgtttttttttgtcgtgcgaggcgcggtcgtagtttttttttgttaaaagttgcgtgtgtgtgatcggcgttcgggaggatttgtttgtaggtttttcgtcgcgttgagggtaaagttagagagttttttttttgttttgcggttattgttttttaatcgtaggcgttttttgtgtttagagttggggatcgattcgttgtcgtttttgttcgcggcgttattcgtggagattaatcgaaggttgcggcgttttttcgttttcgggttaggtttttgcgttgggagtgcgcggcgtggggttgttgtggggtcggattttcgcgagtttggaggtggtggcgatagggataatttgggtagggcgtgtggaaagtagtcgttaggttgtagattttttgttttcgtatatttcgtgttcgtttttttttgtcgcggcgtcgttttatttttgtcgcgcgtttcggggcggttggaggttgtgtttgtcgtttgtttcgggaaggtaagggatagcgtgttgggattttgcgttttttgattttaatcgtttagtacgtcggttagagtgttcggtttgtttggcgggttttgaaagtttttagttttcggtgtttgcgatttgtattcg

SEQ ID NO: 1110 - DNA, 6078 bp, Artificial Sequence
  chemically treated genomic DNA (Homo sapiens)
cgaatataggtcgtagatatcgggaattaggggtttttagaattcgttaggtaggtcgggtattttggtcggcgtgttaggcggttggagttagggaacgtagagttttagtacgttgttttttgttttttcggagtaggcggtaaatatagtttttagtcgtttcggggcgcgcggtaggaatgaaacggcgtcgcggtagaaaggggcgagtacgggatgtacgaaagtaaaaagtttgtaatttagcggttgttttttatacgttttgtttaagttgtttttgtcgttattatttttaggttcgcgggagttcggttttataatagttttacgtcgcgtatttttagcgtaaaagtttaattcggaggcggggaaacgtcgtagttttcgattggtttttacgggtggcgtcgcgagtagaggcggtagcgggtcggtttttagttttgggtataaagagcgtttgcggttggaaggtagtagtcgtagagtagagaaagggttttttaattttgtttttagcgcggcggagaatttgtaggtaggttttttcgggcgtcggttatatatacgtaatttttaataaaaggaagttgcggtcgcgtttcgtacggtaagagaaggcgttcggtgtaaatttttgagtttttcgttttcgtttttcgcgtaacgtcggtataaaagttattttaaattcgtacggagtttgtagtttcgtttacgtttaatttttttttgttgtttttattttcgaagaatttcggattcgcgttttttattattagtagttggggttttttcgcgtaggtgagcgaggtagggcgtcggagagttcgagggttatttggagttttttcggaggttggaacgtacgggtattgagggttcgtagtttttttttcggatgtattttggcgggtattatttttttaggtataggtttcgtcgagtagtcgtacggtcggggtgttagtcgcggtgttttatttgtttggacgcgaagtagtaggagtagaacgtagagaaaattttaggcgtcgcgagcgttttttatcgcggtagttgcgatgggattcgagttttggtttacgttttagttttcgtttaagtgtagcgagcgcggtaaagtcgagtttttagagtcgcgagcggcgagtagtagtttttttttttagcgttttttttttgcgcgtcggttacgttttttttcgttttttttttttcgcgttcgttcgggtttcgttttttttcggcggcgtttggtttttgttttttcgacgtgttaatgtcggggggtcgtgttcgtcgggaggaggagggcgcgcgcgtttttttttttcgtttttgatttcggagtttttttttttttttatttttttatttttgggatgtggacggttaggttgaggtcgttttcggattaaggaggtgttgttcgttcgttttgtgaagttgggtattacgtatacgttagggtacgggttcgttatttgttaggtgttttttagataataaaggtcgattgttcgtttttcgagtacgttcgggcgggaggaggttggacgtcgttgttcgtggaggtggtatggggatggggaggggagcgttaggaaattgagtttcgatatttttttttaggtttgttaggagtttttggtatcgcggtaaaggttgagttcggtttcgttaattgtttttgtttaatttttttatttgtttcgtaatttgtaggaatatagtgggtttttattggtcggcgtggttttcgtttaagaagtttttgtcgggatttgtgtggagataggggcgatggagggcgcgtggcgaagtttgttttgggagtttaggtttttatatacgtttttttttttttttttaacgttgttaattttagtaatgatttttttgtttttgtaatagacgatagttttagggttagggtttttaattgtttttgtcggttttaggagtaaaataaaagtataatgatttttttaagttcgattttattgtttagaaagtgttttatttatagttttatggtggatttttgaacggaaagtaataatagtatttgtataggggttaatagtttttttttatagcgattcgtttttttatgtttacgataatagttttgtgaggagggtagagtaggtatgtttattattgtagtgagggaagatttagggtttgaatatttattggaagatttattttaagaaagatgagttttttttatgtattttgataaattaataagatattttttttgagagtttaagaatggaaaaataaatggtagatgtttattagaaaaagggatagaatagatatatttagatttttttttgaagtattatttaaaatttatagttgtttagttgttttattttatttaatattgaaagtttttttgttgtttaatagtgtgaggatttaggttgatgtaagaaaaatgatttttaaagttaattatttaaaaattattagtgttagagggtgattaaatgattaatgtgtataattgtttttttttaaatgtaagtatttatttatttagtaagtatttgtttagtgtttgttgtgaagtaaggaggagttaggtattaggagtattattattaatagatagatatgtagatgtggtttttgtttttatagtttttataattaagtatggggatttatattttaattttttagtaaaaggttcgagttatgcggttgtaggagaattgaaatattaaaggtttttgtgttttgggttattagattttatgttttttttaggatgatagataaaagatattatttaaagtaattataagtttttgggattttgatttatttttaaaatttattttgtattgagaaaaaattattatgagttaaaatattaatattatgtttgagagagaaaatttataatttttttttttaattagttgatattggagaggataatatttttaaaagagtgggtgaaaagagattatattgtaatttaattttaggtacggaatttttattaggaaaaaaaaaaattgaatagggagttatattatgttggatcgttatttttgttttttatttagtaaatattttttgagtatttaggtaggtataagatttatataaatgagtaagataaagtttttgtttaggggaatttatagtttagtagggaaaataggtatttaagtaagaaattataatatttgttaatagagtttatgtttagttagtatatattaatttggttttattggttgatataatattgaaatttttttgtattgattataaaaaaaattatattttaaaatattttttagtttaattttgagatacgttaaatttttttagatttaggaattaaaattttaatgttggttataatagagagtttttagtatttgtatttttagggttgttagttgtttttaataatatttattgtttgttatataaagaaaggaagtatatatataaggtattatgagtggatatatatgttgtaatatataaggaattatattatagattagtagtgtttaatggaatattggtaatgatggaaatgttttatattttaggtaggatgtatggattaattttatattgtattttgtgatagttttgggtatgtttagggattgtgttttatgtattttattgtttttataatttttttagtaaggattttcgattgtaatttatagaagtagtttaaattaagtaagtaaataaagaagtttaaatgtattggtttttataattagaaagtttagggataatagtgttttagatttttttagatttaaggatttaaagttattaggatttgaagggcgagtgtgtgtggatgtatgtgtgtataagtgtacgtatatttttttttatttttatttttaatatttttttgtgttgttttgttaattttgtatatatttagggtagttttaggtttatagtttattagtattaacgaagtagagtttttttgtttttataaatattttttgtaaaagtttatgggagaaatcgagttttattgatttggtttaagttatgtgtttattgggaaggagttagagggatggagtatgttgattggttatgtttgagttatgtgtttatttttgaagtcggggttagggatttattttatattagaggtttgagatggggaagggtgtatttttaaagaaaaattgatgtattattaatagaagaaagagtaataatgttatataaatataattaatatagttaaaatttcgaatttgaaaatattttattatatttttgattgtaaaagatgtttattgtagaaaatttggaaaatattaaaaattataaaaaataaaaaaggtatttaagatataattattgaagagtttgttttaatatgttttttttttttttttttatttatgtgtgaggtttttttttttttatataatttaagattttggtatatttttagttttttatttagtttttttataaataatatgagtattattatagattattaaaaattttttggaaatatattgtttaatggtagtataatgtttaattttatggatgtattataattttgggtgtttaattattttttttttttttttttaatttttttattattataaattatttgatgattaatgtttgtgtgaataaaatttgtttgtttttgattagttattaagtatgtatttttaattaggggtggaattattataataagagtataattttttttaagtttgttttttaatagttttttttggtttttagtaattatttgaaagttttttgtttataaagttgaagaaatgaatagattaatataatttttcggttagattttatattaataataattattttatagtttgtgagtttgaaaggagataatgtatggttttcgttttagtttttatttagtattaattgaatatttttgtgttagatgtagtgtattaggtgttagggatattaagttagataagatatagatgttgtttttataggatttttagtaaatgaggggagagatgaataaaggggtaaaaattatatggtatgaagtattttaatagagttatgtatagtgatgtttgtatatagaggagtatttgtttagtgagtttatgtggttttttagagaggtgggtattagattttgaaggattaggagcggggaaagggaaaggagagaagaatgttttagtagtgggaagtataaacgtacggggttagaggtaggaaatagtataaggaataggaagaataaggagtgttgtttagttaaggaaatggggtttggaggagagtggggagagtcgaggttatagagatagataagaattgtaaatatttcgaaatgagaattttattttttgagttacggggagttattaaaggattttaagttgtagtttgttgtgttaagatttatatttttggaaagatagtgaagaaatttagtgaagggtgatttgaaagggggtaaaagttaaggtaggaagaaaatggtaaggagtttaatgtagtgatttataggagaaatagggaattgaattaagtttatagaggtgagaatagtgagaggggatgaataaggaagttaagatttaataggtttgtgtgattaaaagtattgtggagttatatgtgtttttatttagtaagatatggaggtatttgttagtggatagtgaaggatttggagttgagtttgtttgtttcgagatgttcgtggatttttttttttttttttttttgagacggagttttattttgtcgttaaggttggagtgtagtggtgtaattttagtttattgtaagtttcgtttttcgggtttacgttatttttttgttttagtttttcgagtagttgggattataggcgttcgttattatgtttggttaattttgtttttgtatttttagtagagatggggttttattatgttagttaggatggttttagttttttgattttagtttttcgaagtgttgggattataggtatgagttattgtgttcggtcgatttttt

SEQ ID NO: 1111 - DNA, 5678 bp, Artificial Sequence
  chemically treated genomic DNA (Homo sapiens)
tgtatttaaaaatattgtattttaattttttttttttttatattttattatttatgttatagtttatattttttgtatgttgtgtatttattagtaaattgttgtagttatagttatttgttaatatttttgttttttaatttttatattagagttaaaagtgattgttgtataataatagtattggagtattttgtatttgattgtataagaatatttttaatagagttttatttttttatttgtttttatgttagttagtgtttttttgtttaaatttgagaattttttttagtattttttgtaaggtaggtttaatggtgttgaaattttatagtttttatttgtttggtgatatgatttgtttttgaatttttatttaaattttatttcgaattgtaatttttaggtgttaaaggagggatttgttgggagatgattggattacgaggtgtttttttttattatgtttttatgatagtgagggtgtttttatgagatttgatggtttaaaagtggtggttattcgtgcgtatatgtttttttttttttttgttgttttgtgaagaaggtatttgttttttttttattttttattataattgtaagttttttgaggtttttttagttatgaggaattgtgagttatttagattttttttgtttataaattatttagttttaggtgatattttttagtagtgtgaaaataaataatatagagaattggtattggtagagtgaggtattgttataaagataatttgaaaatgtgaaggtaattttgaaattgggtaataggtagaggttggaatagtttggagggtttagaagataggaagatgtgggaaagtttgaaattttttagagatttgttgaatggttttgattaaaatgttgatagtcgtattgataatgaagtttaggttgagatggttttagatggagacgagaaattattgggaattggagtaaaggttatttttgttatgttttagtagagattggtagtattttgtttttgttttagagatttgtggagttttgaatttgagagagatgatttagggtatttgttagaataaatttttaagtagaaaagtatttaaatataatttggttttttttgaaagtatatagttaagttatatgcgtttataaagagatggtatgaaattggaatttatgtttaaaagggaagtaaagtataaaagtttggaaattttgtagtttgattatgtggtagaaaagaaaaattaattttttgaggaggaatttaagtcggttgtagaaatttatataagtaattaggagttgaatgttaattgttaaataatggggaaatgtttttagggtattttagaggtttttaaggtagttttttttattataagtttagaggtttaggagggaaaaatggttttatgggttttgttgttttgtgtagttttgggatttggtgttttgtgttttagttattttagttttagttgtgattaaaagggtttatagtttaggttgtcgttttaagggtgtaagttttaagttttggtggtttttacgtgtttttgggtttgcgagtttatagaaaataagagttgagttttgagagtttttgtttagattttataggatgtgtggaaatatttggttgtttaggtagaagtttgttgtagggatttagtttttatggagaatttttattagggtagtgtagaggtgaattgtggggttggagtttatatatagagattttattggagtattgtttagtggagttgtgaaaagagtttttttattttttagatgttagaatggtagatttattgattggaaagttgtaggtatttagtgtcggtttatgaaggtagtcgtaggggttgtattttgtaaagttatagggatagagttgtttaaggttttaatagtttatattttgtattagtatgttttgggtgtgagataggggttttaaggagattattttggagttttaaaatttaatgatttttttgttaggttttgtatatgtttgggatttgtggtttttttattttggttaattttttttatttggaatgggaatatttatttaatttttgtatttatattgtgttttggaagtaattaatttgttttttattttaaaggtttattgagggaagggatttgttttgttttaaatgagattttggattcggatttttgggttattgtggaatgagttaagattttgggggattgttggaaagatattattggttttgaaatttgaaaaggatatgagatttgggaaaggttaggggaagaatgatatggtttggttttgtgtttttatttaaatttcgttttgaattgtaatttttatatgggattatatgggaggggtttggtgagaggtgattggattatggaggtggttttttttgtgttgtgattttatgatagtgagggatttaaaagtgatagttttttttgtatatatatattttttttttcgtattattttgtgaagaaggtgtttgttttttttttgttttttatcgtgattataagttttttgaggtttttttagttatgggtaattgtgagttagttaaattttttttgtttataaattatttagttttaggtagtatttttatagtagtgtgaaattggattaatatatttgggaaattttttttgttttttttttttttgaaggatagttttgtttgatattatatttttggttgttaggttttgtatttttaatattttgaatatattattttatttttttttggtttatatgatttttgttgagaaatttattaataattttatgaagttttttttgtatgtgaagaattgttttttttttgtttttttgaaaattttttttttgttatggtgaggattttttttttttttttttttttttagatggagtttagttttgttgtttaggttggagtgtagtgtgtagtggcgtaatttcggtttattgtaagtttcgttttttgggtttatattatttttttgttttagtttttggagtagttgagattataggtgtttattattacgtttggttaaattttttttgtatttttagtagagatggggttttattgtgttagttaggatggtttcgattttttgattttatgatttatttattttggttttttaaagtgttgggattataggtatgagttattgtatttggtcgaggatttttttatatttaatttatttggagtttttttgggttttataaatttggatgtttattttatttatgtttttaaattttgagagttttttatttttatttttttaaataagtttttgtaattttttttttttttattttttttggaatttttttaatgtatattaatttttttaatagtgttttataagttttgttagttttttgtaatttttattattttttttattattttgattgggtaattttaaatgatttgtatttgagtatgttgatttttttttttgtttgatttagtttgttgttgaagttgtttgtgaatttttttaatttagttattttgttttttagttttagaatttttgttttatttttttttatggtttttatttatttttttgttgaatttttaattttgtttatgtattgtttttttgattttgtttattgtttatttatattgttttgtagtttattgagtttttttaaggtaattatttttagtttttgttatgtagtaaagatttttatttttttagggttattttttgttgttttattttttttttttggtggttttttgttttttcgattatttgtgattagtgtggttttgtattgaagtaggtatttattttagtttttatatattagttttagtagagaaagttatttattagttagattgattagagattgttggtgggttgtttgttggggtttatgtataggatttttgttggagttttaaggtgggaagggttggattttgggtttatttattgtggttgtttgtattttgtgtataaggattggtttgaagtatggatttttgggggttgatttggtattgaaatgagttttaagtttgcgtttgtaggggttagtttaatatggggattatttggtatttgagtttatggggataggtttgtttttgagtttatttaggttgttttgggaataaggtttattggggtgagtttagtatttgggtttatatggtttagtatggagttaagatttttggaggttgatttggtgttggatttgtaggggatggtttggattttaggtttatgggtgttaatttggagtttggggttgttggggttaacgtggaggttagatagagttttgggggttaggttagagttggagtaggtttgaagtttaggttttgtgtggttattttggagtttgaagttttaggggttgatttggtttggggtgagtatggggttgaggttatagaggttggtttggtttgtggtaggtttgaattttggtgttggggtttattggagtgggtttggtgtttgggatttgtggtgaagttaggttttattttaattgttttttttttatgtaagagggtatttttttttatattgtgttgtttaggtttgaaggtgagatgatatcggtaatgtgaaattgttttttttatatatttttatgtgtttttttttatttttgtgttgtaattaggtggtataattttttatttgattttttagttttagtgaagttattttcgtgtatggatatttgttcgaattgatgtttttgtaagggatgagcgttagaaatttttgttttgataaatttttatttttatttttgttgatattattttttgaaatagttaatatatttaatagttgaatacggataggatgtttatggaatatgttgataggataaaaagttgaaattgttggtagaaatttaaagttaatattgaagttaagtaaaatattgtttgtagtgttatattagaatagtttgaagatcgtttatttttaagtgataagagatttatttttaagaagtaattgtgtttttaggtagtaaatttttattattttgattgtttttaaataaattataatttttaagtataattttttattttatgagaaaattaattatttatattttaattttttgagtatgtagagagtatagataatgtttttttatgtagaaatatttaaatgtaagatgattttaaattagaaagaatatttgattgatttaaaatttttaaatgggttttaatatttttagaggttttttttatttagggatttttggattgatattattgttattatttattaattttgtttttgtttaaattaagaggttttataattgtttattttttttttattaattttttttttaatattattagttatagagttggttaatgaataataaatataatagtagtttggaggttttaatttgtattttgggaagtattataaattttttaattttttagatataaatgtattaaaaaaaaatttttgttttttatattagtaattgtgtgttttgttttgtaatttagatatttataagaaaatttaaattattttaaattaagatttatgttaaatgtggtttaaaattagtagagttatgtattgtttttttttttaga

SEQ ID NO: 1112 - DNA, 5678 bp, Artificial Sequence
  chemically treated genomic DNA (Homo sapiens)
tttaaaaaagaaaataatatataattttgttggttttagattatatttaatataaattttaatttaaggtgatttagatttttttgtaaatgtttgaattgtaagataaagtatataattattggtatagaaaataagggtttttttttggtatatttgtgtttagggagttggaaaatttataatgttttttaagatataaattgagatttttagattattgttgtgtttattgtttattggttaattttgtggttagtaatgttggaaagggaattggtagagagagagtaaataattatgaaattttttgatttgggtaaaaataaaattaataaataatggtaataatgttagtttaaaaatttttaagtaaagaaaatttttgaaaatattaaagtttatttaaaaattttaaattaattaaatattttttttgatttaaaattattttatatttaaatatttttatataaaggaatattatttatattttttatatatttaggaaattagaatataaatgattaatttttttataaagtaaaaaattatatttaaaaattatagtttatttggaaataattagaataataaaaatttgttatttgaaaatataattgttttttggaggtgagttttttgttatttaaaaatgaacggtttttaagttgttttaatgtggtattgtaggtaatattttgtttggttttaatattgattttgggtttttgttaatagttttaattttttgttttgttaatatattttatgaatattttattcgtgtttagttgttaagtatattaattattttagggagtgatgttagtaagaataggaataggagtttgttagaataggagtttttagcgtttattttttgtagaaatattaattcgaataagtatttatgtacgaaaataattttattagagttaaggaattaggtgagaggttatgttatttggttgtagtatagaaataagaaaagatatatagaagtgtataggaaggataattttatattatcggtgttattttatttttaagtttgggtagtatagtatggagagagatgtttttttgtatggaggagggatagttaagatagaatttaattttattatagattttaagtattaagtttattttagtaaattttagtattaggatttaggtttgttataggttagattagtttttgtggttttagttttatgtttattttagattaggttagtttttggggttttaggttttaagatggttatataaaatttagattttaggtttgttttagttttagtttggtttttaagattttatttagtttttacgttagttttagtaattttaggttttaagttggtatttatgggtttagaatttaggttattttttgtagatttagtattaggttagtttttagagattttggttttatgttgggttatgtggatttagatgttgggtttattttagtggattttgtttttaggatagtttgaataaatttaggaataggtttatttttatgaatttaggtgttaggtgatttttatgttaggttggtttttgtagacgtaggtttaaggtttattttagtgttaagttagtttttaaggatttatgttttaagttagtttttgtgtatagaatatagataattatagtgaatgaatttagaatttagttttttttattttagaattttagtagaaattttgtgtatagattttaatagatagtttattaataatttttggttaatttgattagtgaatggttttttttgttgaagttagtatgtaaagattgaaataggtgtttattttagtgtaaggttatattgattataaataatcggggaaataagaaattattaaaggaaggaaataaagtagtaggaggtgattttaaagaaatggagatttttattgtatgataagagttaaaaataattgttttaagaaagtttaataagttataaaataatatagatagatagtaaataaaattaggaaaataatatatgagtaaaattagaagtttaataaaaagatagataggaattataaaaaagaatgaaatagaaattttggagttaaagaataaaatgattgaattgaaaaaatttataaatagttttagtagtagattagattaagtaggagaaagaattagtatgtttagatataggttatttgaaattatttagttagagtaataaaaggaatgataaaaattgtagaaagttgataagatttataggatattgttaagaaaattaatatgtattagaagagttttagaagaagtagagaaagagaaagttgtagaaatttatttaaaaaaataagaatagaaaatttttaaaatttggagatataaatgaaataaatatttagatttatgaagtttaaaagaattttaaatagattaaatataaagagattttcggttaggtgtagtggtttatgtttgtaattttagtattttgggaggttaagatgggtggattatgaggttaggagatcgagattattttggttaatatagtgaaattttatttttattaaaaatataaaaaaaatttagttaggcgtggtggtgggtatttgtagttttagttattttagaggttgagataggaaaatggtgtgaatttaggagacggagtttgtagtgagtcgagattgcgttattgtatattgtattttagtttggataatagagttagattttatttaaaaaaaaaaaaaaaaaaaagaaatttttattatgataaagagagaatttttaaagaagtaagagaaaagtaattttttatatataagggaagttttataagattattggtggattttttagtagaaattatgtaggttaagagagagtgggatgatatatttaaagtattgaaagtataaaatttggtaattaagaatataatattaggtaaagttgttttttagaaaggaaggagataaaaagaattttttagatgtattagtttagttttatattgttgtaaagatattatttgagattgggtaatttataaataaaagaggtttaattgatttatagttatttatggttggggaggttttaggaaatttataattacgatggaaggtagaggggaagtagatattttttttataaggtgatacgagagagagagtgtgtatgtgtaggggaaattgttatttttaaattttttattattatgagattatagtataggggaaattatttttatgatttaattattttttattaggttttttttatgtaattttatgtggggattataatttaagacgagatttggatgaggatatagagttaaattatattattttttttttggttttttttaaattttatgttttttttagattttaaaattaatgatgtttttttaatagttttttaaagttttaatttattttatagtaatttaaaagttcgagtttaaagttttatttgagataaggtaagtttttttttttaatgagtttttaaaataaaaaataagttagttatttttaaaatataatgtgggtataggaattgggtaaatgtttttattttaaatgggagaaattggttaaaataaaggggttataggttttaagtatatgtaaaatttagtagggaagttattaaattttaaagttttaaaataatttttttggagtttttgttttatatttagggtatgttgatgtaaggtgtgggttgttaaggttttgggtagttttgtttttgtggttttgtagggtatagtttttacggttgtttttatgggtcggtattgagtgtttgtaattttttagttagtggatttattattttggtatttggaagatgggggaattttttttatagttttattgggtagtgttttagtggggtttttgtgtgtgggttttaattttatagtttatttttgtattgttttaatagaggttttttatgagggttgggtttttgtagtaggtttttgtttggatagttaggtgtttttatatattttgtgaaatttaggtagaggtttttaaagtttagtttttgttttttgtgaattcgtagatttaagagtacgtggaagttattaaggtttggggtttgtatttttgaagcgatagtttgagttatggatttttttagttatagttggagttggagtggttggggtatagggtattaagttttaaggttgtatagagtagtagggtttatgaaattattttttttttttaggtttttgggtttgtaatgggaggggttgttttgaagatttttgaaatgttttggagatatttttttattgtttggtaattaatatttagtttttgattatttatgtaaatttttgtagtcggtttgaatttttttttagaaaattggttttttttttttattatatggttaggttgtaaaatttttaaatttttatgttttgttttttttttaaatataagttttaattttatattatttttttgtgaacgtatatgatttgattgtatgtttttagaaaaagttaggttatatttgaatgtttttttgtttagaaatttattttgatagatattttaaattattttttttaagtttaaagttttatagatttttagggtaggggtaaaatgttgttagtttttgttaaagtatagtaagaatggtttttgttttagtttttaatagtttttcgtttttatttgagattattttagtttggattttattgttaatacgattattagtattttggttaaaattatttaataagtttttaggaagttttaaatttttttatatttttttattttttaagttttttaaattgttttaatttttgtttgttatttagttttaaagttgtttttatatttttaggttgtttttatagtagtattttattttgttagtattaattttttgtattgtttatttttatattgttaaaagatattatttgagattgggtaatttataaataaaagaggtttaaatgatttatagttttttatggttggggaggttttaggaaatttataattatggtggaaggtgaaggggaagtaggtattttttttataaggtagtaggagagagagagagtatgtgcgtacgggtaattattatttttaaattattagattttatgagaatatttttattattatgagaatataatgggggaaaatatttcgtgatttaattattttttaataggttttttttttgatatttggggattgtaattcgagatgagatttgggtggaagtttaggaataaattatattattagataaataaaagttgtgggattttaatattattaaatttgttttataaaaaatgttaaagggaatttttaagtttaaataaaaggatattaattaatatgaaaataaatgaaagaataaaattttattaaaggtatttttatatagttaaatatagaatattttaatattgttattgtgtaatagttatttttaattttagtataaaagttaaaaaataaaagtattaataaataattataattataataatttgttaatgaatatataatatataaaagatataaattatggtatgaataataaaatgtgggaggaggagaagttaaaatatagtatttttaaatgta

SEQ ID NO: 1113 - DNA, 6361 bp, Artificial Sequence
  chemically treated genomic DNA (Homo sapiens)
tagtaaatgtttaaatagtagaaatttgtattgtttcgattaataaaggatatgatatatagttacgtgttataaaatgatgttttggttaatgattgattgtatatagatagtggttttattagattataacggagttggaaattttttatgatttagtgacgttatagtaatagttttagtatagtgtattatttatatgtttgtggtgatgttggtgtaaattattttgttgttagtggaataaaagtatagtataaataattatatatattatataatatttgataatgataataaatgataatgttattggtttatgtatttattgtagtatatttttaattattattttagagtgtattttttttatttttataaaaatagttatttgaaaaataattttgggtaggttttttaggaggaattttagaagaaggtattgttattataggagaggatagttgtacgtgtgttattgtttgaattttttagtgggataagatgtggaggggatgatagtgagattgattttgttgatattgcgtaggtttaggttaatgtatgttttcgtgttttcgtttttaaaaaaagtttaaaaagaaaaaaattaaaatgaaatatagaaaaaagtttataaaaaagaatatagttgttaagattgtgtaatttgtgtttttaaataaagtgtatttaaaaagaggtagaagatttttaaaatatgaaaaatttagaaattaataaaggtgtagtaaagttaatttattattagtttaagaaaaaaagtgttgtataaatatagtgtattttagtgtatagtgtataaattttatagtagtgtgttgtaatattttaggttttgatttttatttgttatttatttattgatttatttagggaaaattttatttttgtagtttttatttatagtaagtgttttataaaaggatgttatttttaatttttttttaaattatattttattgttttttggtttatatataattagataaataaaaattattattttggttattgtttgtattatttataatagtaatatattgtataggtttgtatttttggagtaatagtttattttatataatataggagtgtagtagttgtattatttaggtttgtgtaaataaattttttgatgttgatatagggatgaaattgtttaaagatatattttttagaggtatttttgttattatgtaaataataacggtataatattaatggaaaatattaagtggatgtttgtagtaatagtagatattagtattttagatttaaatagaaaatattagtgaatgatatattatgtggtatttttagtgaatgattttattgttttagttttataacgtgattaatagaaaaagtaatttagtttatgaaaatgtaataaaatgtaaatataaatatatttgtaatagaaaaagatataatatgaatataagtatatatgtatatgatattattaattaattttgtgaaaatatattataatatattttatagaaaaatatatatatttagttattattagttattttgatggaagggtaaataataatttttattgtaaagaaataaatatgggtttaaattttaattttttagattttagagaatagtcgggtatagtggtttacgtttgtaattttagtatattggaaggtcgaggtagacggataacgaggttaggagattaagattattttggttaatacggtgaaattttatttttattaaaaatataaaaaaaattagttgggtttggtggtatacgtttgtaattttagttatttaggaggttgaggtaggagaatcgtttgagtttaggaggtagaggttgtagtgagttgagatggtattattgtattttagtttgggtaatagaattatgtataaatattttttttttttttgatagaaaataaatgatgaaaagatttttatttaatataattagataatttatagttttttttttgatgttcgtatattatttattttttaaaagtttttgtttatttgtttttgagataaggtttggttttgttgtttaggttatagtgtagtgatattaatagtttattgtagttttgatttttagggtttaagcgatttttttattttagtttttagagtagatgggattataagtaaatattagtattttcggttaatttatatatatatatatatatatatatttttttttttttttttttttttttttaagagagggggttttattttggtgtattatgttaattttaaatttttgagtttaagtgattttggagtgttgggattattgatatgagttattatgttcggatatttatgtattattttatttgtgttttaaaaaatttttattttttggtttttttatttttaagtaggtgatgttttaaaaattgttttaatttttttttatagtttaatttaggttttagttatttataataaatatttttattaaaatgtagatagtaagttatgattagagaaggaatcggggaataatatagtaggtagtttttttattattttagtttttggtatagagatatagtttagtattgtttaatattttatttttttaagagatatttattttaattaggaatttggttaatttatataaagaagaaaaattgaatgagggaattttaagaattaaggtaaagaaagtaagaagataagtttgagaatgtatgttagttataattaagttgaaaatgtagtatttttttaaaatagtgataagtatattaaatttttattgataaaattattatttaaattttgttattatgatagtagtgatattataggggtatatgataaaaaagtatataatgttaagttttagttattttgtttaaatgtagaaagtaattatttaagatttttttgaaaagttataaaattttggtgtttgtgattgagatggaaataattattagtatggattaaatttttgttttttttttattttgttgattataaaaataatttttaagaggtattttaaaatggataaattaaatgatatattagttatttaaagttttttatattttaaagtgtgtgatgagataaattgatttaaaatagttttagggtgagaattttttgtttaaatttgtagtgatatattggtgaggaatttattttttttatttttgttttattttgattttttaaagggtagtttgtgaagattatagataacgtttgtgttttttagaggtaatttgatttttttattgaagggcgtgtggttttttgatgatagtaggtaagtgttgtttttttttttgtttttttattagtttattttatttagtagaagattgtaagtattggttgtgatgtatttgaggtaaagttgatatagacgaaaattaaggtagaattttatttacgtgaataatttaaggtgaaaaacgagttaaaatataaattatgtttaaggattttttagagtatttatattattgtcgttggagaattatttaagtagatgtatatataataataggtttgttaatttatgtaatttagagtgaaatttataattattatgataatgaataattaattttggattttgtaattattatattttgtatattatatttagattaaattttaaaaataaatttttaatatggatatattaaattgtgaatgttaaatattaatttttaattatatatttagattttatgaaagtagttttaatttttaataaaagtaaggatgaaattatttttataaaatgtaaatttgattttaattataaataattggaagatttaaaataattgaattaaatattgtaaaaaagatgtattatattgatatgagacgtttaattaatgagttattttaatatattttaatgtaaattagaaataataaaatggtaattgtgttaaaaatagttgaaatatttattatgtatttagtgttaatatgtgttaggttgtgtgtttagttttttatatatattatattttataaattattttttttaatgtagattagtaaattaggttagtagatattaagtaatttagtataggttatatattataatttgtaaagttagaattaattgtagttttattgattatagagtttattgattagattattaaattatattatttgaattattataattatttatataattaaagcgatttttattgatttatataattataggagttttttgaaagtttgattggatattatttttttatagacggtttatacgtttatttattattttaagtttttttattttagttattaaattaattattaattttttgtgtaaaagtagtaatttaaaaatatattatgtttttaatagtatttatgtatatagtaatgtaatgttttataagatatatttttaaaattttaatgatttttttgattttttaatttagaaaaataattagttgataatattttaggtttttttaataaatgaatgtaatttattaataatgtatgttagtataagaagttattttgtatgttgatagaattattttattttatggtatataattattaattattaatgatttttaaaattatgataaaatttgtgtatttttaaatatagtattttgattgttgatatatgtagtttattggtgttaaatatttttgaagaatttaattttaatttaatattaattttttatgaattttttagtttttataagtttaatgtttttattgtttttattagtaatattatgttaaatatagaatatatttaaaaaattgttaattatatcgtgtgatttttgtttaaagttttaggaaattagtagtagaattttatttaggttaatagtaaagtaaatattattatttagttttaatatatgtatattgtttatattagggattttgttaaaatatatattatttatagttttttaagtgtagttattatagagtatagttttttatattatatagttgtagagatgagtaaataaagaggaatttttttagaagtgagtttggtttaggatttaaagtggtagtaaaggaaatttaaaggtaataaaagttttattttaggaatcgaataggaaatattttaagtagaattaaatttttaaaatgtttttttgaattattaagggattgataaaatatatgattgttaaggtaaaatattaaatatatttttaatgttattgttttgggatgtgtagttgaatgtagaagggtgaggaaagattagggaatattttatatttgtgagaattagagtttataaatgggatttaatattttaatatgaaattagaagattaattttatttaggtattgtttaattgtaattaattgtaatttgtaatttatttatggaatattatatttattgaaaatgaaatggtatattttgagagaaagattattagagtagatgtagatttagcggttagagtttattattatgtttttttgtgtatgtgggttttttagtatgtaattttttagtatgtaattttaattaattttttatttttttttttttagtgtttttatttttttttttgtaggtttattgttatttttagaaaagtttattgtcgaggttttaggaattatttgtattgttttgatggttattgtgttaaaaataatagtttttattttttgtaagtatatttttgaaagattagaagggaacgttttattttaatgtttggaagtgttttaaaatattttatattgttgaagaatagaatttttattttattgttttttttaaagatttattattttatttatttttatagaaaaagttaattttattaaagattgtttttttttaaataaaatatagttagaaattttttcgtgaattattaagggattgataaaatatatgattgttaaggtaaaatattaatatatttttagtattattgttttaggatgtgtagttgaatgtagaagggtgaggaaagattagggaatattttgtatttgtgagaatcggagtttataattgggatttaaaattttaatatgaaattagaagattaattttattcgggtattgtttaattgtaatttgcggtttatttatggaatattatatttattgaaaatgaaatggtatattttgagagaaagattattagagtagatgtagatttagaggttagagtttattattatgtttttttgtgtatgtgggttttttagtatgtaattttttagtatgtaattttaattaattttttatttttttttttttagtgtttttatttttttttttgtagg

SEQ ID NO: 1114 - DNA, 6361 bp, Artificial Sequence
  chemically treated genomic DNA (Homo sapiens)
tttgtagggagagaaatagaggtattgagagaggggagatagagagttgattaggattatatattagagaattatatattagagaatttatatgtatagggaaatataatgataaattttggtttttaaatttatatttattttagtaattttttttttagaatatattattttatttttagtaaatataatgttttatgagtggatcgtagattatagttgaataatgttcgaataaaattagttttttgattttatattagaattttagattttaattatgaatttcgatttttataagtgtaaaatattttttaatttttttttatttttttgtatttaattgtatattttagaataataatattgaagatatattaatgttttattttggtagttatatattttattaattttttggtgatttacggaaggatttttaattgtgttttatttaaaaggggataatttttaataaaattaattttttttataaaaataaatgaagtaatagatttttgaaagaaatagtaaaataagagttttattttttaatagtatgaaatattttgaggtatttttaagtattaaagtaaaacgtttttttttaattttttaagaatatgtttataaggaataagaattattgtttttaatatagtggttattaggataatgtaaatgatttttaggatttcggtagtgagtttttttggaggtggtagtaaatttgtagggagagaaatagaggtattgagagaggggagatagagagttgattaggattatatattagagaattatatattagagaatttatatgtatagggaaatataatgataaattttggtcgttaaatttatatttattttagtaattttttttttagaatatattattttatttttagtaaatgtaatgttttatgagtggattgtagattatagttgattatagttgaataatgtttgaataaaattagttttttgattttatattagaatattagattttatttatgaattttgatttttataagtgtaaaatattttttaatttttttttatttttttgtatttaattgtatattttagaataataatattgaagatatatttaatgttttattttggtagttatatattttattaattttttgatgatttagagaagtattttgaaggtttaattttatttggaatattttttgttcggtttttgaaatggagtttttattgtttttaggttttttttgttgttattttgggttttgggttagatttatttttgagaaggtttttttttgtttatttatttttgtagttgtgtgatgtgagggattgtgttttatgataattgtatttaagaagttataaatggtgtatattttgataggatttttggtataggtaatgtgtatgtgttggggttgagtaataatgtttattttgttgttaatttaggtaaaattttgttattaattttttaaagttttaaataaaaattatacgatataattggtaattttttagatgtattttgtatttgatataatattattagtgggaataataaaaatattaaatttatgagaattaggaagtttatgaaaaattggtattaaattaaggttagattttttaaaaatgtttaatattaatagattgtatatgttaataattaaaatattgtatttagaaatatataaattttattatagttttaagagttattgatggttaatgattgtgtgttataagataaaatagttttgttagtatatagagtaattttttatattaatatatattgttagtgagttatatttatttattaaaaggatttgaggtattgttaattgattatttttttaaattaggaaattagaaaaattattaaaattttaaaaatatattttgtaaaatattatattattgtatgtataaatattattgaaaatataatatatttttaaattgttgtttttatataagaaattggtaattgatttaatgattaaaataggaaaatttaaaatgataaataaacgtgtgggtcgtttatggaagaatagtgtttaattaaatttttagaaagtttttatgattgtataagttagtgagggtcgttttggttgtataagtaattgtaatagtttagataatgtaatttaataatttagttaatgagttttgtagttagtgagattataattaattttagttttgtaagttgtaatatgtgatttgtattaaattatttagtgtttattaatttagtttattaatttatattgggaaaaataatttataaagtataatgtatgtagaaaattaaatatataatttggtatatattagtattgaatatataatagatattttaattatttttaatataattgttattttattatttttgatttgtattagagtgtgttaaaataatttattaattaggcgttttatgttagtgtggtatattttttttgtaatgtttggtttaattgttttaagttttttaattgtttataattaaggttagatttgtattttatggaaatgattttatttttatttttattaaaaattaaaattgtttttatgaaatttaggtgtgtgattgagaattaatgtttgatatttataatttgatgtatttatattaaaaatttatttttaaagtttggtttaaatataatatataaaatgtaatggttataaaatttaaaattaattgtttattgttatgatggttatgggttttattttaaattatatggattggtaaatttattattatgtatgtatttatttgagtgattttttagcggtaatgatgtgaatattttaagaaatttttaaatatagtttatattttggttcgttttttattttgaattatttacgtgaataaagttttattttgattttcgtttatattaattttattttaggtgtattatagttagtatttataattttttattaaatgagatgagttagtagagaaatagggagaggagtaatatttatttattgttattagaaagttatacgttttttagtggagaggttaggttatttttgaaagatataaacgttatttgtgatttttataggttgttttttgaagggttagagtgaggtaagagtggaaaaagtagattttttattaatgtgttattgtagatttgaataggaaatttttattttagggttattttgaattagtttgttttattatatattttagaatataggagattttgggtggttagtgtgttatttagtttgtttattttaaagtgttttttagaaattatttttatggttaataagatgaggggagagtagagatttgatttatgttggtgattgtttttattttagttataaatattaaagttttgtaattttttaaaaggattttaggtggttgttttttatatttagataaggtggttgaaatttgatattatatatttttttattatatatttttataatattattgttattataataataaaatttaaataatgattttattaataggaatttaatgtatttgttattattttgagaaaatgttgtatttttaatttaattgtaattgatatgtatttttaaatttatttttttgttttttttgttttagtttttaaaatttttttatttaattttttttttttatataagttaattagatttttgattaaaataaatgttttttgaaagaataaaatattaaataatattgagttatatttttatgttagagattgaaataataaaaaaattatttattatattgtttttcggttttttttttaattatgatttattgtttgtattttaatagaaatatttgttgtaaatgattaaagtttaagttaaattatgaagggaggttaaagtaatttttaaaatattatttatttaaaaatggggaggttagaaaatggagattttttaaaatataagtaaaatgatatatgaatgttcgggtatggtagtttatgttagtaattttagtattttaggattatttgagtttaggagtttgaggttagtatgatatattaggatgaaatttttttttttaaaaaaaaaaaaaaaaaaaaaaaaaaatatatatatatatatatatatatgaattagtcgaggatgttggtgtttgtttgtagttttatttgttttggaggttgaggtgagaggatcgtttgagttttgggggttaaggttgtagtgaattgttagtgttattgtattgtagtttgggtaatagagttagattttgttttaaaaataaataaataaaaatttttaaaaaataaatggtatacgaatattagggaaaaaattataaattatttagttgtattaaataaaaatttttttattatttattttttattaagaaaagggggaatgtttatgtataattttattgtttaggttggagtgtagtggtgttattttagtttattgtaatttttgttttttgggtttaagcgatttttttgttttagttttttgagtagttgggattataggcgtgtgttattaggtttagttaattttttttgtatttttagtagagatgaggttttatcgtgttagttaggatggttttgattttttgatttcgttattcgtttgtttcggttttttaatgtgttgggattataggcgtgagttattgtgttcggttattttttaaaatttaaaaagttggaatttaaatttatatttatttttttgtaatgagaattattatttgtttttttattagaatggttaatggtggttaggtatatatgtttttttgtaaaatatattgtaatatatttttataaaattaattaataatgttatatgtatatatgtttgtgtttatattgtatttttttttattataagtatatttatatttatattttattatatttttataaattaggttattttttttattagttacgttatggaattaaaataataaaattatttattaaagatgttatataatgtattatttattgatgttttttatttaagtttgaagtgttgatgtttattattgttataaatatttatttggtgttttttattagtgttatatcgttattgtttgtataatgatagggatatttttgaggaatatgtttttaggtaattttatttttgtgttaatattaaagagtttatttatataaatttagatggtatagttattatatttttgtgttatatgggataggttattgttttaaggatataaatttgtataatatgttattgttgtgaataatgtaagtagtgattagaatggtaatttttgtttatttaattatatataaattaaaaaatagtaaaatatggtttaaaaaaaggttaaaaatggtatttttttatagggtatttattatgaatgaagattgtagaaatggaattttttttgggtgagttagtgagtaagtagtaagtgaaagttaaggtttaggatattatagtatattattgtaggatttatatattgtatattagggtatattatatttatgtagtatttttttttttgagttaataataaattaattttattgtatttttgttggtttttaaattttttatattttaaaaattttttgtttttttttaaatatattttatttaaaaatataaattgtatagttttaataattatatttttttttatgagtttttttttatattttattttaatttttttttttttaaattttttttaaaaacgaagatacgaaaatatatattagtttaagtttacgtagtgttagtaagattaattttattgttattttttttatattttgttttattggaaggtttaggtaataatatacgtgtagttgtttttttttatggtaatagtgtttttttttggaattttttttgagggatttgtttaaggttgttttttaggtaattgtttttatagaagtagaaggagtatattttaaaataataattaaaagtatattatagtaaatatataaattaataatattgttatttattattattattaaatattatgtagtgtatgtaattgtttgtgttatatttttattttattggtagtaaggtaatttatattagtattattatagatatgtgaataatatattgtattgaaattattgttatgacgttattaagttataggaaatttttagtttcgttataatttagtgggattattatttatgtgtagttagttattgattaaaatattattttgtggtacgtgattgtatattatgttttttgttaatcgaaataatatagatttttattgtttgggtatttattg

SEQ ID NO: 1115 - DNA, 5748 bp, Artificial Sequence
  chemically treated genomic DNA (Homo sapiens)
atattttaagttttagggtatatgtgtataatgtgtaggtttgttatatatgtatatatgtgttatgttggtgtgttgtatttattaattcgttatttagtattaggtatattttttaatgttattttttttttttttttttattttataatagttttttgtgtgtgatgtttttttgtttgtgttttgtaaataattatatttttattttttttatttatgtgttataatttattttttttttatttattttttttggttagtattttatatttagagttgaatagaaggtataattaaattttatatgtattatatgtattattttttggttttggtaaaaaataatttaatatattatttatatttataaagtttggtgttttttttattatattttttttatattgaagtggttttataatatttttttttttaatagatgttattaattgtaatatttttattttttattatttagaatgatatatgttttttttatataatattttataaaataattttatttttgttaaatgttaaattaggttttgttttcgaaataaatttatgttgattattgtatattgttttttataaaatattagtgtatatattattatatttagggtaagatatgtttttttatttatgtttataaggatatttgattacgtttttatttgtagttatgtatttgaaaaagttttggttttaaggttattttgggaagattttttgtttttttataatttggaagtatttgttaagagtattgttttagttataaaaaaggatgagtttatgttttttgtagggatatggatgaagttggaaattattatttttagtaaattattataaggatagaaaattaaatatcgtatgtttttatttataggtgggaattgaataatgagaatatatggatatagggaggagaatattatatatcggggtttgtcggggggtggggggttgggggagggatagtattaggagaaatatttaatgtaaatgatgagttgatgggtgtagtatattaatatggtatatttatgtttatgtaataaatttgtacgttgtgtatatatattttagaatttaaaatataataataataataaagagtatcgttttatttttaaatgttattatttattagttatgttatttgagtttgtaggttatttttgtagaaaagtttatggttaaattgaatttttttaatatatgtagggtttatttagatttttatttgaggtattatattttggtaatgagtattttttaggaattttttattttatatggatattaaaatgtattgataatatagttttattgtttgtttaataattgtaaagattataatggtattgttatgtttaaattgggaataaaatatttgtgtttttttaaaatttttttttagtagttttttgtgattatttattttgataatttttttggtttatatgttattttgatatatattattgaattaaaaattatataaggtttttagatttttgtttattgatttttgttgtaggtaaaatatagttagaatattttttattaaattggaaatgttttttatttttttataaatgtggtttatgtggtgaggtattggttttaaatgttatttatttttattaattaatgttaaatttgaatagttatattttaattgttttttagttaagtttggttagcggtattatattgaaattgagtattcgtgtgagtatatgtgtgtgaatgtatttatatgagtgatggttatttgtttagtttaaatttttttataggtttattggtttgttttgtattaagtattaagagaagagtttttaaaaattttatttatgattgtttatttgtttattttatttaattatatgttgaatttgtattattaggtatatgtaatgataaaaaatatattattaatggtttggaaaattaatttattattatgaagtatatttttttaattttagtaaattttatttcggtttattgtagtttcgattttatttttaaggtttaagcgatttttttattttagtaattagagtagttggttataggttaatattattatgttggttaattttcgtatttttttgtagagacggggttttattatgttgattaggttggttttgaatttttgagtttaagaaattaatatattttggttttttaagttgttgggattattgatataagttatcgtttttgagtgtttatgtattatttagtttgtgttttaaaaatttattttttttgttttttttatttttaattagatgatgttttaaaaattatttttttttttttatatagtttgatttaagtattagttatttataataaatattaatattaaaatgtagatcgttatgattggaaaataaattaatgaataatataatgagtggtttttatatattttaatttttggcgtggtgatatagtataatattttttaattatttattttttttagagatatatattttaatgagagttatttgattaatttatttttaaaaaattgaatgagagaattttaagaattattaagaaagtaagttgggaatttaattttgagaattgatgttaattataatgaagtggaaatgtatttttttagaataattagtgataaatatattaaatttttattggtaagattattattttaaaaatttatcgttatattagtagtgatattataggggtatatgataaagaagtacgtaattttaagttttagttattttgtgtaaatgtagaagttaaatatgtaagagattttgaaaaaggtataagattttagtgtttgtgattgagatggaaataattgtatgggtagtagtttttgttttttttaaattttgtttattataaaaataatttttaaaagttatttgaaaatggataaattaaatgatattttagtagtttagttttttatattttgaggtgtatgatgagataaattgatttaaaatggttttagtgtgaaaattttttgtttaaattcgaagtgatatattgatgaggaatttgttttttgtatttttgttttattttgagtttttatagggtagtttgtgaagattagagatatttgttttttgttttttgtttttttttgagatagagtttcgttttgtcgtttaggttggagtgtagtggttttcgattttagtttattgtaagttacgtttttcgggtttaatcgtttttttgttttagttttttaagtagttataggcgttcgttattatattcggttaagtttttgtatttttagtagagacggggttttatcggattatagatgttttttgtgtcgttaagaggtaatttgatttttttattaaggggcgtgtgattttttgatgatagaaggtatgtgttgttagttttttgtttttttattagtttattttttttagtagaaaattgtaaatattaaatgtgatgtaataaggtaaagttaatatagaataaaattaaagtagaattgtttgtatatgaataatttagggtgaaaagtaatttaaaatataatatatgtttgaggattttttaaagtatttatattattgtttgtggagaattagttaagtatatgtatatattataataggtttgttaattaatataatttagagtgaaatcgataaatattacgataatgaagaattaatttgaaattttataattattatagatgtaataatattttatatttagtttagattttaaaaatgtatttttaatggatatattaaattgtgaatgttaaatataattttttatatatatatttatatttaattgaagtagattttatttttttaagaatgtaataatgaagtagtttttataaaatgtaaatttaaatttaattataaataataggacgatttaaaaaaaattgagttaaataaatattgtaaaaaagatgtattatattgatatgagatttttattttattagttattttatatatttagtatgaattagaaataataaaatggtaattgtgttaaaaataattaaaatatttaatatgtattgaggattaatgtgtgttaggttgtatgttaagggttttatatatattatattttataaattattttttttaatttagattagtaaattggtgttgtagatattaagtaattttgtaaaggttatgtattatgagttttaaagttgtaattaattttaggttttattggttatagagtttattgattagattattaaattatattttttgatttattataattatttatataattaaagtgattttcgttgttttttaaaataattatagggtttttttgaaagtttgaatttaaagtgtttttttatagatggtttaaatttatatttattatttttagtttttttattttagttattaaattaattattaattaattttgtaaaataaagagttaaattttttttagtagtatttagtttatgtataagttaatgtaatgttttataaggtataaaatatttttttaaaattttaataatttttttgttttttttaattatttagaataaaaaatatttgttaagattttatgtttttttagtaaacgaatgtaagttattaatttaatgtattttagtattaaaagttgttttatatgttaataaattatttttttatttttagcgtttaatttttatattaatgaattttaaaattgttatataattagtgtattttatttttaaattttaattttagttttttatataggtattttattggtgataaaatatttttgtagaatttgattttaaattaataaagatatttatatttagttattttttagtttttataaatgtattgttttttattgtttttattaataatattatgttaaatatagaaggttttttaaaaagtgatttattgtttaaagagattttagtttaaaattttaggaaattagtattagatttttatattggttaatagtaaaatgaatattattatttagtttttaatatatgtagtttgtttatattagggattttgttaaaatatatattatttatagttttttaagtgtagttattatagagtatagtttttgatattatatagttgtagagatgaataaataaagaggaatttatttagaagtgagtttggtttaggatttaaagaggtagtaaaggaaatttaagggtaataaaatttttattttaggaattaaataggaaatattttaagtagaattaaatttttaaaatgttttttcggattattaagggaatgataagatatattattgtaaaggtaaaatattaaatagatttttaatattattgttttaggatgtgtagttgaatgtagaaaggtggggaaagattagggaatattttgtatttgtgagaattagaggttaaagttaggatttaatattttaatatgaaatttgaagtttgattttatttaggtattgtttaattgtaatttgtgattaataatttatggagtattatatttattgataatgaaatggtatattttgagagaaagattattagagtagatgtagatttagaggatagagtttattattatgtttttttgtgtacgtgagtttttttgtacgtaaatttttttattaattttttatttttttttttttagtgtttttttttttttttgtagg

SEQ ID NO: 1116 - DNA, 5748 bp, Artificial Sequence
  chemically treated genomic DNA (Homo sapiens)
tttgtagggagagaaagaggtattgagagaggggagatagagagttgatgagaaggtttacgtataagagaatttacgtgtataggaaaatataatgataaattttgttttttaaatttatatttattttagtaattttttttttagaatatattattttattattagtaaatataatgttttatgagttgttaattataaattataattgaataatgtttgaataaaattaggttttagattttatattagaatattagattttgattttgatttttgatttttataagtgtaaaatattttttaatttttttttatttttttgtatttaattgtatattttagaataataatattgaagatttatttaatgttttatttttgtagtgatatgttttgttatttttttgatgattcgaagaagtattttgaaggtttaattttatttggaatattttttgtttggtttttgaaatggagattttattgtttttaagttttttttgttgtttttttgggttttgggttagatttatttttgagtaggtttttttttgtttatttatttttgtagttgtgtgatgttagggattgtgttttatgataattgtatttaagaagttataagtggtgtatattttgataggatttttggtataggtaaattgtatgtgttggaggttgagtagtaatgtttattttgttgttgattaatataaaagtttggtattaattttttaaagttttaaattgaaatttttttaaataataggttattttttaaaaggttttttatatttgatataatattattaatgggaataataaaaaataatatatttgtgaaaattaagaagtaattgaatataaatatttttattaatttaaaattagattttatagaaatattttattattaatagaatatttgtgtaaaaaattaaaattgaaatttgaaaataaaatgtattaattgtatgataattttaaaatttattaatgtaaggattgagcgttaaagatggaggaataatttgttggtatatagaataatttttaatattaaaatatattaagttagtgatttatattcgtttattaaaagggtatgaggttttggtaaatgttttttattttgaatgattgaggaaaatagaaaaattgttaaaattttaaagaaatattttatattttgtaaaatattatattaatttatgtataaattaaatattattgaaaaagatttaattttttattttatagaattgattggtaattgatttaatgattaaaataggaaaattgaaaatgataaatataagtttggattatttatgaaagaatattttaagtttaaatttttagaaagattttgtggttgttttaaaaggtagcgagggttattttggttgtgtaagtaattgtaataaattagaaaatataatttaataatttagttaatgagttttgtagttagtgagatttaaaattaattatagttttgaaatttataatgtatgatttttataaagttatttggtgtttataatattagtttattaatttagattggggaaaataatttatgaagtataatgtatataaaatttttaatatataatttggtatatattagtttttaatatatattagatattttaattatttttaatataattgttattttattatttttaatttatattgagtgtgtaaaataattaatgaggtaggagttttatgttagtgtagtatattttttttgtaatgtttgtttggtttaattttttttaggtcgttttattatttataattaagtttagatttgtattttatggaaattattttattattatatttttaaaaaaataaaatttgttttaattaaatataagtatgtgtatgagaaattatgtttgatatttataatttgatgtatttattaaaaatgtatttttaaagtttgggttaaatataaagtattattatatttataatgattataaaattttaaattaattttttattgtcgtgatatttatcggttttattttaaattatattgattaataaatttattatgatgtatgtatgtgtttgattaattttttataggtaataatgtaaatattttaagaaatttttaaatatatattatattttgggttgttttttattttgaattatttatgtatagatagttttattttgattttattttgtattaattttattttgttgtattatatttaatatttataattttttattaaaggagatgagttagtagagaaataggagattagtaatatatattttttgttattagaaagttatacgttttttagtggagaggttaggttattttttaacgatataaaagatatttgtgattcggtgaaatttcgtttttattaaaaatataaaaatttagtcgggtgtggtggcgggcgtttgtagttgtttgggaggttgaggtaggagaacggttgaattcgggaggcgtagtttgtagtgagttgagatcgggagttattgtattttagtttgggcgatagagcgagattttgttttagaaaaaaataaaaaataaaaaatagatatttttgatttttatagattgttttgtgaaagtttagagtgaggtaagagtgtaaaaagtagattttttattaatgtattatttcggatttgaataggaagtttttatattagggttattttgaattagtttattttattatatattttagaatataagagattgagttgttagggtgttatttagtttgtttatttttaagtgatttttagaaattatttttatagtaaataagatttggggagaataaagattattatttatgtagttgtttttattttaattataaatattaaaattttatattttttttagagttttttatatgtttaatttttatatttatatagggtggttaaaatttgggattacgtatttttttattatatatttttataatattattgttaatatgacgataaatttttaaaataataattttattaataggaatttaatgtatttgttattaattattttgagaaaatatatttttattttattgtaattgatattaatttttaaagttaaatttttaatttatttttttgatagtttttaaaatttttttatttagttttttaaaaataaattaattagataatttttattgaaatatatgtttttgggaagaataaataattaaaaaatattgtattatattattacgttagagattgaaatatataaaaattatttattatattgtttattgatttattttttaattataacggtttgtattttaatattaatatttgttgtaaatgattaatgtttaaattaaattatatagagagggaaaagtaatttttaaaatattatttagttaaaaatagggagggtagaaaaagtagatttttaaaatataagttaaatggtatatgagtatttaggggcggtggtttgtgttagtaattttagtaatttgggaggttaagatgtgttgattttttgagtttaggagtttaagattagtttggttaatatgatgaaatttcgtttttataaaaaaatacgaaaattagttagtatgatggtattggtttgtagttagttattttggttgttgaggtgggaggatcgtttgagttttggaggtgaggtcgaggttgtagtgagtcgagatgaaatttattgaaattggggaaatatattttataatgataaattaattttttaaattattagtaatatattttttattattgtatatatttaatgatataagtttaatatatagttgaataaagtgaataagtaaataattataaatgggatttttaaagattttttttttgatgtttaatataagataggttagtgagtttatagaaagatttaaattagataagtaattattatttatatgaatgtatttatatatatatatttatacggatatttaattttaatgtagtatcgttagttaagtttggttaggagatagttgaaatgtagttatttaaatttaatattaattaataaaaataaataatatttaaaattagtattttattatatgagttatatttataaagggatgaagaatatttttagtttaatagaaaatgttttaattatattttatttataatagaagttaataaataaaaatttgagaattttatatggtttttaatttagtaatatatgttaaaataatatatgggttaaagaaattattaagatgaatggttataaaggattattaagggaagattttgaaaaggtatagatattttatttttagtttaaatatggtaatattattatggtttttatagttattaaataggtaataaaattatattattaatgtattttaatgtttatatgaaatagaaaatttttgggaaatgtttattattaaaatatagtattttaaatagaaatttgagtaaattttatatgtattgaagaaatttagtttagttataaatttttttataaaaatagtttgtaaatttagatggtataattagtgaatgataatatttaaaaataaagcggtattttttattattattattatattttaagttttagggtatatgtgtataacgtgtaggtttgttatataggtatagatgtgttatgttggtgtgttgtatttattaatttattatttatattaggtattttttttaatgttattttttttttaattttttatttttcgataggtttcggtgtgtgatgtttttttttttgtgtttatgtgtttttattgtttaatttttatttatgagtgagaatatgcggtgtttggttttttgtttttgtgatagtttgttgagaatgatggtttttagttttatttatgtttttgtagaggatatgaatttatttttttttatggttaaagtagtatttttaataaatgtttttaggttatagagaaatagaaaatttttttaagatagttttgagattaaaatttttttaagtatatagttataaataaaaacgtggttaaatatttttgtgaatatagatgaagaaatatattttattttagatatagtagtatgtgtattgatattttataaggggtaatatataatgattagtatggatttgtttcggaaataaagtttagtttaatatttgataaaaataaaattattttataaaatgttgtataaagaaaatatatattattttaagtaataaaaaataaaaatgttataattgataatatttattgaaaaaaggaatattataaaattattttaatataagaaagatatgatgaaaaaaatattaaattttgtaaatatgaataatatgttgaattattttttgttaaaattagaaaatgatatatatgatatatgtaaaatttgattgtattttttatttaattttggatataaagtattagttagagaaaataaatgaagaaaaaataagttgtggtatatggatagaaaaaataaaagtgtgattatttgtaggatataggtaggggaatattatatataggggattgttgtggggtggggggaggggggagggatagtattaggagatatatttaatgttaaatgacgagttaatgggtgtagtatattaatatggtatatgtatatatatgtaataaatttgtatattgtgtatatgtattttaaaatttaaagtat

SEQ ID NO: 1117 - DNA, 6823 bp, Artificial Sequence
  chemically treated genomic DNA (Homo sapiens)
attgggaaggttattagatattatgatttttgggtagtaagtgtatatagatattatatttatatttttagtagagtttatatgttttttttataattttaatttcgtgatttttttattagtttgttaaatgttattagtttgttaaaagttgagttttgagaagagttattattatgtttgttttaaggttaaattataaattaaattttttttaaagttagtttggtttatatttagtaatgattaagttagtttggaagttagaagtaagattaaattaattatgttagattttttttattgttataattttgtagaggtggttttatttatagtatgagaatttttgtgttagaagtatttcgttttgtttttttgattttttttatttgtttatttttatttattattttatttttatgtttattttttttttttttatattaggggagttttttttagtgttgggttttataaaaatatgaaatttattgaagggttggatgattgatatttgaatggtattttgaattttataaaggagtagggattggggtttattggagggggtttttgaaagagggatatgttgtgggagggtgaaggtgaggaaatatatgttgaataaagatttttttgttatgtaaatgagagttttttaggggagaaattgtttaggagtagttttttttttgatatagataattttattaatatagattttttttatagatgtaatttttttttataaaagggtagttttttatatgatttatttttgtgtttgtagttttttaaaataattagtttgaaatatgttaataaagataaatatttttaggggatatattttagttttttgttattatattttggggtgatatgttttgagttttaataatatatttttttttttggtatgtatttttaaatagtttttgtatataagataagtaaaataatttgggatatttatatattaagttttgagatttattggtatgagggtggtaaagttttgagtagatttagggggaaaagaagttttaaggtttatagatgtaaaagtttgtttaagtaaaataaaggtttttagatataagagaggggtaatgataatttgggttataagatgaaaggtaaggagtgtttgtttttatatatgtaattgtatgtatattttttattatttatgtggataaaatttaattagttttttaagaaggtaatataaaggattggattgttaaattagtattataagtatttttagagattttatttagtattatgttttatttataattttagttatataataattgtgagatgtagataaaatagtggaaaatttaggtttgtaaaagtatttatttatttttattttttttttaggatatattttggtttagataaatagataaatatatgaggttttttaatggtgtttgtggttgtatcgtttatataaaaggagatgttttggttatgatatatttttattttatatttagatggttatatggttatggttatatatagtttatgtgatatttttttaggaagttagtttttataattttatagattttaggtttatgttttttttttatatagtgtgtttggttttggttatttaggttggagtgtaatggggcgattttagtttattaagttcgaaaagtttttaatgttttagttttttaagtagtaggggttataggtgagtgttattatgttcgaattaattttgtatttttagtagaggtagggtttttttatgttggttaggttggttttgaatttttgattttaggtgatttatttgttttggtttttaaaagagttgagattataggcgtgagttattatgtttagttttagttttatttttttatttgattttattattaataattttagataatttaatatattttgttaaaattattttattgataaggatttcgtaagtaaaatatattatatataagaaattattatagttagtaggtttgttattagtatgtttataatgagattttattaggttagtaacgttttttgtttttttttagggagttttttttttttgttaaaagaataatttgtagtttgatgtgagtaatttttttttcgtttaaagaatgtattttttaaaagtagtgagattaaaataaattttttttttggggatattagaacgtatattgttattttgttttgtaatattttagttatatatttttaggtagggaaaagattttattgtttatatgttaagtgaatattagttttttttttttggtttttgattaaggtttaaaaggtgatttagttattgaagttattatttgtttttattaagggtattagtaaattgtaggggaggaagagggtatttttttgtaatggatattaggggatggaaagttttgtaaagagagacgtttttttggtaggatatttaattttttaaaagtaaatttatgtaagtgaagttggatattttagcggaatttagtttggtttttttcggtagtataaatagagaatattttgagtagaaattttatttggaattgtgtaagtaataaatgtaggaaaggaaatgtaataggaaagggaaagtggaacgtaataaaggttatttttttaatttagtttttagaggaggtgattggaatataatattattgagtaattttgggaattgggtaaaatataatgtttagaattatttgattttagggttgagattgttggattgtatagtaaattataagattcgtttgttgacgtttattttggtgatgattatttagtattttcggattagtatgtttgagaatagtaaggtttttagtagttattggagaaaaaaagaatttatagatatagttatatagataattagttggttatagttttttaaatattttaagggatataggcgaggtaatgataattttaggaataagtggagatgagtgggagagatatagtatatggaaattatttatttgtttacgtataaaaataaatagaaagaatagaggtcgggtacggtggtttacgtttgtaattttagtattttgggaggtcgaggcgggcggattacgaggttaggagatcgagataattttggttaatacggtgaaatttcgtttttattaaaaaaaaaaaaatataaaaaattagttgggcgtggtggcgggagtttgtagttttagttattcggtaggtcgaggtaggagaatggcgtgaatacgggaggcggagtttgtagtgagtcgagtgagttattgtattttagtttgggtgatagagattttattttaaaaaataagtaaataaaaaaaaataaaaaaagaataattagagttggtagtttagaaagagttaaagaggtagaggtatatatgtttattgtgggtgtgtatgtgtgtgtgtgtgtgtgtgtttaggtattttaaatatttaagtttggagtttttgaagtaaatttgtatttgttggatttttatttttaagttagtgaattaagatgaaaaaaaggataatgattgatggacgtatttttattaaatagggttttaaaaatttagaatttttaatttttaaataaaggtggatgtgttagtaatgaaagtgtagtaatgattataattgtatatttagttataaatttgtatttttttaagagaaaaattaaaagtaaatttttaattttttatattttgaggtaattttatatgggggaaaaatagtattagataggttttttttagattagttttttttaatattaaaaatgaatagattttaagtaagtaaaagatttttaaataaattattttaattaagatttgtatatagtttggatgaagtagattttacgtttatattttttagtgtggatttatagtttaataaatttgttggtgtaatgaaagtagttttaggtatataatgtaaattgaaaagatggaaagttttgattttataaaaattgagaagttaaagtagtttttttttttatttttttttgttgttggttgaaagtttattttttttaaagggtttatttatagtaatattataatgtttgaatataaataatatataaaatataatatataaaacgtttatttgagtgtttgtttttgtatgggggtgtatggtagattgtatttttagatattaaattatggatcgaaatttttttttttaagatttttattatagttaattttttttatattggaaatttgatttgttttatatttgatatttttattaataaggttatttttttgtagatgaaaaagtgtatatcgaagtattagtatagtatttgaattagataatatattaaataatataataatgtattagtaaaaataaggaaaataaagaagttgaagtcgtgtttaaagaattttaagaaaatgaaaattgaggtgttgaaaaaagtttttaaggttaacgtgaatgaggcgtttaagtgggaaatttatttagttttatttttttgaattttgtttgtcgtggttaggataattaggtagagattagaagaatagagtgagacgtggaaattttaatttatgtgattttgggtaaattatttagttttgtatgttttagttttttttttgatagattgaagatatttatatatttttattattaagttatttatagaaataaatgagttaagatatgttaagtgttttaaattgtggtaagtataaggaaataataaatggttattattaaaagaggaaaattttgtaagtaattttggtatgttaagaaaatttattttttgggttggtttattattttttttattttttaagataattttttaaaatgaatttgatttttaaataataaaagataatatagtaataaaattttttttgatttttttttatttttttttagtttttgttaaagtgttaatattgtaaaagtattgtgagaattttttgtaattgtggtttttggaatattttagaggtttgtgattttattgttttttatttataattataatatatgttttattaatagatgatttaagagatattatttagatatataaattttttaatttttatttttgttaaattttttttatatttaattgtttagatttttttaatttttaagtttagttttaataatttaacgttgttttttttgagaaagtatatatcggtgttttttttatttcgtttttggaatataattttttatggtaggtatgtgtgattttagttattaaattaaaaataattagaaaagttattttttggattggttgattttggggtaatgttttaagagaaaaggatatgattaatagtggatgtttttaggatttttatgtattagtattttttatatttattatatttttttgattttttattgtataatttagatatgattttatgaagttttttttataggtttgaagagtggtttttgatagggttatttttaaattttgagtgagaattgaattttagtttggttaaattgtgagtaatagtgttttagtatagtaatagaaaatgttaaatattaatgatataatgttgaaaaggttttaattgattatttatgttgtgatatttaaaaattatataaatgaatagtttgatatattgtattgttgttaatgatattattttttgagagtgtgtttacgttagtatagaattttttaatgttgaaatgttttaggtgaaaggtttaaaagtaagtaattttgagtatgaataaatggaatgttttaggggaaaaaggattgtttatgtatgtttaatatattgtgaaatgaagttaggttttaaagttgttatttattaatttgttattagttattatattaagtttagaatgtttttatgtttttttgtgtttataatatttttacgaattaatgagtagttagatatttattagagtaaaatttgtattgagatgaggagagggtatatttttaattagtattattgtgataatggtagattacgttgaatgaaagatttttgagttagatatatttttatgtgatttttgatttggatatttatttgttttgatattttgagaaaataatattattattggattttatgtttttttatgtatgtaatgagaattatattatttagtttgtgattttgttgagaaaataaaaataaatgtttgttatgtaagtgtataagatataacgtggtgttcgttaatattttttatttttagatttttaagtatttttgttaatttaaaataaatggtaaatttattttattgtaatagagttggtagagaagaaaatgtttgaataatttttttgaagaataagatatattatataaaaatgttggtattgggtgaaagtttcgattggaaagtttttagtggtttattgggtaagatgatttcgatatcgaatgaaagaatgttgtggatttttcgttattagtttttgtttttaagaatttagtttttgaggtttgttttttaagttattattttgtttgtttttttttatagtgtttaagataattttgtggaggttaatttttgggattttagggataatatgtttttcgttgatgtttacgttgggaattttttgaaaaattgtaagtttttttaagtaagtttttataaaaattaaaatttgtgaagatattttatttaataataaaggttttattttgttaatgtgtaatattttagtattttataaatttatattttattaaataaatttttaattattttttatagt

SEQ ID NO: 1118 - DNA, 6823 bp, Artificial Sequence
  chemically treated genomic DNA (Homo sapiens)
gttataagaaatgattagaaatttgtttaatgaggtatgggtttatgaaatattaaaatattatatattagtaagatgaagtttttattattaaatgaaatgtttttataagttttgatttttatggagatttgtttagaaaaatttataattttttaaaaaatttttaacgtagatattaacgaaaggtatattatttttaaggttttagaaattaatttttatagagttgttttaaatattgtagagaaagatagatagagtaatgatttaaagagtaaattttaggagttgagtttttaaaagtagaaattagtgacggagaatttataatatttttttattcgatatcggagttattttgtttaataaattattgaagattttttaatcgggatttttatttaatattaatatttttatgtgatgtattttattttttaggaagattatttaaatatttttttttttattagttttgttgtagtaaagtgaatttattatttattttaaattggtagaggtgtttaaagatttggaagtagaagatattaacgagtattacgttgtgttttatgtatttatataataggtatttatttttatttttttaataaaattataagttagatagtatggtttttattatatatatgagaaaatataaggtttaataataatgttatttttttaaggtattaaagtaagtaagtatttaagttagaaattatatgaaagtgtgtttagtttaagaattttttatttaacgtagtttattattgttataataatattagttgagagtatgttttttttttattttagtgtaggttttgttttgataaatgtttagttgtttattggttcgtagagatattataggtataagaagatataggaatattttggatttggtgtgataattgataataaattgatgggtaataattttgaggtttggttttattttatagtatattgaatatatataaataatttttttttttttagaatattttatttgtttatatttaaaattatttgtttttaggttttttatttaaaatattttaatattaggagattttgtgttaacgtgaatatatttttaaagagtgatgttattaataatagtataatgtgttaaattgtttatttgtgtaatttttggatgttataatataaatagttaattaaaatttttttagtattgtgttattaatatttggtattttttattgttatattagaatattgttgtttataatttaattaggttaaagtttagtttttatttagaatttaaaggtagttttgttagaaattattttttaaatttgtggaaaaaattttatgaaattatgtttaagttatataatgaagaattaggaaaatataatgaatgtggaaagtgttaatgtatgaaaattttaaaaatatttattgttaattatgttttttttttttaaagtattattttaaaattagttaatttaagaaatagtttttttggttatttttaatttagtgattgaaattatatatatttgttatgagaaattatgttttaagagcgaagtagagaaggtatcgatgtgtatttttttagaaagaatagcgttgaattgttgaagttgagtttggagattaaagaaatttgaatagttgagtatgaaagaaatttagtaaaaatagagattgaaaaatttgtgtatttaaatgatgttttttgaattatttattggtgagatatgtattatagttgtgaataagaagtagtagaattataagtttttgaagtgttttaagaattataattataggaaatttttatagtatttttgtaatattaatattttggtaaggattaaaagaaggtgagaggaggttagagggagttttgttgttgtattgttttttattgtttgaaaattaaatttattttaaagggttattttggaaaatgaaggaaatgatgggttaatttaaagggtaaatttttttagtatattaaaattatttatagaattttttttttttaataataattatttattatttttttgtatttattataatttaaagtatttggtatattttagtttatttatttttgtaaatggtttgatagtaaagatatataaatatttttaatttattaaagagaaaattgaggtatatagagttaagtaatttgtttaaggttatataaattgggatttttacgttttattttgtttttttgatttttatttaattattttggttacgataggtaaagtttaaaaaagtagaattggatgggttttttatttggacgttttatttacgttagttttaaaagttttttttaatattttaatttttatttttttaaagttttttaagtacgattttagtttttttattttttttatttttattaatatattattatattgtttagtgtgttatttaatttagatattatattgatatttcgatatatatttttttatttatagaagagtaattttgttaataggaatattaaatgtggaataggttaaatttttaatgtggaagagattggttataataagaattttgaaaggagagatttcgatttatgatttagtatttggaaatataatttattatgtatttttatataaaagtagatatttaaataaacgttttgtgtattatattttgtatattgtttatgtttaagtattataatattattatagataaattttttgaaaaagatgggtttttaattaataatagaaaaaaatgaaagaaaagattattttgattttttagtttttatgaagttaaaattttttatttttttagtttgtattgtgtgtttagagttgtttttattgtattaataaatttgttgagttataaatttatattgaagaatataagcgtaaaatttattttatttagattgtatgtaaattttagttgaagtgatttatttaaaaattttttgtttatttgaaatttatttatttttagtgttagaaaaagttggtttggaagaaatttgtttgatattattttttttttatgtaaaattgttttaaaatataggagattaggggtttgtttttagttttttttttgagagagtataaatttatgattgaatgtgtagttgtgattattattatatttttattattaatatatttatttttatttggaagttagaggttttaagtttttagaattttgtttggtgagaatacgtttattagttattgtttttttttttattttagtttattgatttagaaataaaaatttaataaatataagtttattttaagaattttaggtttaaatatttaagatatttaaatatatatatatatatatatatatatatttatagtaaatatatatgtttttatttttttaattttttttgagttgttaattttgattgttttttttttgtttttttttgtttgtttgttttttgagatggagtttttgttatttaggttggagtgtagtggtttattcggtttattgtaagtttcgtttttcgtgtttacgttatttttttgtttcggtttatcgagtagttggggttataggttttcgttattacgtttagttaattttttgtatttttttttttttagtagagacggggttttatcgtgttagttaggattgtttcgattttttgatttcgtgattcgttcgtttcggttttttaaagtgttgggattataggcgtgagttatcgtgttcggtttttgttttttttatttatttttgtacgtagataggtgaatgatttttatgtattgtattttttttatttatttttatttgtttttgaagttattattgtttcgtttatgttttttggaatatttggggaattatggttaattagttatttgtatagttgtatttatgggttttttttttttttaataattgttgaaagttttgttgtttttagatatgttaattcggaagtgttgaataattattattagaatgggcgttaataaacgaattttgtgatttgttatatagtttagtagttttagttttaaagttaggtaattttgaatattgtgttttgtttagtttttagaattatttaatagtgttatgttttagttattttttttagaagttagattaagaaaataatttttattgcgttttatttttttttttttattatatttttttttttatatttattgtttatataattttaaataaagtttttatttaaagtattttttgtttgtgttgtcgagagaaattagattaaatttcgttgaaatatttagttttatttatataaatttgtttttgaaaagttaggtattttgttaaaagaacgtttttttttgtaggattttttattttttagtatttattgtaggaagatgtttttttttttttttgtaatttattagtgtttttggtaagagtaagtgatgattttaatagttaagttattttttaaattttagttaaaagttagggaaaagaaattaatgtttatttaatatataaatagtgaagttttttttttatttaaaaatgtataattaaaatgttgtagaataaaataatagtatacgttttagtatttttaagggaaaaatttattttgattttattgtttttagaaaatgtattttttgagcggaaagaaaattgtttatattaggttgtaaattatttttttaatagagagagagggttttttgagaaaaaataaaagacgttattgatttggtaaaattttattgtaaatatgttaataataaatttattagttatagtggttttttatatatagtgtgttttgtttgcgaaatttttattaatggaatgattttagtaggatgtattagattgtttaaaattgttagtggtaaaattaaataaaaaaataaaattaaggttgggtatagtggtttacgtttgtaattttagtttttttggaggttaaggtaggtggattatttgaggttaggagtttaaggttagtttggttaatatggagaaattttgtttttattaaaaatataaaattagttcgggtatggtggtatttatttgtaatttttgttatttgggaggttgaggtattaaaggtttttcgaatttgatgagttgagatcgttttattgtattttagtttgggtgattagagttaaatatattatataaaaaaaaagtataaatttagaatttgtggggttatggaggttggttttttggaaaaatgttatataagttatgtgtaattataattatgtaattatttaagtataaaatggagatgtgttataattaaaatatttttttttgtgtaaacggtgtagttataaatattattaagagattttatatgtttatttgtttgtttgggttagagtgtgttttaaggggaaagtaagaatgagtgggtgtttttgtaggtttgggttttttattgttttgtttgtattttataattattgtataattgaaattatgagtaaagtatgatattgggtgaaatttttgaggatgtttgtgatattgatttgataatttaattttttatgttatttttttgaagaattggttaagttttgtttatatagataatgagaaatatatatataattatatgtatagaagtaaatattttttgttttttattttatagtttaagttattattgttttttttttatatttaggaatttttgttttatttaaatagatttttgtatttgtaggttttgggattttttttttttttagatttgtttaaaattttgttatttttatattaatggattttaggatttgatatataaatattttaaattattttgtttattttatatgtaggggttatttggggatgtatgttagaaaaagaaatgtgttgttggggtttaggatatattattttaaaatatgatagtaggagattaaaatatgttttttaaaaatatttatttttgttggtatattttaagttggttattttgagaaattgtagatataagagtaggttatgtgaaaagttgtttttttgtaaaggaaaattatatttgtaaaggaaatttatattagtaaaattatttatattaggaaaagagttgtttttgaataattttttttttgaaggatttttatttatatagtaagaaaatttttatttaatatgtatttttttatttttatttttttataatatgttttttttttagaagttttttttaataaattttagtttttatttttttatggaatttaggatgttatttaagtgttaattatttagttttttaatgagttttatatttttgtggaatttaatattaagaaaaatttttttaatatgaaggaaaagaggataagtataaaggtgaaatggtgaatgagagtaggtagataaaagaggttagagaagtaggacggagtgtttttgatataaaggtttttatgttatgagtgaagttatttttgtaaaattatgatagtgagagaaatttggtatagttgatttaattttgtttttgatttttaagttgatttgattattattgggtgtaggttaagttaattttgggaggaatttagtttatagtttaattttaaggtaagtatgataatagttttttttaaaatttagtttttgataaattaatagtatttgataaattaataaaaaggttacgaggttaggattatgagaggggtatatgagttttgttaaaagtgtaggtgtagtatttatatatatttattgtttaggagttatagtgtttagtgatttttttaat

SEQ ID NO: 1119 - DNA, 6740 bp, Artificial Sequence
  chemically treated genomic DNA (Homo sapiens)
attttaaggtttaggtttatttaggaaggagtaggggtggcggaagcggttggaataaagagtggataataggtataattttcgaggagtttacgtttagttgtggagatatttcgttttttcgtttttagtaattgtattgggatagtaggagcgggtgtgggtagggttttaagttttggggaagaggagaaattattgagggttggggtgattaggaaaggttttggggtagatttggatttgatgggtagaaaaaggaggaaggagggtaaagggtattttagggtcgtatttagtgtattcgtggtatgatttggggatagtttggattatatttgagtagagtgtaaggattttgtaaggaaagttattaggaatgtgttaaataatgttagtttttgttgataaggggttttagataattatgttatttaagaaaagtatgttaaaaaggaatagaaatagattagattaatttataaaatattttaaaatagtttgaaaaatattatatatatgttttataaagttatttaaaaattttattaagaattttttagttataattttagtattaaattggtttatgagatttattttttttgggtagaatggtttttggtttagaaaatattttgtttttggttaaaggggttggttagtttggataggtgttgtttatttatatagagatgtcggatttttttttatttttgagttttagtttttttatttataaaagtaggaatagtaggttgggtgtggtggtttatgtttgtaattttagtattttgggaggttgaggtaggtagattacgaggttaggagatcgagattattttggttaatacggtgaaatttcgtttttattaaaaatataaaaaaaaaaaaaaaaagaaaaattagttgggtgtggtggcgggtatttatagttttagttatttaggaggttgaggtaggagaatggcgtgaacgttggaggtggggtttgtagtgagttgagatcgtattattgtattttagtttgggtaatagagtgagattttattttaaaaaaaaaaaaaaaagaagtaggaatagttaagattgattgtgttttttttttttcgttttttatttttttttgtttttttttattttttttttttttttttaatataatttatcgtgggaaaaattatttaattaattaattaatttatagatatttagaagttttgtattgtgtttaatattatagagatttaaaaaaaaagtataaggttaatttttgtttttatgtttatagtttttttgggaaaatagggttgaaatataagataattagaagacgttagttaattggaggttaagaaatttattaatagttattgttttgggtatttagagttgggagggtatagtagggttggagtaggggttagatttcgggggaaggtttggttaggattgggtttttagaggtagtggggtgggtttgtggtttggagttgtaaggtttgggttttagtttttttgggaagtttgtgtggattttgggtaagttattttttattttgattattgtttttttttgtaggagttagtatttttttatttacgattgtgttggagggtgtgtgtgaggttttaaagaagatagtatgttttgaatagttgtatagatgtttttttagttgtgatttgggataggtttttgaaatagtttaagttttttttatttaatgggttattggtgatgttaattttatgagtttgtgtgaggattgaataagagaatgtatagagatagattagcgtgggggttggtgggtattaaatgtttagtgaatgatggttgttattattagtcgggttattgatagggttgtgtgaaaagagttttaatttaggtagttagaaggaagggtttttttattttttaattagggttggggaagatatgtttttttagatgttattatgggtaggtgtttaattaattgatttttaggtattgtggttagaatttaggttttataatttgtatagattttttggtaagggaaagagtagggaagtgtttattagggttttgtagtatttagggtgataagttgttttattttatcgaggattgaggtttttttggtatatggaattttcggaattaaagttagaaaatttttggggaaattaagaaaattggttattttagttatattttttgggttaatttaagagttttttgtgtttttttggttgtaagatttttgtttttttgtattaattaagtttatttttttattttttgggagtattttagagattttttttatttttttaggttaataaaagaagttaaagttggagaaagttaagatagtggttgaatttttatgtttgtttaatgcggaggttgaggtttgggtttaaatgataggtttttttgaagaattgatagggatttggtttttttagtgatgtggggtggtggagatgagttttgatatagtaatggggtttttattttatgagattggtaaatttttataggaaattaaataataggttaatgaggggttttaatagaaagtggtgttaattttaatgaggagaaaatattttgtaaaggttaattaatgtttattggggtagagatataaatttggggtaaggagttgtttttttgttttggggtgtttggttttagagatttattaattgtatttgagttgtaggggttatggtttttaaatgttttaaggtcggttttttttttgggttttttaagagtttaggaggggttagtgggggttttattcgtgtgttcgtaatgtattttagtagtttttgtaagtttttaagttttttttttgtggttagaagtttttttgtttgtttagtgggtttgggtagaagtagttatagggttattagttgtttttttgttttttgtttttttgttggaggtttcgttattagttatagtgggggtgggggttggtttggggagggtatttttattggtaatgagaaggagattatgtaatttttgaacgatcgtttggtcggttatttggagaaggtgcgttagttggagtaggagaacgttagtttggagagtcgtattcgtgagtggtgtgagtagtaggttttttatatgtgttttgattattagttttattttcggattatcgaggagttttagaagaaggtaagaggtttagagtggttttggatttttaggaattttgtgttattagtatttattggtagttttgtttttatagggtatgttggaagttattaagtatgtttatttttgtggttttatttgttttttttaataattttaagagggaggtattattagtttattatatagttgagaatattgagatttaggttgggtaagcgatttagatggtagttattggagttagagtttgaatattaggtttatgaatgaattttgtgatttttggtggtattgtttaattttttgagttttttgagtttttatttttttttttatttaaagttaggggattgggtttgatgtatttagtgtagtgtagtttaggttttttataagtaatttagggaagaaaatgtttgttagagaagttttttttttgttaagggtttatatttatttttcgtttgggtcgagagttatagttggtttttgtgagggattatttatgattagagaatttcggggtatgttgttggtaatgaaatgttttgggtttttagtaggtttgggagatagggagattggaagaagttttattttattatgttaggttttttttgttgtatttttatgtagttatttaatttgagtaataggttatagatatattgtattggaagaaattttggattttttatagttgatttttagagtttgtttataatattttaatgtatatggagtagtagaggtttaggatgggtgattttttttttttagagttagtttttgttagttttagggagttttaataagtggaatgtttttttttgtaatgaaataatttttttatatttttagattttatgtagtaaggttgagaatgttaggttggtggtggagattgataatgttaaattggttgtagatgattttaggattaagtgagttgttttgtttgttatgtggttgggggttgttagaattggatataggtgatgtttgagtttagggttttggttgtattttgttattggggtataaaagtaggatttatagtatttggatagtttgagggtaggtttgatttagatgtaaaaaggaaatgtagatttaggtgttttgttttatgtttgtaggtatgagacggaggtgtttttgcggtagttggtggagttagatattaacggtttgcgtaggattttggatgatttgattttgtgtaagtttgatttggaggtttaggtggagtttttgaaggaggagttgttttgtttgaagaagaattatgaggaggtgagtatgggggaaaaggtgaatacggtatagtaggtgagtatgggggaggaggtgaatatggggaggaggtgagtattggggatgaggtgagtatagggggaggtgaatatgagggagtaggtgtgtatagggaagaggaggtgagtatggggagtaggtgagtatagagagtaggtgagtatgtagaggaggtgagtatggggaggaggtgggtatggggagtagatgagtatggggaggaggtgagtattaggaggggtgagtatggggaggaggtgaatatgaggaggaggtgaattttggtattttagatttttttcgggtttgtggggggaggttggtatagaataagggtatatttaggcgtgttatttttagttgggggtataagtaggtagttttagggatagttttgtattttgtatttgggagtcggtagtatttttattattgttttttaattcgtgagttattagttgtgttatgagttgtagatagtttttttcgttttatttgagtcgtagcggcgggggtggcgggggcggtttgggtagcgggggtagtataaggtttttttatagtcgttttagttttttagggggcggtggaggagggggtcgatttagtttttttagtggttatggtgggggaagttttcgtgtttgtgggaggggaggcggtggtagttttggttatagttacggcggaggatttgggggtggttttagtgttagtagtttaggcggtggttttgggggtggttttagaggttttggtggtgtttttggaggaggttatagtagttttgggggttttggaggtggttttggtggtggttttggaggtggttttggtggtggttatgggagtgggtttggggggtttgggggttttggaggtggtgttggaggaggtgatggtggtattttgattgttaatgagaagagtattatgtaggaatttaattttcggttggttttttatttggataaggtgtaggttttagaggaggttaataacgatttggagaataagatttaggattggtacgataagaagggatttgttgttatttagaagaattattttttttattataatattattgatgattttaaggattaggtaggtgtaggaaattgtttttgttttggttttttttttttttattttttattttttaaaaaagttaaaatgttaaattttaagtttagataatagttagggaatttattttttggaaatgtacgtttttattagaaataaatttgtgtttggtttttggggattttaggataggattttggtttgtgttttgagtgtttatttttatttttttaatttttagagtttgggtagagtagagaggagatttgggttaacgtgagttgagttgggattggatgtggaattttttttaggtttggtttaagttaatattttttttttttttgtattttttttgggtttttttaggagtgtattttgattttttaaggtattttggatttgattgtatatgttggttatttaagtgttggagaggatttagaaatttgggaatggaagttatttatttatttatttttttatttatttttttttttttttatttatatgtttatttatttatttatttatttagttatttagtttagtgagtgtttatttttagggttgttttgggtagatatagtgatgtgttagatttagttttggtggagtttacggtttggttttttagtatttttagtgattttttttgttttaatttttgtatgtttttgaatgtgttgttttttttattttaaattttttttatttatttattaatgttatatttttagttattttttagggtttaatttaattgttagttattttttttttgaagttttttttgattttttattgttataagttattttttttttttttgaatttttttaggatatttttgattttgtagttaatggtgggttttttgaggaataggatgttagtaatttttaaattttataatgttttttgtagtagatttttaaatatttgttgaatgaatgaatgaaggttatattaaatattttcgttgaaggttggaaggggtttgtgttatgttttagttgttggaagttttttattttttttgagaatttttttggatggaatttttattttttgtggttttgtttggttttttgtttttttagtagtggtttatagtatgatattatggttgtgtttttttttttttaga

SEQ ID NO: 1120 - DNA, 6740 bp, Artificial Sequence
  chemically treated genomic DNA (Homo sapiens)
tttgaaaaaaaaaggatatagttatgatattatgttgtggattattgttgagagggtaagaggttaggtaaagttataggaggtgaggattttatttaggaagatttttaagaggaatgaggaatttttaatagttgggatatggtatagattttttttagtttttagcgaagatgtttggtgtggtttttatttatttatttaataaatatttgaagatttattgtaaagggtattgtaggatttagagattattgatattttgttttttagggagtttattattgattataaagttaaaagtgttttaaaagagtttaaggaaaggagaggtggtttatggtaatgggagattaagaaagattttaggaaggaggtggttggtaattgaattgggttttgaaggatggttaagaatgtaatattaataaataaatggaagaggtttagagtagaagaaatagtatatttagagatatgtaggagttaaaataagaggaattattgagaatattgaagagttagatcgtgagttttattagaattaggtttagtatattattatgtttatttagagtaattttgagggtaggtatttattgaattgagtggttgaataaatggatagatagatagatatgtgggtggagggaggaagggatagatggaaggatggatggatagatagtttttatttttagatttttggattttttttaatatttgaataattaatatgtatagttaggtttaaaatattttaaaagattaagatatatttttaaagaagtttaggagaagtataaaggaagagaaagtattgatttagattaaatttaaaggaggttttatatttagttttagtttagtttacgttaatttaggttttttttttgttttgtttaaattttgaaagttgaggaaatggaagtgaatatttagagtataggttaaagttttattttgggatttttagaaattaaatataagtttgtttttgatgaaagcgtatatttttaaaaggtggattttttggttattatttgagtttagagtttagtattttaatttttttggaagataaagaatgaaagagaaagagattaagatagagatagttttttgtatttatttggtttttgagattattaatagtgttataataaggggagtagtttttttggatagtagtaggtttttttttgtcgtattaattttggattttattttttaggtcgttgttggttttttttagagtttgtattttatttaagtaagaggttagtcgagaattgagtttttgtatggtgttttttttattagtagttagaatattattattattttttttagtattatttttaaagtttttaaattttttaaatttatttttatagttattattaaagttatttttagaattattattaaagttatttttaaaatttttagaattattatagttttttttagaagtattattaaaatttttggaattatttttaaagttatcgtttaaattattggtattaaaattatttttagatttttcgtcgtagttgtagttaaaattgttatcgtttttttttttatagatacgagagttttttttattatagttattagaagagttgaatcggtttttttttttatcgttttttgaggagttgaagcggttgtaggaagattttatgttgttttcgttgtttaggtcgttttcgttattttcgtcgttgcggtttaagtaggacgaggagaattgtttgtagtttatgatatagttggtagtttacgggttgagaagtagtgataggagtgttatcggtttttaagtgtagggtatagagttgtttttggggttgtttatttatatttttagttgaaggtggtacgtttgggtgtgtttttgttttgtgttagtttttttttatagattcgagggaggtttgggatattaaggtttattttttttttatgtttattttttttttatgtttattttttttaatgtttattttttttttatgtttatttgttttttatgtttattttttttttatgtttattttttttgtatgtttatttgttttttatgtttatttgttttttatgtttatttttttttttttatgtatatttgtttttttatgtttatttttttttatgtttattttatttttaatgtttattttttttttatgtttatttttttttttatgtttatttgttgtgtcgtgtttatttttttttttatgtttatttttttatggtttttttttaggtagagtagttttttttttagggattttatttgggtttttaggttagatttgtatagggttaggttatttaggattttgcgtaggtcgttgatgtttgattttattagttgtcgtagggatattttcgttttatatttgtaggtatagaatagggtatttgagtttgtattttttttttgtatttaagttaggtttgtttttagattgtttaggtgttgtgagttttgtttttatgttttaatgatagagtatagttaaaattttgagtttaggtattatttgtgtttagttttagtagtttttaattatatgataagtaggataatttatttggttttgaagttatttgtagttaatttggtattgttaatttttattattagtttggtatttttagttttgttgtatagagtttggagatatgaagaagttattttattgtaagaaaggatattttatttgttggagttttttaaagttgataagggttgattttggaaggaggaagttatttattttagatttttgttattttatgtgtattggagtgttatgggtaggttttagggattaattatggaaagtttagggttttttttagtgtagtgtatttgtgatttgttatttaggttagatagttgtatgaaaatgtaataggaaaggtttggtatgatgaaatgaggttttttttaatttttttgttttttaggtttattgggggtttagggtattttattgttaataatatatttcgggattttttggttataaatggttttttataggagttagttataattttcggtttaggcgagaagtggatatgggtttttggtaagaaagaaatttttttgataggtatttttttttttgagttatttatgggaagtttgaattgtattgtattaaatatattaaatttaattttttgattttaaataaaagagaaaatgaaaatttagaagatttagaggattgggtaatattattaaaggttatagagtttatttatagatttgatgtttaagttttggttttagtaattgttatttgggtcgtttatttagtttgaattttagtgtttttaattgtataatgggttaatgatattttttttttaaggttattgggaggagtaaatgaggttatagagatgaatatgtttggtgatttttaatatgttttatgggaatagaattattaatgaatgttggtgatataaagtttttgggaatttaaagttattttgaattttttatttttttttggagtttttcgatggttcggaagtaggattggtagttagggtatatgtaggggatttgttgtttatattatttacggatgcggttttttaggttggcgtttttttgttttagttgacgtattttttttaggtagtcggttaggcggtcgtttagggattgtatggttttttttttattgttagtgaggatgttttttttaaattagtttttatttttattgtagttggtagcgaagtttttagtagggaggtagagagtagggaggtagttggtggttttgtagttgtttttgtttagatttattgagtaggtagagaaatttttggttataggggagagatttggaagtttgtaagagttgttggagtatattgcggatatacgagtggagtttttattggttttttttgggtttttgagagatttagaagagaagtcggttttgaggtatttggaagttatggtttttgtaatttagatgtaattgataggtttttgaggttagatattttaaagtagagaagtagttttttattttagatttatatttttgttttagtgggtattggttggtttttataaagtgttttttttttattaaagttaatattattttttattaaaattttttattaatttgttatttagttttttgtgaaaatttattagttttataaaataggagttttattattatgttaagatttatttttattattttatattattgggaagattaagtttttgttagttttttaaagggatttgttatttgagtttagattttagttttcgtattaagtaagtatgggagtttagttattgttttgattttttttaattttgattttttttattggtttgagggagtagaggaggtttttggggtgtttttagaagatggaagggtaaatttggttggtgtaggaaggtaggggttttgtagttagggagatatagaaggtttttgaattggtttagaaaatatggttaaggtgattaatttttttggtttttttaggaattttttggttttagtttcgaaagttttatatgttagggaaattttagttttcggtaaaatgggatagtttattattttagatattgtagagttttgatggatatttttttatttttttttttgttaggaagtttgtgtaggttgtagagtttaagttttagttataatgtttagagattagttaattggatatttgtttatgatgatatttaggagggtatgttttttttagttttggttgagaaatggagaagtttttttttttggttgtttgaattggagttttttttatatagttttattaataattcggttgatggtagtaattattatttattgagtatttagtatttattagtttttacgttgatttgtttttatgtatttttttatttagtttttatataaatttatgagattggtattattaatagtttattaaatagaggaggtttggattgttttaggagtttgttttagattatagttgaaaaagtatttgtataattgtttaaggtatgttattttttttaaggttttatatatattttttaatatagtcgtggatagaaaggtgttgatttttatagaaggagataatggttagagtagaaaatggtttatttaaggtttatataggttttttagggaggttaaagtttaggttttgtagttttaaattataggtttattttattgtttttaagggtttagttttggttaggttttttttcgaagtttggtttttgttttagttttgttgtgtttttttagttttgaatgtttaaggtagtgattattggtagattttttggtttttaattaattgacgttttttgattgttttgtgttttagttttatttttttagggagattgtaagtatgggggtaaggattgattttgtattttttttttaaatttttgtagtgttaagtatagtgtagggtttttagatgtttatgaattaattaattaattaagtgattttttttacggtgaattgtgttaagaaaggaaagaaagaatgggaggaaataaaagagagtagggagcggggaaaggaaaatatagttaattttaattatttttattttttttttttttttttttgagatggagttttattttgttgtttaggttggagtgtagtggtgcgattttagtttattgtaagttttatttttagcgtttacgttatttttttgttttagttttttgagtagttgggattataggtgttcgttattatatttagttaatttttttttttttttttttttttgtatttttagtagagacggggttttatcgtgttagttaggatggtttcgattttttgatttcgtgatttgtttgttttagttttttaaagtgttgggattataggtatgagttattatatttagtttattatttttatttttgtaaatgaggaaattgagatttagagatggaaggggattcggtatttttgtgtaggtgagtagtatttgtttagattaattagtttttttggttaagaataaagtgttttttgggttaaaagttattttgtttaagggagatggattttataaattaatttagtgttaaagttgtgattaaaaaatttttgataagatttttagataattttataaaatatatatgtaatattttttaagttgttttaaggtattttgtaaattggtttgatttatttttgtttttttttagtatgttttttttaaatgatatgattatttagaattttttattagtaagaattaatattgtttagtatatttttagtaattttttttataggatttttgtattttgtttagatgtggtttaggttgtttttagattatgttacggatatattaaatacggttttaaaatgttttttgttttttttttttttttttttgtttattaaatttaaatttgttttaaagttttttttggttattttagtttttagtgatttttttttttttttaaaatttgaaattttgtttatattcgtttttgttattttagtgtagttgttgggagcgagggggcgaggtgtttttatagttggacgtgagtttttcgggaattgtgtttgttatttattttttgttttagtcgttttcgttatttttgtttttttttagataggtttgagttttaagat

SEQ ID NO: 1121 - DNA, 5452 bp, Artificial Sequence
  chemically treated genomic DNA (Homo sapiens)
taattttagtattttgggaggtcgaggtgggtagattatttgaggttaggagtttgagattagtttggttaatagggtaaaattttatttttattaaaaatataaaaattggttgggtatagtggtgcgtaattgtaattttagttatttaggaggttgaggtatgagaaatgtttgaatttaggaggtggaggttgtagtgagtcgaaattatgttattgtattttattttgggtaatatagcgagattttgttttaataaaataaaataaaaataaaataattataattaaagatgttttgtaaggttagaagaataatatataaagtgagaatttttaataaaaaggtagaaaatataaaaagtattaaatagaaattatgttgttgaaaaatataataattgaattgaaaaatttaatagagggatttaatagtatattaaattaagtaggagataggattagtgaatttaaagttaggttattggaaattatttagaggaataaaaagaaaaaagaataaaaaagagtaaagaaagtttaagagatgtatgggatattattaggtagattaatatttatattaggaagatttagaaggagaagagagagagaaagtttagaaaatttattaaaaaaaataatggtttaaaatttttgaaatttgagaaagaatattgatatttagatttaggaagtttagtgtattttaaataagatgtttagataaattaaagtgatatatattataattgaattgttagaagttaaagataaatagggaattttgaaagtagtaagagaaaagtgatattatgtataagggaatttttataaggtaattaatatattttttagtagaaattttgtaggtcggaaggatatgggataatatatttaaagtgttgaaaataaattaattaattaataaataaattgttaattaagaatattatttttagtataattattttttaaaattgaaggagagatatagatttttatagataaataaaagttgaggtagtttattatcgttggatttgttttataaaaaatgttaaaggaagttttttaagttggaataaaaggatgttaaatagtaatataaatgtatgtgaaagtataaaatttgttggtaaatgtaaatatattgataaatatagattattgtaatattataatggtggtaggtaaattatttttttaattttattataaaatttatttatttatttatttatttatttatttatttatttatttatttatttttgagatagagttttatttttgttatttaggttggtatgtagtggtgtgattttggtttattgtaattttcgtttttcgggtttaagcgatttttttgttttagttttttgagtagttgggattataggtgtttgttattacgtttagttaatatttatatttttagtatagatagagtttttttatgttggttaggatgttttcgaatttttgattttaggtgatttgttttttttagtttttaaaagtgttgggattataggtgtgagttattatatttggttttttattataaaatttaaaagataaaagtattaaaaataattataattataaaaataggttaatgtatatgtaatataataagatgtaaataatgatattaatatataaaagatgtgtgtgggagaagtaaaagagtagtttttgtatgtagtgaaagttattagttgaaaatagatagttataagttgttttatataagttttatgatgattataaaaaaatatttatagaagatatataaaagaaaaagaaaaaagaataaaaatatatcgatataaaaatttatgtaatataaaggaagatagtaagataggaaaagagagataaaagaattttgagaaagataaaagaattaataaaatggtaatattagtttttttttattaataatttattgaaatgtaaatgaattaaattttttaattaaaagatatggagtagttgaatggatttttaaaaaattaataagtattatttatatattatttagaagagattgattttagatttaaagataatgtataggttgaaagtgaaggaatgggaaaaaaaatatttcgtataaatggtaattaaaagatagtaggatggttgtatttatatattagataaaatagtttttaagttaaaaattgttataaaaggtaaagaagaatattatataataatgaaaaaatttattaggaagatataataattgtatatatatatgaatttaatattagagtatttaatatatatataataaatattgatagaattaaagggagaaatggataatgtaataatagaagaatttagtaatttatttttgataatgaatagaatatttagatagaaaattaataaggaaataatagatttgagtaatattatagaataaatggatttaataaataatacgttttatttaatggtagtagaatgtatattttttagtgtatgcggaatattgtttaggatagattatatgttgggttataaaataagttttaacgaatttaagaggattgaaattatattaagtatttttttttattataatggaatgaaattagaaaattagaacggaaataagaaaaaaattgaaaaatatataaatatgtagaaattaaaaaatatttaaataattaatgggttaaagaagaaattaaaaaggaaattagaaaatattttgagataaatgaaaatgagaatataacgtattaaaatttatgggatgtagtaaaagtagtattaagaggaaagttttatatatgtatatatataaatttatatttaaatatatatatacgtttattatgtatttataaaaattaaaaaattaaaaaagataaagaataaattaagtttaaagttagtagtaggaaggatataataatattttttgttttaaattttattatgatatttacgataaaatttagagtagaaataaataaaaatagagattagaaaaataatagtaaaaaattaatgaaatagagtttttttgaaagatatagaaaatttataaatttttagatagattaagaaaaaaagaggaaatatttaaataaataaaatcgaagatgtgtttttttgttttttttatgttgtttttgaaatttagatgtagttttttttaaatgatttgtattgtgttttataaataattttttgggatttttttttgaaatatgattttgtttttttgcggaataaaggtaaggtagagtgatagggaaaagaagtgaggtagggaaggttattttgtgaagagtgattattgggtaatagagaggttttttaggttatgtaagagttaaagggtaattggattttagaggtgatagaagtatatttattagagatagtgtttatttgtagggataatagagtaaatttgtatttttatgggtattgtggtttgttttggaagtattttaggttggtatagttatatttttaggagagttaatattttagaaagaggaataagtttagaaataagatgatagaaatttttagagaatttgagaaaaagttattatggatataaagatatttttgagtatttttgttttaattttcgttttttggtgagtttgtagtattatgttttatatttatgttttagtgttgttatttgaatttttattgttttagattgtttttagtatatttttttttttagatatttttatttttgtttatttttagagaggttgttgttttagtataagttggtaaattttttaattttagggttttgtggatattatagtttttgttataattatataattttgttattgtagtataaaagtagttatatataatagttaaataaatgggtatggttgtgttttattaaaattttatttattgtcggacgtattggtttacgtttgtaattttagtattttgggaggtcgaggcgggcggattacgagtttaggagtttaagagtagtttggttaatatggtgaaattttatttttgttaaaaatataaaaattagtcgggtgtggtggcgggtatttgtaattttagttattcggggggttgaggtagataattgtttgaattcgggaggtggaggttgtagtgagtcgagatcgtgttattgtattttagtttgggcgatagagtgagattttgttttaaaaaaaaaaaaatagaaaataaataaataaaaattttatttataaaaatttagtagggtaaatttgacgtgtgggttgttatttgtagatgtttttttttaggtatatttttatttattttattggtttttattttatttttttattttttaattatgaatatgttattgtttttagttgttttatgtgttggtaagttttttaaattttaacgaatagtaaggtttaggattatttcggcgaatataggttgagtttttgttataaaaataaattgaatgttgaaatatggatgaatgtgggaggaaagagttatttggaagagtaatttttaaagtttttttttagagttttttttttggggagaaagaatagtggcggaaatttttgggtgaggaatttttgatttttaaataattttattttatgtttttggttgtttttttttttgagtaatgtagatagttttttggggttgtgatgattttattttttatgaagttatttgatgaaattttgattttattaattattagtatttaggaagagtttggtgtgatataagttgaatggaataattttatgggttgaggggggattttttagaagtatttaattagtatattttggagaaaaattagttgaagtattaggaaaggaaattatgttgtatgttaagtttttatttataattaatggtataaaaggattgtagaggaaggagagatttaaatttgtttatatttatttttagtagtttatttgtttttttattatttgttttagtattatgttttatagttgttgtttgtttagtttgggttgtcgtattagttgtttttttcggttttgcgtgttttttagttgttacggttatattttgtttggggtttgtaatattttcgttaatgtgagtaattgtaattggttttgtgagggtttttttaatggtagcgagaaggagattatgtagtttttgaacgatcgtttggttagttatttggagaaggtgcgttagttggagcgggataacgcggagttggagaaatttatttaggagcggttttagtagtaggagtttttgttgtgttttagttattagttttattttaagattattgaggagttttagtagaaggtgagggggttggttatatggggggttagtagtagttggttttttttgaatagtaagatatttttaagtttaagtgtattttatgagagaaatttttttttaga

SEQ ID NO: 1122 - DNA, 5452 bp, Artificial Sequence
  chemically treated genomic DNA (Homo sapiens)
tttgaaaagaaattttttttatgaggtatatttgaatttgaaaatgttttattgtttaaagagagttagttgttgttggttttttatatggttaatttttttattttttgttggagttttttaatggttttgaagtaggattggtagttggggtatagtaagggtttttgttgttgggatcgtttttggatgagtttttttagtttcgcgttgtttcgttttagttgacgtattttttttaggtagttggttaggcggtcgtttaggaattgtatagtttttttttcgttgttattgaaggagtttttatagaattagttgtagttgtttatattggcggggatgttgtaggttttaggtagggtgtagtcgtggtagttggggggtacgtagggtcgggaggagtagttggtgcggtagtttaggttgggtaggtaataattgtaagatatggtgttggaataggtaatggaaaagtaggtaagttgttggaggtggatgtgggtaggtttgagttttttttttttttgtagtttttttatattattaattgtgggtgggggtttggtatatagtatagtttttttttttaatgttttagttaatttttttttaaaatatgttagttagatgtttttaaagagtttttttttaatttataaaattattttatttagtttatgttatattaggttttttttgggtgttagtggttggtgaaattagagttttattagatggttttataggagatagaattattatagttttaaaaggttgtttgtattatttagaggggaggatagttagggatatggggtggagttgtttgggaattagggattttttatttaggagttttcgttattgttttttttttttagagagagagttttgagagagagttttgagagttatttttttaagtagttttttttttttatatttatttatgttttagtatttaatttgtttttatagtagaaatttaatttgtattcgtcgaaatgattttgagttttattattcgttggggtttagggaatttgttaatatatggagtaattgaaaataatggtatgtttatggttgagaaatgagaaagtaaaatggaaattaatggaatggatgggagtatatttaaaagagggtatttgtaaatggtagtttatacgttaagtttattttgttgaatttttgtaaataaagtttttgtttgtttgttttttgtttttttttttttgagatagagttttattttgtcgtttaggttggagtgtagtggtacgatttcggtttattgtaatttttatttttcgggtttaagtaattatttgttttagtttttcgagtagttgggattataggtgttcgttattatattcggttaatttttgtgtttttagtagaaatggggttttattatgttggttaggttgtttttgaatttttgaattcgtgattcgttcgtttcggttttttaaagtgttgggattataggcgtgagttaatgcgttcggtagtaaataaagttttaatggaatatagttatgtttatttgtttagttattgtatatggttgtttttgtgttatagtggtagagttgtgtagttgtgatagagattatagtgtttataaagttttaaaattaaaaaatttgttaatttgtattaaagtaatagtttttttaaagatgagtaagagtagaaatatttagaagaaaaaatatgttggaaatagtttggagtagtgagagtttagatggtagtattgaagtatgaatatgaagtataatattgtagatttattaagaaacgaaaattggagtaagggtgtttagaggtatttttgtatttatggtggtttttttttaaattttttggaaatttttattattttatttttagatttgtttttttttttagagtattaatttttttagaggtatgattatgttagtttgagatgtttttaggataagttatagtgtttatgagaatgtagatttattttgttgtttttataagtagatattgtttttgataagtgtgtttttattatttttgggatttagttattttttgatttttgtataatttagggagtttttttattgtttaataattattttttatagaatagttttttttattttattttttttttttgttattttattttgtttttgtttcgtagggaaataaagttatgttttagaaagaagttttaaaagattatttgtggaatataatataaattatttaaagaaggttgtatttgaattttaaaagtagtatgagaggagtagaaaagtatattttcgattttatttatttgagtgtttttttttttttttttagtttatttagaggtttgtaaattttttgtgttttttaaaaaaattttgttttattgattttttgttattgtttttttagtttttatttttatttatttttgttttaagttttatcgtaagtattataataaaatttagagtaaaaagtgttattatattttttttgttgttaattttgagtttagtttgttttttattttttttaattttttaatttttgtaggtatatggtaggcgtgtgtgtatgtttagatataggtttatgtatatatatatataaaattttttttttagtattgtttttgttgtattttataaattttgatacgttgtgtttttatttttatttgttttaagatattttttaattttttttttgattttttttttgatttattgattatttaaatgttttttaatttttatatatttgtgtattttttagttttttttttattttcgttttagttttttagttttattttattgtggtaggaaaagatatttagtatgattttaatttttttaaattcgttaagatttgttttgtgatttaatatatgatttattttggataatgtttcgtatgtattggagaatatgtattttgttattattggatagaacgtgttatttgttaggtttatttgttttatagtattgtttaaatttgttgtttttttgttgattttttatttgaatgttttatttattattaaaagtgagttattgaatttttttattattgtattgtttatttttttttttggttttgttaatgtttgttatatatatattaggtgttttgatgttgggtttatatatgtgtgtaattgttatatttttttggtgaatttttttattattatataatgtttttttttgttttttgtgataatttttgatttaaagattattttgtttgatatataagtatagttattttgttgttttttggttattatttgtacggaatatttttttttttatttttttatttttagtttatatattgtttttaaatttaaagttagttttttttagatagtatgtagatagtatttgttggttttttgaaaatttatttagttattttatgttttttgattggagagtttaatttatttatattttaataaattattgatagggaaagattaatattgttattttgttaatttttttgttttttttagagtttttttgtttttttttttttattttgttgtttttttttgtgttgtatggatttttgtatcgatatgtttttattttttttttttttttttttgtgtattttttataggtatttttttgtgattattatagggtttatatgaaataatttataattgtttgtttttagttgataatttttattgtatataaaaattatttttttgttttttttatatatattttttatgtattgatgttattatttatattttgttatattgtatatgtattaatttatttttatagttatagttatttttaatatttttattttttaaattttatagtagagggttaagtgtggtggtttatatttataattttagtatttttggaggttgaggagggtagattatttgaggttaggagttcgagaatattttggttaatatggagaaattttgtttgtattaaaaatataaatattagttgggcgtggtggtaggtatttataattttagttatttaggaggttgagataggagaatcgtttgaattcgggaggcggaggttgtagtgagttaagattatattattgtatattagtttgggtgataagagtgaaattttgttttaaaaataaataaataaataaataaataaataaataaataaataaataaataaattttatagtagaattaaaagagtgatttatttattattattatagtattatagtagtttatatttattagtatatttatatttattagtaagttttatatttttatatgtatttatattattgtttaatatttttttgttttaatttaaagaattttttttaatattttttgtaaggtaggtttagcgatgatgaattattttagtttttgtttatttataaaagtttgtattttttttttagttttgaaggataattgtattgggaatgatatttttggttggtagtttgtttgttggttggttggtttgtttttagtattttaaatatattattttatgttttttcggtttgtaaagtttttgttaagaaatgtattaattattttatggaggtttttttgtatatgatgttattttttttttgttgtttttaaaattttttatttgtttttgatttttgataatttaattataatgtgtattattttgatttatttgaatattttatttgggatatattgggttttttggatttggatgttaatgtttttttttaggttttaggagttttgagttattattttttttaataagttttttaaatttttttttttttttttttttttggatttttttaatgtgaatgttggtttgtttgatgatgttttatatattttttaagttttttttatttttttttatttttttttttttttgtttttttggataatttttaatggtttgattttgagtttattgattttattttttgtttgatttagtgtgttattgaatttttttattgaattttttaatttagttattgtattttttagtagtatgatttttgtttggtattttttgtattttttgtttttttgttgaaaatttttattttgtgtattgtttttttggttttgtagagtatttttaattatggttattttgtttttgttttgttttgttgagatagagtttcgttgtgttgtttaggatggagtgtagtggtatgatttcggtttattgtaatttttattttttgggtttaagtattttttatgttttagttttttgagtagttgggattatagttgcgtattattgtgtttagttaatttttatatttttagtagagatggggttttgttttgttggttaggttggttttaaatttttgattttaagtgatttatttatttcggttttttaaagtgttgggatta

SEQ ID NO: 1123 - DNA, 8149 bp, Artificial Sequence
  chemically treated genomic DNA (Homo sapiens)
gtgaggttgggagtgtagggattaagtagtagttataaaggatttttgggtttttaggtatttgtgggggttttttggagtagttttttttatgtgttgtttatataatatataataaggtttttttttggttttttttatttttgggatttgggttgtattattatagaaattcgttagttacggtttggggagcggggcggggagggttagcgggagttttaaagggatatagtgtatagggtgtaggtgatatttatattatcgtatatatattaataggtatagaagttttttaggtttttaggtttgtaagtatatgggtttagtattatattttgatttttttatgtgttttgtgttgagtttttagttttatttttattttggtttattgagttattaggtattatgtttttaggagataagggtaggagaagtcggatagtttttgttgtgttgttgaagggtttttttgttgttttttttttgagaggaattttaggtagaatttgagaattgataggtaggtgtgtagggtatatgtgtagggtatcgttggaggttttttttttaaggtgtgtggtggtggtggtgatggggtgtgtgtgtgtgtttttagggaggaggtagttattttaggtttagttaggttttataattttttaggtttttttttggtaagttgttttttattagattaaagtaggtattttggagtagaggatagaggattttttgagggatttgcgggtgtagtgggaggttaggtggggtgggatggggtaaggtttttttggggttgaatttttttttgtaggttgttgggcgtgatttttgtttttttggtttttttttatcggggaggatgggtttgggatcggatttatttaggaatggttttatttttaattgttttagtatagcggttattgtttatttagtgtatggttacgtaggtttatttttggtttaatatatgtgcgttttttttagttaggtgattatttatttttagttagtagtaatattggaaggtttttttgggattttttgggtgttttttttttttttcgtttttattcgtagtaggaatttttcgatttttatttgttttttggtatggtatgggttagttagtagtgtgttatttattttgttttacggtcgttttttgtttagtgttataagtgggtagggtttgatgttttgttgcgtggggttttgtaggttttcggttttagtttatagttgttttattttttgtttgtttttttattttgtttttaggttagcgtgacgtttacgtcgggaagtttttttattgatttaggtttattttttttttttttcgttttttgtttggtatagtttttagggataaggacgttgtgtaggcggtttgcgcgtacgcgtacgtgtatacgtttatttttattttttatttttttcgttttttttgttattttttagcggcgtattttgtagttgttttttattttttgtgtttcggtttttttttttttttttttttttgttgtttgggttttcgtttcggaatttttttattttttaattatttttatcgtggttagcgttgtttttttacgtttgtttttgttttttgtttttttttgtttttttttattttgtttgttatttttggtagattcggttttggttttatttgtggaatattttttttttttcgtttttttgtttttagtggtgttggtggggggtagagggtttgttgagttgataattttagttgtttgttttgtaattgtttgaggaatggtgagagattagagatttagtagtagtgggaggagaggagggagcgtttttttttagttgttatatttcgtaattttttggttgttttttgtttgttttcgattgtttagggcggtggtaagttaggtggtaaatattgggagattaaaaaagaagttggatatgagtttgtggggagatgggatggggttgggatggggtagggagcggggattaggggtttggggatattgtattttttttgagcgtatatgttaaatattattttaggattttagatttggaggataaatagaggaatttgcgtggtagaaattatcgatttttagagtatttaaaagtttttgatatgtaggagggtttttttttgagtttttttttgtttcggttttttttttttttttttttaagattagtgtttagagtttttaaggttgttgtttgattatttgttttttgattcgagttttttattgtttttataggttttgaagttgaggttagtgttgtttggggttttttttgatttattggttttgtagggagaggtcggggtggaatagatttattgttgttttttttttttgggtttaggtttagtttttgtaggttgggaattattttttttattttttaagttattttttggtttttaggttatgtacgttgatttattttgttgtttttttattattttttgtagtaagtttttgtttagagtttttacgggatttgtcgtatttatagttttttttgggttattttgttatataaaattgataaggtttagagttttagtatagtatggttgatttttttattattttttcggtgtttttgttgaggttcggtgttcgttttgataaggttttggttgggtagagggaggatgtatagtatggatttaatgaaggcgtttagtttgggattttagtttttaagttttgttatttaataatatttttttttgttttgtttgtattttaattattttttgtttggaattgaagtggtttggttatttgggagtttgtttttttttgttattgttagaggagtttttttttttagatttttagtttttggttttttttatttgtaggtgaatatggatatggtcggtgtggtttgggtttggggtggatatatgtagtagttgagttttgaagatttagataaagatttagaaattgggattttgagatatataagaagtgttagaaatattgttacggaaaatgttttagagtttgttttgatttttgttttgattttaatttggagtatttggaagggaggaggttttagtggttttttttgatttttagggggttgaggagtagtagggggttgttttttttttttttttttttttttatattagtttttaagggaaggtttttttttttatttttttttttttttttttgagatggagtttcgtttttgttgtttaggttggagtgtaatggtgcgattttggtttattgtaattttcgttttttgggtttaagagatttttttgttttagttttttaagtagttgggattataggaatgtattattacgttaggttaattttttttttttttttgagatagagttttgttttgttatttaggttggagtataatggcgtaattttcgtttatcgtaatttttgttttttgggtttaagtgatttttttgttttagttttttgagtagttgggattataggtatgagttattacgtttggtttttttttttttttttttttttttttttgtatttttagtagagataggattttattatgttggttaggttggttttaaattgttgattttatgattcgtttgttttagttttttaaagtgttgggattataggcgtgagttattacgtttagttttaattttgtatttttattagagatagggttttattatgttggtttggttggttttgaatttttgattttaggtgatttatttatttcggttttttaaagtgttgggattataggtatgagttattgtgtttggttttttatttttatttttatttatttttttagatagagttttattttattatttaggttggggggtagtggtacgattttggtttattgtaattttcgttttttaggtttaagtgatttttatgttttagttttttaagtagttggtattataggcgtttattattaaggttaattttttttttttttgtatttttagtagagacggggtttcgttatgttggttaggttggttttaaatttttaattttaagagatttatttattttagttttttaaattattgggattataggcgtgagttattacgtttggttttttttttattttttttttatttttttgaaattattttgtgaaatgttgttattttgggtttttttttttttttttttattttattttttaatttttttattagttttttaggtttgtatagtatttaggtattagttggttttgaaagttatagtaatgtgattgtaagaagaatttttttttatatgtgtgtgtatatagagataatagatatagggatttatttttatagatatataaagatatataagaagatatacgtagttagtagatttgtgtgttgatttttttaggtatatatattaatatatttatttatgagtgtaattttttttagagaagatatattatagaaatattagtttatatatagtttattttttgtttgtagatttataattatatatatgtttacggatatttgtatatgtagatatatacggggatgtgtatgttatgtataggggagttgatggggtaataagttggtgttgggaaggtagttggtaggaaaggtgtagatagagagtagagagggaataaaaggtaatttagaggtttagttagggttattttttttagatttttttttttaaggtggggaggggtgcggatggggaggggagggttggagaagtcggttagttgggggcggggttgagggcggggttaagagttcgggtttatttagatgttagttattaacgttttttcgttttttcgtttttttttttttatttttttttttttttttttttttttttagtgtttttatttttaattttcgttttaagtcgtttattagtttttttttttttcggtcggagtttgaatcgagttcggttggttgtgttgcgcggtgtcgtcgggaaagatggtcgtggcgttgcggtacgtgtggtttttttttttttgtagtttttgtttgtttatttagattttcgaggaatgtgagtagttgaagggagtttgggcgtttattttcgtcgttatgttgggtttttttttattttttatttttttattttttttttgtttcggattttgatttttttttttggttttttttgggtatagggtgggtaggagatagttaggacgttgggtattttcggagagaagggtagggtagaaggtgcggggcgtgttaggattatggatagggataggcgcggtcgtcggggcgattttagtattagggatagcgaatttggagtagggtttcgaggttttgggttttttttatgttttttttagttcgttttatttttgttcgttttatttcgattttttcgtttttattttttattataggggtgtggtagtaggagaatggggtcgtttttagtttttagttggtttgtgtaaaggtttgtgtttaagttttgtttttatttttttttttttttttgggtttttggttattttgtttttgaattgagataggaaaaggtggtttgaaaaattttggttttagtttagtagttttttggatttttttttgtgtgtagttatttggtgggggtgggggtagggttgttggagtatgtgtttatggttgtaatatttgttgggggtataagtaggtgagtggatgttggggagtgtggtcgtagggttgtgattaagtatggatatattgtgtatgtttgtgtgtttttgtgattgattgagcgtagatattcgtgaatgtgattttgatttttttatatgggtgattgtgtgagttattttgttatttattggttaggtttgtggaggtcgggaggtatttgattacgatatttgattgtattgggttatgtgtatgtgtgagtggggttgaatgtaagtatatatttgcgtgtggggggtgttatcgtgatggtgtttttttttgtaagtagttgttaggtcgtgtgaggggtatgttatagggtattatgtgtgagggtatttgtgttttttgagttattaggttttagtttttttttagttttattttgatatttttgtttttgggtttggataaggaggaggttagtgttattgagagacgagttggcggataggggttgggaagattgtttgtgttagtagtgggataggggttgcgagagagaggttggggaggtatttggcgttgggaggtagtgagggtttggaggaggtaaaggggttggttttttagatatatatatggagggttagggttaggtagatttttttggtatagatgtatatggatatatgtatataggtgtatgaagataaggtaggtgtagggatgaaggagtagagtcgttgagaggttatataggtggaaatatatattagtgaggtttttagatttagaggatatagaggtggatatataatataatattgtatagtggaatgtaagtcgtgtattttttatagaaagatgggagtggggagagagaattaggttaaaaggttatggtagttttaaggttgttttggttattgattagtatttgtttttgattttgatacgatatagtgggtagtggtaggtagtcggttttttttgttggaatttgttttttatttttttttttttagttattttagttttttttgtttttttttttgttttttttatttagttggttttttgtattttgttatttttgttattatttttttttttagtttagggttttttgtagtgtttttagggagtttttttttttttttttggatttttatattgaggttttttgtagagataaagtttttagaggtagtttgttgtttttttttttttttttttttttttttcgaggtcgttttggttagtgttttgtagagttttggggttgggatagtagttttggtttttgttttagagagtttggtggttgtttgggaggaaggagggagaagaggagggttggcgttaatttcgtaggttatggaaatttagaggtagtagggtttttgggatagtttttagggggagggggtagtagggttttgaaggttgggttttggtaattgaaaatatttagttgtgttaattggattaggagggaagtaggttggagtaggggacggtgttttttaaggtattttgaatgggtggggttagttttgtaggttttgttaggttttgttagggggttgtaaggatattttttgttaaaggtaagaatttttttttttttgtttgttagagttggaggtatggtttggttgtttttgggttatatgttttgtgtgtttatttagtggagtttttttttttgggtatttttttgttttatttttttgggtttgatttgttattgttttagtttagcgtgtgtttttttgttgttattgttagggtttttttttttgttattttttttttacgggggggttgtaggagtttattatgttttttgttatttgttttattttggggttgtttgttagtatttttttttatttttttttttgttgtttgtttggattttttagatgaaggatattatggtaagttggggaggggtgagagtgttttttagaaggttaaggagaagggtaaggaggtttttagttgagtttgtattttcgtttttttgagtgtcggggttttgttcggttttttttgagtattatgtgttttttttatttgtgtggggttggttttgttttgtttttgttttagtttgggtattttgttatttttattgtttttttttgttattttttttggtttttttttttttgtttggggtttgttttttttggtttttgtgttttggtttttgttgttttcgtttttttttgttatattttttttgttttttttaggtatttttttgtaatttacgtggttgttttttttttttttttttttatgttttataagttttttttgtttttttttttcgttcgtttttttgtggttatggggtttttaggggttttggattttgttttttttacgatgggataggtgttgaggttatgatattagttaggtagtatttttattatcgttttttttatt

SEQ ID NO: 1124 - DNA, 8149 bp, Artificial Sequence
  chemically treated genomic DNA (Homo sapiens)
ggtggagagagcggtggtgagggtgttgtttggttggtgttatagttttagtatttgttttatcgtgagggaagtagggtttagagtttttggaggttttatggttatagggggacgaacggaggggaagaataaaagaggtttgtgggatatgaaaagagggagagaggggatagttacgtaagttataaagagatgtttgagaaagataaaaagggtatgatagaaagaagcgggggtaataaaagttaagatatagaaattaagaaggataaattttagataggggagaagggattagagagaatggtagagaggaatagtgagggtgatagagtatttaggttggggtagagatagaataaagttagttttatataggtgagagaagtatatggtgtttagggagagtcgagtagggtttcggtatttaggagggcgggggtgtaggtttagttgagggtttttttatttttttttttggttttttgggaaatatttttatttttttttaatttattatggtgttttttatttgagaaatttaggtaggtagtaagggagggaatggagagaaatattgataggtagttttagagtggggtagatggtaggggatatagtaagtttttgtagttttttcgtggagagggaatggtaggagaggaggttttggtagtggtaataagggggtatacgttgggttggagtagtggtaggttaagtttagggagatgggatagagagatgtttagggagaggagttttattggatagatatatagggtatgtagtttagaggtagttaggttatgtttttagttttagtagatagggagagagaaatttttgtttttaataaggagtgtttttgtagttttttggtagggtttggtagggtttgtagaattgattttatttatttaggatgttttggaaggtatcgttttttgttttagtttgttttttttttaatttaattagtatagttgagtgtttttaattattagggtttagtttttagagttttgttgttttttttttttgaaaattattttaaaggttttgttgtttttgagtttttatagtttgcggggttggcgttagttttttttttttttttttttttttttagatagttattaagttttttggggtagaggttagagttgttgttttagttttaggattttgtagagtattggttagggcggtttcgaggaagggagaagagggagggagggagtagtaggttgtttttgaaagttttgtttttgtagaagattttagtgtgaaggtttagggagggaggagggggttttttggggatattgtagagggttttgagttggggagggagatggtgatagggatgataggatgtagaaagttaattaggtggaggaagtaggaaaagagataaagggggttggagtggttggggagggagagatggaagataggttttaatagggagggtcggttgtttgttattgtttattgtgtcgtattagggttaagaataagtgttggttagtgattagggtagttttggagttgttatggttttttggtttagttttttttttttatttttatttttttgtagagaatgtacggtttgtattttattgtatagtgttatattgtgtatttatttttgtgttttttgggtttaaaagttttattggtgtgtgtttttatttgtgtggttttttagcggttttgtttttttatttttgtatttgttttgtttttatgtatttgtgtgtatgtgtttatgtgtatttgtattaagggagtttgtttggttttggttttttatgtatgtgtttaaggggttagtttttttattttttttaagtttttattgttttttaacgttaggtgtttttttagtttttttttcgtagtttttgttttattgttggtatagatagtttttttaatttttattcgttaattcgttttttagtgatattggttttttttttgtttaggtttagagataaaggtgttaaggtgaggttgggaagggattggagtttggtagtttaagagatataaatgtttttatatatgatattttgtgatatgttttttatacggtttgatagttatttataggagaaaatattattacggtaatattttttatacgtaagtgtgtatttatatttagttttatttatatatatatatgatttaatgtaattaaatgtcgtggttaaatatttttcgatttttataagtttggttagtaagtaatagagtgatttatatagttatttatgtaaggaagttaaaattatatttacgaatatttacgtttagttaattataagaatatatagatatatatagtgtatttatgtttaattataattttacggttatattttttaatatttatttatttgtttgtgtttttaataaatgttataattatagatatatgttttagtagttttgtttttatttttattaaataattatatataaaaaagggtttagaaggttgttgggttgggattagggttttttaagttatttttttttgttttagtttagagatagggtgattaagggtttaggaggggaaagagaaatggggataagatttgaatataggtttttgtataagttagttgagggttggggacgattttatttttttgttgttatatttttgtggtgggggatggaagcggaggagtcggagtggggcgggtagagatggggcgggttaaggagagtatggaggaggtttaagatttcggggttttgttttaggttcgttgtttttggtgttgaaatcgtttcggcggtcgcgtttgtttttgtttatggttttgatacgtttcgtattttttattttgttttttttttcgggggtatttaacgttttggttattttttgtttattttgtgtttaggaaaggttagggagaggagttagggttcggaatagggagaaggtgaggaggtagaagataaagaggggtttaatatagcggcgaaggtaggcgtttaggttttttttagttatttatatttttcggggatttggataagtaggtaggggttgtagaggaggagaggttatacgtatcgtagcgttacgattatttttttcggcggtatcgcgtagtatagttagtcgggttcggtttaggtttcggtcggaggggaagggggttggtgggcggtttggggcgggagttgggagtgggggtattgggagaggggagaagggaagggaagggtgggggaagagagacgagagaacggaaggacgttagtgattaatatttgggtaagttcgggtttttggtttcgtttttagtttcgtttttagttggtcggtttttttagtttttttttttttattcgtatttttttttattttggagggagaaatttggaagagatagttttggttgggtttttaggttgttttttattttttttttattttttgtttgtattttttttgttagttgtttttttagtattaatttgttgttttattagtttttttgtgtatggtatgtatattttcgtatgtgtttgtatgtgtaggtgttcgtgggtatgtgtgtggttgtggatttgtaagtagggagtgagttgtatgtgagttggtatttttgtggtgtgttttttttgggaggggttgtatttatgagtgggtgtgttagtgtgtgtgtttgagggaattaatatataagtttgttagttacgtgtgtttttttgtatgtttttatgtatttgtggggatgaatttttgtatttattatttttgtgtgtatatatatgtagagaagaattttttttgtagttatattgttatagtttttagagttaattgatgtttgggtgttgtatagatttaaaaagttaatggggggattgggaagtgggatagagaagggaggaaaggggtttaagatggtagtattttataaaatagttttaggaaaatgaagaaagaatggggaaagggttaggcgtggtggtttacgtttgtaattttagtagtttgggaggttgaggtgggtggattttttgaggttgggagtttgagattagtttggttaatatggcggaatttcgtttttattaaaaatataaaaagaaaaaaaattagttttggtggtgggcgtttgtaatgttagttatttgggaggttgaggtatgagaattatttgagtttgagaggcggaggttgtagtgagttaagatcgtgttattgttttttagtttgggtgatggagtgagattttgtttaaaaaaataaataaaaataaaaataaaaggttaggtatagtggtttatgtttgtaattttagtattttgggaggtcgaggtgggtggattatttgaagttaggagtttaaaattagttaggttaatatggtgaaattttgtttttagtaaaaatataaaattagggttgggcgtggtggtttacgtttgtaattttagtattttgggaggttgaggtaggcggattatgaggttagtagtttgagattagtttggttaatatggtgaaattttgtttttattaaaaatataaaaaaaaaaaaaaaaaaaaaaaaaaaagttaggcgtggtggtttatgtttgtaattttagttatttaggaggttgaggtaggagaattatttgaatttaggaggtagaggttgcggtgagcggagattgcgttattgtattttagtttgggtgatagagtaagattttgttttaaaaaaaaaaaaaaagttagtttggcgtggtggtgtatttttgtaattttagttatttgggaggttgaggtaggagaattttttgaatttaggaggcggaagttgtagtgagttaagatcgtattattgtattttagtttgggtaataagagcgaaattttattttaaaaaaaagagagaaagaatggggaaggaagtttttttttgagaattggtgtgggagaagagaggaaggaggaaaataattttttgttgttttttagttttttgggggttaagagaggttattgaggtttttttttttttagatgttttaggttagggttaggataggggttaggataagttttgggatatttttcgtgatagtgtttttaatattttttgtgtgttttaaagttttaatttttaggtttttgtttgagtttttagagtttaattgttgtatgtgtttattttaaatttaagttatatcggttatgtttatatttatttataagtaaggggagttaaagattaagggtttgaaagagggggtttttttgataatgataagaggaaatagatttttaagtggttagattattttaattttaaataggaagtggttaaagtgtaggtaaggtaagaaagggtgttgttaggtgatagagtttggaggttgaagttttagattagacgtttttattaaatttatattgtgtattttttttttgtttagttaggattttattaaagcgggtatcgagttttagtaggaatatcgaaaggatggtagagaagttagttatgttgtgttaaggttttgggttttgttagttttgtgtaatagagtgatttaagaagagttgtgaatgcggtagatttcgtggggattttgggtaagagtttgttgtagagggtggtggagaagtagtagggtgggttagcgtgtatggtttggaggttaagagatgatttggagggtaagaagagtgatttttagtttgtaagagttggatttgggtttagaagggaagagtaatagtggatttgttttatttcggtttttttttataaagttagtggattaggggaggttttaggtagtattggttttaattttaaggtttgtaggagtagtaggagattcggattagagagtagatgattaaatagtagttttgggagttttgagtattggttttaggagggggaggggaggaaatcggagtaaggaaaagtttaaagaaggatttttttgtatgttagaggtttttgggtgttttggaggtcgataatttttgttacgtaagtttttttatttgttttttaaatttagaattttggaatggtgtttggtatgtacgtttaggggaaatataatatttttaaatttttggttttcgttttttgttttattttagttttattttatttttttataggtttatatttaattttttttttggttttttagtatttgttatttagtttgttatcgttttgggtagtcggagataggtaggaagtagttagaaggttgcgagatataatagttgggagggggcgtttttttttttttttttattgttgttgggtttttgattttttattattttttaggtaattatagagtaagtagttagggttgttagtttagtaggttttttattttttattagtattattaagggtaaaggagcggggaggggggagtgttttatagatggagttaaggtcgggtttgttaagggtgatagatagagtgagaagaggtaggggggagtaggagataaagatagacgtaggaagatagcgttaattacgatggagatggttagggggtggggaaatttcgaaacggagatttaggtagtagagaaagggagagaagaggaaatcggagtataaagggtgagaggtagttgtagagtgcgtcgttgagaaatggtagaaagagcgagaagagtgaggggtgggggtgggcgtgtgtacgtgcgcgtgcgcgtaggtcgtttgtatagcgtttttgtttttgggggttgtgttaggtaaggggcggggaggagggaagatgggtttgggttagtggaggggtttttcggcgtggacgttacgttggtttgggagtagggtagagagatagatagagggtggagtagttgtgagttggggtcggaggtttataaagttttacgtaatagagtattaagttttgtttatttgtggtattgggtaagggacggtcgtgagataggatgaatggtatattgttggttgatttatgttatgttagggaataggtgggggtcgggggatttttgttgcgggtaggaacggggggagggggaagtatttagaaaattttagggaagttttttaatattgttgttggttgggagtaagtggttatttggttggaggagacgtatatgtgttaggttaagagtgagtttgcgtgattatgtattgagtggatagtggtcgttgtgttggggtagttgaagatggggttatttttgagtaagttcggttttaaatttatttttttcggtgggaaagggttagggaggtaagggttacgtttagtagtttatagggaggggtttagttttagaagagttttgttttattttattttatttggttttttattatattcgtaggttttttagggagttttttgttttttgttttaaagtgtttgttttggtttgatgggaagtagtttgttagggagggatttgggaggttgtggagtttggttagatttggagtgattgttttttttttgaaaatatatatatatattttattattattattattatatattttgagaagggaatttttagcggtgttttgtatatgtgttttgtatatttgtttgttagtttttaggttttgtttggagttttttttaaaggagaagtaataagagagttttttaatagtatagtagagattattcggttttttttgtttttgttttttggggatatggtgtttggtgatttagtgggttagagtgggggtggggttgggggtttagtatagggtatatgaaagggttagagtgtggtgttgggtttatgtgtttgtaggtttgggagtttggggggtttttgtgtttgttggtgtgtatacgatggtgtgggtgttatttatattttgtgtattgtgtttttttaaggttttcgttggtttttttcgtttcgttttttaggtcgtggttggcgggtttttatggtgatgtagtttaagttttagaggtgggggaagttagaggaaagttttgttatgtgttatgtagatagtatataaagggggttgttttagggagtttttataggtatttgggggtttagaagttttttatgattgttgtttagtttttgtatttttaattttat

SEQ ID NO: 1125 - DNA, 5689 bp, Artificial Sequence
  chemically treated genomic DNA (Homo sapiens)
ttttagggaatttgcggagtgtcgttttgggaaattaacgcggtcggggtttgggggttgggagttttattttgtgtgtgtatgtgtatggcgggggggggggggggcgcggtggttgttgaggggtcgttatataggtttttcggaggttcgcggagtgaaacggggggagttaatgggattaacggcggtgggagaggggttgtgtgcgatttgttaaggtgcgttcgtgtggtttttcggcgggttgtgcggtggtatgtgattttattgagtaggtgtttttgtatgtttgaaatttagcgagtgtgtgggattgttcgtgttagttatatgtgtgtatgtggagacgtagatgttttggagttatgttgtcgttttgtgagtgttgagtggtttcgttgtgttttcgtgttgttttaagagtgtggattagaatggtttaacgttgggttatgtgttttttatcgcgtgggtgtttttttttaattgtgtttgtgtatggttgtcggtcggtgtcggtgtgtgtgtttgtgttgagtaaatgaggttagagggttgtttagtagaagatttagggtttaggttatatatttttttggaaaagggattatggaaggatagtgattagaaggatagaataggggaggagagggttcggttttttgaattttggtttttggtattttttttttttgtattagtttagatgggaaagttaggttagggttatatagatttttggtgttggggtttttagagagaagttgattagttttttgtttttttggtttaggacgtagggaagagttttttaggtagtggaaatgttatattgattttgtggtatagaaatgaagattttacggtggggtggaagggtattttttttggagtgagagtgaagagttttgagttatttttaaagggagaagggaattgagtgttttttagggtagtcgttttgtattaggttttttttttattttttattttgttttagaaaggattttttcgtttagggtgattttatataggagatttttatttatatggaattagatatatagcgtggtatattaatattagattagattatataaggatatttatcgtgttatattgtgtttgttaaggagtgggtggggagagtattggaatttgaattgggaggttagtgtagtgtttagaagggatttagatgtgttatattagtataggacgttaatttatgtttgttaggattttggggtgaaggagaggggttggttggtgggagggttttttagattggttttttttttttttttatttttattttattttagttatagattttgtttgttgttttttttttgttttttacgtttgttattttttttttttttgtttttttttttattttatttatatttttatcgtaaatggttatttttattatatttatgtatatattatgggaggtagggatagaggaaattatttgaattgttttggggcggggagggtagaaagtgggaggggtgttgggaatgtgttaaggtgtagtgtttggttaagtaggggtttgaggattagggagatatagatggagagaaataaagattttagaagttgaaggggaagttgggagggatgtttaggagagagagtttttaggaaaaggttttagaggtagataaaaggtagagttgggcgggtagtggcggggtaggtaagggaggcggagggatataggagggggcggggtattgaggttgtaagtagatggagaggatttgttttgttgagttgaattttttagttagtgaggtttgggagaatttgatgggggtggggattattattttggttgttcgtttttgtttttttattttttttttattttattttgggttttggggaaggaggtgtttggttttaatttttttatggttttaatgtaaggattttagggtttttattttgtttttaagttgtggttattttatttagtttatatatttttaagtttattatagagggagaattggggttgtagggatttaggggttgtaagttatttgtggtgagaaaggtgattttttttttttttgtaggatttgaaggagaagaaggagaaggtggaggagaaggtaagtcggaaagagcgaaagaaagaagtggtggaggtgtggaggggtgggggagaggattatatttgttttattatttttttttttaattattttattttttttttgtttttttttcgagggtgttgggttttgtcgtttttttgagttttgttatttttgttgttttattttgtggtttattttaagtttttttattatttaggttttagttttattggtggtgatggtgggtaaggtatgtagttagtttgaggttatttttttttttggtttttataggaggaggagaacggggttgaggaggaagaagaagaaattgtcgaggatggagaggaggaagatgaaggggaagaagaaggtggggaggggtaggggaggttgggttggtaaagttcgggtttaaaggagagtagagttagggtgggtttgaagatttgaagtagggttgagggcgattacgggggttttgtcggagttttttgtttttttttaatgatttatttttggttttttagatgaggaagaagaagaagaggatgatgaagggttcgcgttgaagagagttgtcgaagaggaggtttgggttgggttgttgggtttgaggggttgttagggatgtagtcgggttgggcgttttttggatttggatttagatttttgtgtggtaggggtgggggttggaataggatcgggatagggggaggtttttttttttattttatagtttttttattttttttttttttataggatgaagcggattttaaacggtagaagatagaaaatggggtatcggcgtgagtttttgttaataggttggggttgggaggtttttttgggtttggaggtgggggtgggggtagttaagtttagttattttttatttggttttttgttttgggttttgtattagagttgttatttttttttttttttttagtttttttattttcgtttttttagatattgcgttttttatttttattttgttattgttttattttttgatttgttttatttgagttttttagttggtttttaattgtttttttttttttttgtttttttttttttttttttattagttttatttttttttcggtagttttttttatttaatttttgtattttttagttttatgttttgttttatttttattttgtttgatttttggattttttttagattttttttttttagatagcgttaggtcggggtggggtcggggttggggtcgagttttatagttgttttttttttttttttttttgtataatttaataaagaaatggtcgcgtttttgtttttaatttgttttttgttttttcgggggttttagttagtgcgataaaagggtagagagggaggagggtggttgattttttattttgttaggatttttttttttgatataaaagtagtagtatatttttattatttacgatttaagaagataagattagttttttaggggtggtttggagtttagtttttttgagagttgatttatgttttgttttggatttttagggatgtttttttttagtaatatatatttttttgttaatttatataagatttagatattgttgagtttagtggaaagttattagttttattgtgttgaattaggtatagagaaatagtttagaaataggaagttttgtttttgagttgggagagggttggtagttttgggttttagtttgttaggatttggagtgagttgtttggtattagagatgttttttgtttggtatggaagcgagttttttttagttaagtagggaaattttgggtttcgtgttatttttaggtcggttgtatgtttcgttatttgttttttaattttttttgggttgggttggggagcgggagttgtatgatttttgttagttttgggttttttttagttttattgtttttgttttttttgagtttgatttttgttaggagatttttaagatttttgtatttttttattttcgtatggtttttgttttttttttttagttcggaatttttggattggaggatgtttttgagggtatggggatttgagttggagtggggaggggtgttgatttattaatagtattattttttttaggagacgttcgtaatttatttaaggttaggattatatattgttacgtatataggtatatttatagtttttatttttacgttttttaattttggtaaattgtataatttttttgaagtttagtttttttatttgtataatggggaaaagtattagattttatgaattattataagtaaagtgtttaatatagtgtttagtacgtaatgaagttttaatataatgtagttattttttatgttttataaagttggtatgtttagttttagatttattattttttggggtgtagtaaggttttttgtttattatgtttttagggatattgtattgatgggtggaaaggtaggtttaaaggggttacgaagttttgggaggttaagggaacgaggaaggagattgagtaataaggaaagagtttgttaagaaggaggtgtgaatattgggattgaggaggtagtttagagatgggtaagggggtagttttaggtagaaatggttcgtggaggtagaaggtttttgggagagggagtagtttggagggtggggtaggggcgaggagggggaggtggggagatttaggattgaggaagtaaataaggggagcgttattatagaggtggagaggtggagggtgttgttgttgggaattaatttttttagattttttattgcgaagcgaaatcgtaagttttggggtgcggggggcgggtcgggaggaggggaagtggggaaggtggagggaaggtcgggtataggggtgaaggtttagagattagtagaacggtattttagttacgacggttattttgttttgtttgtttttcgttacggttttgttttgttttttgggatattttcgtttttatttttttaggttgtttgatttgtttagttttttagtttttttttggatttcggtttttggttatttttttttattttttttttaaggtttttttttggtttttttttttttagaatttttttttttatttttttttttgtagaattttttttttattttttattttttattattgttttttttttttttttgatttttttttggagggtttagcgttgtttagattataggagagatgtgggaggtttagtttttgggtttgttgtttttgtagtcgttttgggtggttttaggtaaaacggggatggcgggagggttgatttttagttttataggaggggattagtagggatttttgtggttataaaggttttgaggtttttagttttgtggatttttttaattttttttttgggtagtttttttatttcgaaagtttttttgggtagagaagaaatagaaatttaagttttttttgtattttgtttttttttcgggaaatatttaggttttttttttatttttgtttttcggtttacgttttttttttttggttttttttttgtttatttagt

SEQ ID NO: 1126 - DNA, 5689 bp, Artificial Sequence
  chemically treated genomic DNA (Homo sapiens)
attaggtgagtaaaagagaggttaaggggagggggcgtgagtcgagaggtaggggtagagaaggagtttgggtgtttttcgagggagaaatagggtgtaggaagaatttgggtttttgttttttttttgtttagagaggttttcggggtggaaggattgtttaaaaaagggattagaagaatttatagagttaaggattttaggatttttgtggttatagagatttttgttggtttttttttgtggggttggaggttaattttttcgttattttcgttttatttggagttatttaaagcggttgtagaaatagtaagtttaggaattgagttttttatattttttttatggtttgggtagcgttgagttttttaaaaggaggttagaaaaggaaagggggtagtggtggggggtggggggtaaaggagaagttttgtagagagggaggtggaggaaggggttttagaagaagggagattaggagagggttttggagagagggtggggagggatgattagaggtcggaatttagaggaaagttggaaagttgggtagattaggtagtttgaggaggtgggggcgggggtgttttagggaatagagtagggtcgtggcggagagtagatagagtaaagtggtcgtcgtggttgggatgtcgttttgttggtttttgggtttttatttttgtgttcggttttttttttattttttttatttttttttttttcggttcgtttttcgtattttagggtttacggtttcgtttcgtagtggaaagtttgagggggttgatttttagtagtagtattttttatttttttatttttgtggtggcgttttttttgtttatttttttagttttgggtttttttattttttttttttcgtttttgttttattttttagattgtttttttttttagggattttttgtttttacgaattatttttgtttggaattgtttttttgtttatttttaagttgtttttttagttttaatatttatattttttttttggtaagttttttttttgttgtttaattttttttttcgtttttttaattttttagaatttcgtgatttttttagatttgtttttttatttattagtataatgtttttgggaatatggtggataggaagttttattgtattttaaaaaatggtaggtttgaggttaggtatgttagttttgtggggtatggagaataattatattgtattgaggttttattacgtgttaagtattgtattggatattttatttatagtaatttatgaaatttaatgtttttttttattgtatagatgaggaaattgagttttaaagaaattgtataatttgttaaggttagggagcgtgaagataaaagttgtgagtgtatttgtgtgcgtgatagtgtgtagttttgattttggatgagttacgggcgttttttgggagaaatgatgttgttgatgagttaatatttttttttattttaatttaggtttttatgtttttagaagtattttttagtttagaggtttcgaattaagaggagaaggtaagggttatgcggagatggagaaatgtagaaattttagaaattttttaatagagattaaatttaggggaaatagaggtagtgggattagggaaggtttaagattgataagagttatataattttcgttttttagtttagtttagggagagttggagggtaggtgacgaaatatatagtcgatttggggatgatacgagatttaggatttttttgtttgattggaaggagttcgtttttatgttaggtagagggtatttttgatgttaggtagtttattttagattttagtaggttgagatttaggattattagtttttttttagtttaggggtaggattttttgtttttgggttgtttttttgtgtttggtttagtataatagagttggtagttttttattgggtttagtagtgtttaggttttgtgtgggttagtagggaagtgtgtattgttggggaggagtatttttgagaatttaaaataggatataagttagtttttagaagagttgggttttaggttatttttggagggttgattttgtttttttgagtcgtgggtggtaggagtgtgttgttgtttttgtattaaagggaagggttttggtagaatgggaggttagttatttttttttttttttatttttttgtcgtattgattggagttttcgggaaagtaggagataggttaaaaatagaagcgcgattatttttttattaaattatataaaaagggaggggaggggggtagttgtggggttcggttttaatttcggttttatttcggtttggcgttgtttgagaagaggggatttgagggagatttagggattaggtaggatagggatggggtaggatatgaggttgggggatgtagaggttaggtgggagaggttatcggaggaagaatgaggttggtaggggagggagaaagagagtaaagagagagaggagtaattgggggttagttggagagtttagatggagtaggttaggaggtggaataatggtagagtgagggtggagggcgtagtgtttggagaggcggaaatgagaaggttggggagaaagaagagggtggtagttttggtgtagggtttagagtagggagttaggtgaagagtggttggatttggttgtttttatttttatttttaggtttagagaggttttttaattttagtttgttggtaggggtttacgtcgatgttttattttttgttttttgtcgtttgggattcgttttattttgtggagagggagagaatgggggagttgtaaaatgggaggggagatttttttttgtttcggttttgttttagtttttatttttgttatatagggatttgggtttaaatttaaagggcgtttagttcggttgtatttttgatagttttttaggtttagtaatttagtttaaatttttttttcggtagttttttttagcgcgggttttttattattttttttttttttttttttatttgaggagttagaaatgggttattggggaagggtaggaagtttcggtagagttttcgtggtcgtttttagttttgttttaggtttttaaatttattttgattttgtttttttttgagttcggattttgttagtttagttttttttgtttttttttatttttttttttttttttattttttttttttttattttcggtagtttttttttttttttttttagtttcgtttttttttttttgtggggattaggagagggagtagttttaggttggttgtatgttttgtttattattattattaatgggattggagtttgggtgataaaagggtttgggatgggttatagggtggggtagtaagggtgatagggtttaggggaacggtaggatttagtattttcggaaggaaagtagaggaaggatgagatgattgggagggaagatggtagggtagatgtggtttttttttttatttttttatatttttattatttttttttttcgtttttttcggtttgtttttttttttattttttttttttttttttttaggttttgtaaaggagaaagaggttattttttttattataaatggtttgtagtttttaagtttttgtagttttagttttttttttgtagtgagtttagaggtgtgtgaattgaataaggtggttatagtttagagatagaataggggttttagggtttttatattagggttatgaaggggttgagattaaatatttttttttttaagatttaaggtgaggtgggaaagggatgaagaagtaggagcgggtaattagggtaatgatttttatttttattaagtttttttaaattttattggttgaagagtttagtttagtaaagtaaattttttttatttgtttgtagttttagtgtttcgtttttttttgtgttttttcgttttttttgtttgtttcgttattgttcgtttagttttgttttttgtttatttttggggtttttttttgaggatttttttttttgggtattttttttagttttttttttagtttttaaggtttttgtttttttttatttgtgtttttttaatttttaggtttttatttggttaaatattatattttagtatatttttagtattttttttattttttgtttttttcgttttaaaatagtttaagtagttttttttatttttgttttttatggtgtatgtatgggtgtagtggaagtagttatttacggtggaaatgtaggtgaagtagaagagaaaataaggaggggaagagtagtaggcgtgggaaataaggagagagtaataaataaggtttgtgattggggtgggataggaatggagaagagggagggattagtttaggagatttttttattagttagttttttttttttattttaagattttagtaggtataggttgacgttttgtgttgatatggtatatttgagttttttttggatattatattagttttttaatttagattttagtgttttttttatttattttttggtaggtatagtgtaatacggtaggtgtttttgtgtgatttgatttggtgttggtgtgttacgttgtgtatttgattttatgtgaatggaagttttttgtgtgagattattttgggcgggggggttttttttggaataggataggggataggagaggagtttggtgtagaacggttgttttggggggtatttaatttttttttttttttaagggtagtttagaattttttatttttattttagagagggtgtttttttattttatcgtgaggtttttatttttgtgttataaggttagtatggtatttttattatttagggggtttttttttacgttttgggttaggagagtaaagagttggttagtttttttttgggggttttagtattaaaagtttgtatggttttggtttgatttttttatttgggttgatgtagggagggagaatattagagattaaagtttaaggggtcgggttttttttttttttgttttgtttttttggttattgtttttttatgattttttttttaggagaatatgtgatttgggttttaggttttttgttaagtagttttttggttttatttatttaatataggtatatatatcgatatcggtcgatagttatgtatagatatagttagagaggagtatttacgcgatgggagatatatggtttagcgttgggttattttggtttatatttttgagatagtacgggagtatagcggagttatttagtatttataaagcgataatatggttttagaatatttacgtttttatatgtatatatgtaattgatacgggtagttttatatattcgttggattttagatatataaagatatttatttagtgaagttatatgttatcgtatagttcgtcggagggttatacgggcgtattttggtagatcgtatatagttttttttttatcgtcgttaattttattggtttttttcgttttatttcgcgggttttcgggagatttgtgtgacggttttttagtaattatcgcgttttttttttttttcgttatatatatatatatataagatagggtttttagtttttaaatttcggtcgcgttaattttttaaagcgatatttcgtaggttttttgggg

SEQ ID NO: 1127 - DNA, 5807 bp, Artificial Sequence
  chemically treated genomic DNA (Homo sapiens)
aagacgtaatatattagaatttttgggatatatttaaagtagtgtgtagagggaaatttatagtattaaatgtttataagagaaagtaggaaagatttaaaattgataataaaatattataattaaaagaattagaaaagtaagagtaaatatatttaaaagttagtagaaagtaagaaataattaaaattagagtagaattgaaggaaatagagatataaaaaattttttaaaaattaatgaatttaggagttggtttttttgaaaggattaataaaattgatagatcgttagtaaggttaataaagaagaaaagagagaagaattaaatagatgtaataaaaaatgataaaggggatattattatcgattttatagagatgtaaattattattagagaatattataaatatttttacgtaaataaattagaaaatttagaagaaatggataaattttttgatatatatatttttttaagattaaattaggaagaagttgattttttgaatagattaataataggtttttttttgttttttaaattttggtgggtatattatagttgtgtatatttatggggtatataaaatgttttgatataggtatgtaatgtgaaataaatattttatggggaatgcggtggtagattgttaatatgagttgttaggatgatgtttggtaaggaagaaatgaggaggaagaaagggaagttatttttaaaaggaaaggaaaaattattatgtttataaaaaataggatgtaagattttattaaaggtgttgatgtaaaattatgtaaatatgtttatttaaaaataaatattttataaattaaaaatgaaaaattaattaaaatttgtatagaaatttttttagttttttggtaattatatgtgtatcggtttgttttagttaatatttagttaaaaaggtaaaatttattttagtattttttaaaattatttttgtgttataatttatatttttatgtttgtattttttggttgatattatttttaatttatataaatgaattaatggtttatttaagtataaaagtagtgatataaatagtaatgtaaatatagtaatttaaaataagtttatataaattgtaagtaggtttttggtgtgggatatagaatgtgaatttataatgttgagtaattttgtaaggatttttggataagtagttgaaaaagaaaaatgttaataaaaaattattttttttttaaattttaattattttaattaattttttaatttggttaaatatttttatgaaatttgggttttaagatttagtattattgtttatttagtgataatttttttgaattatgagagaaagtagaataagatgaggatataagtgtattttaaaatagagatagggttttgttttattgtttaggttagagtgagtggtataattaaagtttattgtatttttgaatttttgggtttaagtaattttcgtattttagtagttaggattataggtacgtgttattatgtttggttaatttttatttttttttgtagtgatagagttttgttatgttgtttaggttggtttttaatttttggttttaagtgatttttttgttttagttttttaaaatgttgggagtataggtatgagttattgtaggtataaggtaaggatattaattgtaagatgtaatggttattatgattgtggtttttagggtgttttttttaaatggtaggtttaggttttgtttagaaattttagtttatttatagattatagttttagatggaaaacgtgttttgaaatatatgtttttaatttttttatttttagaaataaagatattttaattttatttttattattattattattttttgagatggagttttgttttgttttttaggttggagtgtagtggtataattttggtttattgtagtttttattttttgggtttaagcgatttttttgttttagttgttcgagtagttgggattatagatttttgttagtatgtttagttaatttttgtatttttagtagagacggaattttgttatgttggttaggttggtttcgaatttttgattttaaataatttgtttattttggttttttaaagtgttgggattataggtatgatttattatgttcggtttgaattttttattttataaataaagaaatttatttttagaaataaaatttttattttgtttatttttaaaaaggtgatttttggttttagaaatttggatatttttttatagtatttgagagaatgaatataattttttagtttatttttaataaaatttaggtaagtgtattgtaaatgtttttttattattttgatttagttttcgatttttatgtagagtattttgagtaaatttttttggaaagggagattttggaggaggtttttttttggataggaattgttgagtaggagtttttttttacgagttgtgtttaatgtttttttatatatttttttttttagtgttgcgattattgtgtattgtttttttttggataatttttaagaggttgtatttttttttggatgtttgtagttgtttttattagatattttttatttttttttttagatgatttttacgtattttattttaagaatatttatagggaaataatggttttttttgtcggagatatgtttatttttttttttgtatttagttgtgatttttgatttgtatgtttatttttattgtttatagggaagggttaaggtataattaaatgataggtaagtaggtagttgttttaggttttgatttggttgaaagtgtagaaaatttttgtgatttttgagattttggtttatttttttattttattataggtatttagttaatagtttagggtaggaggtattttatataagattttattattggaaggattagtttttaggattagttttttttattttttttttttatatatggtttaaggttatttttagttatatttttaataaagtttagagtgatagaatttttatttttgtcgtgtatttttgtagtgtttttgggtggaatgcggagaaatggagtggttttatttttgttgtgtttttgaatatgtattttttgttattagaattttttgtttattttttttggtatattaagattttttatattttttttatttatgttattttatatattggttatttatggtatagaagataggatttaattgagaggatttttttttgattttgaatatatgtaggagataacgatatggaagatttttagtatgtaagttttaaatagattggttgggataaatgttttttgaaatataagaaatagcgtagcggtttttgtttgtaattttagtattttgggaggtcgaggtttaggtaggtaaattgtttgagtttagaagtttgagattagtttggttaatatgtagaaatttcgtttttattaaaaatatataaattaatcgggtatggtaatacgtgtttgtagttttagttattcgggaggttgaggtaggagaattatttgagtttgggaggtagaggttgtagtgagttaagatcgcgttattgtattttagtttgggtaatagagtgagatttggttaaaaaaaaaaaaaaaaaaaaaaaaaggaagaagaagaagaaattaggtttagagatgaggataaagaagacgaatggtggtatgaaggagttaagagttatttgttattatgatatgaagttttatgttagtaaattaaaggagttatttagaattagtatttttaattttatttgtttaggggtattgattttatagagattttagatataagtttgtttagttttaaagtttaatttttttattggtttgggttttttttattttttgtggttaattttgaggttgtttataagttattggttttagatttatgtaatgttttaatgttagtgtagtatttggttatttacggtaggagtggttaggggtggggaatttgataatagttcgtaggatagttagattttttttttttttttttttttttaaagatagggttttattttgttttttaggatggatggagtgtagtggagtgaatatggtttattgtagtttcgattttttgtgtttaagtgttttttttgttttagttttttaagtagttgggattataggtatatgttattatgtttagttaattttttttgtagagatgggattttattatgttgtttaggttggtttcgagtttttgggtttaagtgatttattagattcggttttttaaaatgtcgggattataggtgtgagttattgtgtttggtttagatgtttttatataggttttttaattatgtattttttttaagtaggaagttttaagatttaagttatatcggattgttgtagtttacgtttttatattttatttttatttttgagtttttagttatgagttattatattaaagaattaattttgggttttgttatatggttggattggttggataagtgttagttttgattttgggattgtggtatgtgatgatatatattttttttttatattttgtatgtttttaggggggaagggggaagttcggtatagaattttattgtattttttgattgttttattttttatattgtttttatgtttttttttgttttttaagtaattagagatagtgttttttagaattaattttataagaaataaagggttaaataaagttaaatgggaagtaggattatggtttgaattttttttggttagagaataatatttgttatggattagatattgggagagggaaaggaaaagtagggtgaattatggaaggaagttggtaggtttagcgtttttgttttggtatgattagtttttttttattttttttttagatgtagggtttggtattagagtttttgaggttttttgtatgaatataaataaatgaaattgagtgatgtttttattttaggtttttgggggtagttaaaatgaggttttttgtttttttgtttttggtgggtattttgttttttgttattttggttaagtaatttataaaatgtgagttgttttagttgttgaaagatatagatggttatggaggtatcgttttgtttgaatgtgagttttttgtttttgtgttttatttattttttatacgttttttttttttatttttttttttttttatttcgtttttttatttttatttaattatttaattatttttttttttgtttatttgtatatttttttattttatgtatgtatatatgtatgtatttatttatttttgaggtggagtttcgtttttgttgtttagattggagtgtaatggtgtaatttcggtttattgtaattttcgttttttcggtttaagtgatttttttgttttagttttttaagtagttggaattataggtatttattattatgtttggttaattttgtattttttgtagagatagggttttattatgttggttaggttggttttaaatttttgattttaggtgattcgttttttttagttttttaaagtgttgggattataagcgtgagttattatgtttggttttatttatttttttatttttttttttttttattgtttgatttttttttggaattttttattttattaagaaattttgagttttgttatttttggagattggttggaaagtatttttgtttgagaattatagttttttttttatgtagattttgtatatttttgtggtattttttttttattttttttttagt

SEQ ID NO: 1128 - DNA, 5807 bp, Artificial Sequence
  chemically treated genomic DNA (Homo sapiens)
attgagggaaagatgagaaagagatattatagagatgtataggatttgtataaaggaggaattgtaatttttagataaaaatgttttttagttaatttttaaagatggtaaagtttagagttttttgatgagatggagaattttaaaaaaaaattagataataagagaaagaaaggataggaaaataaatggggttaggtatgatggtttacgtttgtaattttaatattttgggaggttgaggagggcggattatttgaggttagaagtttgagattagtttggttaatatggtgaaattttgtttttataaaaaatataaaattagttaggtatggtggtgggtgtttgtaattttagttatttgggaggttgaggtaggagaattatttgaatcgaggaggcggaggttgtagtgagtcgagattatattattgtattttagtttgggtaataagagcgaaattttattttaaaaataaataaatatatatatatatatatatatgaaataaaagagtatgtaaatgagtagaaaagaggatgattagataattaagtaaaagtggaggggcgaagtggaagaaagaggggatggaggagagaagcgtatgaggaatggatgaaatatagaggtagggaatttatatttaggtaaagcgatgtttttataattatttatgttttttagtagttgggatagtttatattttgtgaattgtttggttaggatggtagggaataggatgtttattaggaatagagggataaagaattttattttggttatttttaagaatttgaaatggaagtattatttagttttatttatttatatttatgtagaaagttttaggggttttggtattaagttttatatttaggaagagaatgaagagagattggttatgttaagatagaaacgttgagtttgttagtttttttttataatttattttatttttttttttttttttttagtatttagtttatagtaggtattgttttttggttagaaagagtttaaattatgattttgttttttatttggttttgtttagttttttgttttttgtagggttggttttgggaagtattgtttttggttatttgaggaataaagaagggtatgggggtaatataagaagtgaggtaattagaaaatataataaagttttatatcgagtttttttttttttttttagagatatgtagaatgtggagagggggtgtatgttattatatgttatagttttaggattagagttggtatttgtttaattaatttagttatgtaataaggtttagaattagttttttaatatggtagtttatgattgaaggtttagaaataggaatagaatatgggaacgtagattataataattcgatataatttggattttaagattttttatttaaggaaaatgtataattgaaaagtttgtatgaaagtatttaggttaggtatagtggtttatatttgtaatttcggtattttgggaggtcgagtttggtggattatttgagtttaggagttcgagattagtttgggtaatatggtaaaattttatttttataaaaaaaattagttgggtatggtgatatgtgtttgtagttttagttatttgaggggttgaggtaggaggaatatttgagtataggaggtcgaggttgtagtgagttatgtttattttattgtattttatttattttgggagataaagtgagattttatttttaaaaaaaaaaaaaaaaaaaaagaatttagttattttacgagttattattagattttttatttttaattatttttatcgtaaataattaaatattatattggtattgagatattatataaatttaagattaataatttgtagataattttagagttggttatagaaagtgggaaggatttaagttagtggaaagattggattttaaggttgaataagtttatgtttggaatttttataaggttagtgtttttgagtaagtagagttgaggatattagttttgaatagtttttttaatttgttggtatgaagttttatgttatggtgataagtagtttttagtttttttatgttattattcgttttttttgtttttatttttaaatttgattttttttttttttttttttttttttttttttttttttttttgattaagttttattttgttgtttaggttggaatgtagtggcgcgattttggtttattgtaatttttgttttttaggtttaagtgatttttttgttttagtttttcgagtagttgggattataggtacgtgttattatgttcggttaatttatgtatttttagtagagacggagtttttgtatgttggttaggttggttttaaatttttgagtttaggtaatttgtttgtttgggtttcggttttttaaagtgttaggattatagataggagtcgttgcgttgttttttatgttttagggaatatttattttaattaatttatttaagatttatatattgaaggttttttatatcgttattttttatatgtatttagagttagggaaaagtttttttagttaaattttgttttttgtattatggataattagtatatgaagtggtatgagtgaagggaatgtggaggattttggtgtgttagaagggatgagtagaaagttttgatagtaagagatatatgtttagaaatataatagaagtggagttattttattttttcgtattttatttagaggtattgtaagggtatacgataggaatgggaattttattattttaagttttgttgagaatatggttgagagtgattttgaattatgtgtgagagggaaagataagaaaagttagttttgaggattagtttttttaatagtggagttttgtgtaaaatgttttttgttttaggttattgattaagtatttgtgatagagtaaaagggtgggttagggttttaagaattataggggttttttatatttttagttaagttaagatttaaggtagttgtttgtttgtttattatttgattatattttggtttttttttataagtaataaaaataagtatataggttaggaattataattaagtgtagaaaagaaaataaatatgttttcggtaaaaggaattattatttttttataaatgtttttaaaataggatacgtgggggttatttgaaaaagaagatagaaagtgtttaatgggaataattgtaaatatttagagaaagatgtagttttttggagattgtttaaaggagaataatatataatgatcgtagtattgaaagaggaagtatgtggaaagatattaagtatagttcgtggaagaaagtttttgtttaataatttttgtttaggaagaaattttttttaaaatttttttttttagagaggtttatttagggtgttttgtatggaggtcgagagttgaattaagatggtgaagaggtatttataatatatttatttagattttgttagaaatagattagaaaattatgtttatttttttagatgttgtggggaaatatttaggtttttaaaattagaaattatttttttgaagatgaataaaataaaaattttatttttaaaagtaaatttttttatttataaaataaaaagtttaggtcgggtatggtgggttatgtttgtaattttagtattttgagaagttaaggtaggtagattatttgaggttaggagttcgagattagtttgattaatatggtaaaatttcgtttttattaaaaatataaaaattagttgagtatgttggtaggagtttataattttagttattcgggtagttgaggtaggaggatcgtttgaatttaggaggtgaaggttgtagtgagttaagattgtgttattgtattttagtttgggaaatagagtaagattttattttaaaaaataataataataataaaaataaaattaaaatatttttatttttgaaaataaagaaattgaaagtatgtgttttaaggtacgttttttatttgaaattgtagtttgtaggtgagttggagtttttagatagagtttaggtttgttatttagagggaatattttgagagttatagttataatggttattatattttgtagttaatatttttattttgtgtttgtagtggtttatgtttatatttttaatattttgggaggttgaggtaggaggattatttgaggttaggagttggagattagtttgggtaatatagtaagattttgttattataaaaaaaaataaaaattagttaggtatagtggtacgtgtttatagttttagttattgaggtacgaggattgtttgagtttaggagtttaagaatgtagtgggttttgattgtgttatttattttagtttgggtaatagagtaagattttgtttttattttaaaatatatttatatttttattttgttttatttttttttataatttaggaaaattattattaggtagataatgatgttagattttgaaatttaaattttatgaaaatgtttaattaaattaaagagttaattaaagtaattaagatttagaaagggagtgattttttattggtattttttttttttagttgtttgtttaaaagtttttataaagttatttagtattatagatttatattttatattttatattaaaggtttgtttgtaatttatatgggtttattttggattgttatatttgtattattatttatattattgtttttatatttaaatgaattattgatttatttgtgtgaattggggatagtattaattaaaaaatgtaagtatggaaatataaattataatataaaaatgattttaaaagatattaaaataaattttatttttttaattgaatattagttaaaataaatcgatatatatgtaattattaagaagttaaaaaaatttttatgtaaattttaattgattttttatttttaatttataaaatgtttatttttaaataaatatatttatataattttatattaatatttttgatagaattttatattttattttttgtgaatatggtagttttttttttttttttaggaatggtttttttttttttttttttattttttttttgttaaatattattttggtaatttatattaataatttattatcgtattttttataaagtatttattttatattgtatgtttgtattaaaatattttatgtattttataaatatatatagttatgatgtatttattaaaatttaaaaaataaaaaagagtttgttattggtttatttagagagttaatttttttttggtttagttttaggagggtgtatatgttaaggaatttatttattttttttagattttttagtttatttgcgtagagatgtttatagtattttttgatggtagtttgtatttttatgggatcggtggtgatattttttttattattttttattgtatttatttgatttttttttttttttttttttattagttttgttagcggtttattaattttgttgatttttttaaaaaaattagtttttggatttattaatttttgaagggttttttatgtttttattttttttagttttgttttgattttagttattttttgttttttgttagtttttgaatgtgtttgtttttgtttttttagtttttttaattgtgatgttttgttgttaattttggattttttttgtttttttttgtgggtatttagtgttataaatttttttttatatattgttttgaatgtgttttagagattttggtatgttgcgtttt

SEQ ID NO: 1129 - DNA, 17538 bp, Artificial Sequence
  chemically treated genomic DNA (Homo sapiens)
ttattggttaggagaataaataatttaaaatggtatgtttttatttatttagagaattttggttgaagagttggtagttttttgagtttattgtgatttcgttgtggggttgagcgatgattatattgttatttagatagtagatattaaaggtattatttagaaaaaagggatatgttagaaggagaaaggaaaaagagggagggtaggagaaattaaaaaaaggatgagtagggaaaggaaaaatggggtagataaaaagataatgtaaatttaaaaagtaaagatttttggtggtaaatagatgatattaatattttaggggtatttatttatttatttttattatttattattattattttttgagatagggttttattttgttatcgaggttggagggtagtggcgcgattttggtttattgtaaatttcgtttttttggtttaagtaatttttgaattttagtttttcgagtagttgggtttaaaggtatgtgttattatatttagttaatttttgtattttttgttagagatggggtttcgttatgttggttaggttggttttgaatttttgattttaagtgatttattttttttggttttttaaagtgttgggattataggtatgagttatcgtgtttagtttatttatttaataattatttattatttttttattttaaatttttgtatttttaagtttattttttttgtttatttttatattttattgtttattatttattaaatttgatagggttattattttttatattatttagtatgttgatatgtagggaaatgtttgttaatgattttttgttttttggttaaaaagttatgtatttttaaaggtgttgaaaagagttttaatttatttatgatggtaggggatagtgtggggggattgttgaggagtttgtgtattggggtggtatgaggtatatttaggagcgtatataaaagtattttagatatagcggtattaataattaagttaatttttgtgaagtttagatcggaggggattttatagatttttttaaatattaattttagttttacgtatatatttgtatttattatcgaaagttaaggaaaagtttttttaatttggggtagggtaatgggagattgtataagaaaagggattttttttatagtgttttttggagaaaatattaaatatttttgagtatggaagtttagtgtaaataaagatttgagaatttttagtttatttatgttgataaaatatttagtatgtatttataatttttaaaatattgttgtgttttacgacgatgtttgttttagttaaggagttagtatttgtatttgtttgaggaaaaggttgtgatgggggtgagggtggatttcgtttgtaaggttgtttatattttattgtgtttatttttttaatttgatgatatttttaagagataaagggcgataatttattatattagatatttgataaattgggatagtattttattttattttaattgttagagatagggttttatttatttgtataggttggagtgtagtggcgttattaaagagtattgtagttttaattttttgggtttaagcgatttttttattttagtttttttggtatttgggattataggtgtgtattattatggttggttatttttatatataaatatatatatatatttttagagatagggttttgttttgttatttaggttggagtgtagtggtgtaaatatggtttattgtagtttttattttttggatttgaataatttttttgttttagtttttaagtagttgggattataggtgtacgttattatttttagttaatttttaattttttgtagagatggggttttattatgttggttagattggttttaaatttttgagtttaggtaatttgtttgttttggttttttaaagtgttgggattataggtttgagttattgtatttggttaattttaaataaatgagtatttatttatatagaatttttgaattataaatttgatgttaatttagagattatttgaggtttattaatattgttttggggagttttgagaaaaatattatgtttaggtttgattttagataaattgaattagaattttaagggatgggattaaggggaattttttatttttaaagttttataagtgattttaatatgtagttaggattaagaaatagttttagttttattattttattttattaataaagatatagaagtttaaatagatgaagtgatttgtttaagattatattgttagtaagtggtgttttataattaatttttttgattgttaatttaatgttttttttattatgttttttttttgtttttttttatagaaagagtttagggttttattgaatattaaagttatgcgatttataattgaaagagaagagttagagtttaggaagtattggtggggtatttttagagggtttaatttagttgtgggttttttgaagattattatgtttaggatatagtttttgttaagttttattgatggtagttaaaagatattttgttaaaggtaatgattaatattgtatgtagtgtttattagttttgtgttgggttatttgtttataaattagttttatttatggtagtaaatatttattgataaatgtttttatttttaggaattaattatattaaagtaaataatagtggggtagatcggtgttttttaatatttgaattagggtaggggttagggtaaggagttataggttttattggagaattagtgaaaattataaatttttttataaaaatatatatatataaatgttgtatgtaatttttgaggatttatcgatattttttttattttgtttaaatttatatataaattttagattaaaattttttggattagatgattttgaagtttttttttagtgttttttttaaagtgtggtttatggattatagaattagaattatttggggtgtttgttaaagaagtgattaataagattgttatagatttattgttttagaatttttggggaatgaggtataggaatttgtatgttaaaaaaaaaaaatttaaaattagatggtttttttggaaattaatatttgagaattagtgttttattttaatttaagatttttaaatgtttttatttgttgaatattttaggttttgtttgtttatttattaagtatagtaaatagtatgtttagtatgaatttattatagaatatttgtgtgtatgtatataggaaaaatatttggaagtatagatgtgggtgtgtgtatatatgtgtgtaaatatatataataatgttaatagtaggaatatagatgatttttattttttcgttttatttttttgttttattttttttatttttttttttttgtgtttaaaaaagatgttttttgtttttgagtttaatttttttatttgagaatagggtgttgtaattaggtgaattttaagattatgttttgtttcgatggttcgtgattttatattattttttaggttttttcgtttattttatagtatgaattgtataggtaataatagtgtttggagaataagtatgtattatttttgtatgtattacgtttgagatgtttagtaatcgtttttgtgttcgtaaaattttttttttttttgttaaggagttaaaacggaaatagtttattatttacggtttttaaaagttttttttttttttttagttttagaaaatatcgttcgttataggtatgggtaaagattttatggttaaaatattaaaagtaatcgtaataaaagttaaaattgataaatgggatttaattaaaagaatttttgtatagtaaaagaaattagtattagcgtgaataggtaatttgtagaatgggagaaaatttttgtaatttatttatttgataaaggtttaatatttagaatttataaggattttaaataaatttataagaaaaaaataattttattaaaaagtgggtaaaggatatgattagatattttttaaaaaaagatatttatgtagtaataaatatgaaaaaaagtttattattattgattattagagaaaggtaaattaaaattataatgagatattattttacgttagttagaatggtgattattaaaaaattaggaaataatagatgttggcgaggttgaggaaaaataggaatgtttttatattgttggtgggagtgtaaattagtttaattattgtggtagatagtgtggcgattttttaaaaatttagaattagaaatattatttgacgtatgtatacgtatgtttattgtagtattatttataatagtaaagatttggaattaatttaaatgtttattaatgatagattagataaagaaaacgtggtatatatatgttatggaatattatgtagttataaaaaaatgagattatgttttttgtagggatatggatgaagttggaagttattatttttagtaaattaatataggaatagaaaataaaatattgtatgtttttatttataagtgggagttgaataatgagaatatatggatatagggaggggaataatatatacgggggtttgttaaggggtgggggttaaggggagggagagtattaggagaaatatttaatgtatgtggggtttaaaatttagatgacgggttgataggtgtagtaaattattatggtatatgtatatttatgtaataaagttgtatattttgtatatgtattttagaatttaaagtaaaattaaaaaaaaaaaaaaaaaagaaagaaaaagaaaaagaaaatgtcgttcgcgtatattttttaggagtataggaagggttgtgaattaaaaagttagggcgtggtcgtttcgtttatcggtcgttatattattatttttttcgtcgtttttaagcgcggagattggttgtaagtaagaaagagtttcgtttttagttttatgattcgtattgaagcgtcgatttttggtttttgtaaggttgtggtcggtggttattagtgtttttgatttaggtttagcgagttttttttttggtgttgtagttgttgttgtatcgtcgtcgtcgtcgtcgtcgtcgtttgttttgcggggttatggtgtgttttcgttttttttcggtttcgggtttagggttcgttttggtttgtttagttttgggtgagttgtcgggttttttcgattagtttgttcgtttgggttcggggtattagtttaaagttataatttgaaagattggttcgagggggagggggttgagaggtttagtagttaatattgggcggcggcggttggttcggggaggtaagcggtgatttagagaaggtttgatcgacggatggcggggaagaagggtttaggagagtaagaaggggtcggtaacggggggtggacgtcgagggagtaggttgggaggagtgaagcgtggagagggttagcgtggaaagagtaatttggggaaaatattgaggagtgagcgtaggagggtggtatatgtagattttgggcgttagagataattaggagagttttggtttgttgagattagggaagagttttgaagatggtggaaaaattatggggtgagataggaaattaagagagaagattatgtttgtttggagtagtttgggagaagtgtgtgggtgggggatagatgggatagataggatagtagagtttgaggggtaggggtagtgatagggttgggtattttgaaggttggaatttgagattgtgaagaaaggatgatttaagagattaggagtgatgttgggtttgagtttggtagttatagttttaagggcgaaggaatttaaggtagttggggtaatttttaggaaagaaaatttggatttaatttttggagattaaggggtttagggggaattttgatggggagtgtatatttgatttggaggtattgaggatgtcgatttttttttagttttgttatttttttttagttagacgttgataaaaaaatttttagacgttttagttaggagggttttttagatgtgaggttttgggggtggagtatttgagtttggtagattatttttttgtttttagagttttttttttttttttttttttattatatagttagtttattattttatattttgggggtgtagggagtaggtagataaatttgttaaggattgggttgttattagggtttaagaatggttggatggggtcgggcgtggtggtttatgtttgtaattttagtattttgggaggtcgaggtgggtgtattatttgaggttaggaatttaagattagtttggttaatatggtgaaatttcgtttttattaaaaatataaaaattagtcgggcgtcgtggtatatgtttgtaattttagttgtttgggcggttgaggtaggagaatcgtttgaatttagaaggcggaggttgtagtgagttaagattgcgttattgtattttagtttgggcgataagagtgaaattttgttttaaaaaataaaaataaataaattaataaataaatggttgggtgaatgttcgttgattgtgttgtgttttaataggtagtgggtcgttaataattttaatgtttaaaagtgaattttgattaaagtgtttttttttgattttgatttatgttgtgtttgttgttatttatttgtttttgttatttgtgatttaataaaataatataaagaatagatttagatgggagtggggaagaaatagatatattaggggtttgagaaagtagtgagaggtatatattttgtaatttatattttagtagaatgaaattaatattttggaatagtgatttttaattaggggatatttggtaatatttggagatatttttggttgtaataattgggggattgtttttagtatttagtgggtagaggttaaggatgttgttaaatattttaattaagtatagggtagtttttgataataaagaattatttttttgaaaatgttaatggtgttaatattgataaattttgttcgaaaattatagtattggaagggtttttgattatttaatttagtgattttcgaggatttttttatgcgtttgtgaaattaaaatttcggaataaggttaagaaggtatttgtttttttttgttgggtatagtggtttacgtttgtaattttagtattttgggaggttgaggcgggcggattatttgagattaggagtttaagattagtttgattaatatggtgaaatttagtttttattaaaaatagaaaaattagtcggtgtcgtggtatatgtttgtaattttagttatttgggaggtcgaggtaggagaatcgtttgaatttaggaggcggaggttgcggtgagttaagattgcgttattgtattttagtttgggtaatatgagcgaaattttgttttaaaaaaaaaaaaaaaaaaagaagttatttgttttttgttttttttatttttatttttttattagtgtatagtagagttttttagtggttacgtaatatgtgatgattttattattttgatgtttttatattttatttattttttagttttaatttttaatattgtaaatattaatatatatgatttatataaatttttgtgaagtttttagtggataagaaagtaaaggggttttgatattaaaattttgggaatttttgatgtagtttaattgtttatagcgcgtaggaaatttttttgtagtatttttgaaaggcggttttgaggtaggttttgtttgaatatttaattggaagttttaattgtattttggagtatttattgagggttaattgattttaagaaaggattgtttataatggaaagtattttattagtgattagaatatatttgattaaggtatttgttaattagtagttttttgttaattgaatttgtgtataaatataatattgttattgttttgggaaagtgaaaaaaataatagttgttttatttgttggtttttatgttattaaatttttttttgttttttaatgaaagtttttttgttttgtttttataaaagtaatgtttatttattgtagaaaataaatatgtaaaaagaagtatataaaagaatttattagtttatttgttagtttgttatttattgattaggattaattagatttttttttttggaaaatttttaagattgatttttttcgtttttaagtttagagtaggatttggaaaagtaaatattaataatgtatttagatttgatttttaagaggttttaggatgaaatagaaattatttttttatatagttgtattttttgatggtttttggtttagtgtggagtttaaagtttttttatatagttttttttgttaagaatttagtagttgtttggtgggttttgtataagttatttttttatattaaaatggatattaataataggtttttgaaaatttaataaatatttgtaaagtatttaatatgtagttaaattaataaatatttgtaaagtatttattatgtagttagaattgtgtttgggtattgtacggagtgttaatgaaggaggatttgttttaaatttatagttttattagtattagtgttttagttgtgttagtttgattttgtaattttataattttattttagttttatttataattttttaaaaatagtagttttagaataagtatagaaaaggatttttagaggttatatattggttttttttatagagattaaattatgttggtgtttatttggatgaattgtaattgattagataatttttcgaagagaagttatatgatttagaggtgttataaagtggatagtgggtgaaaattttttttttatataattgtttaattatggtttttttgtgatattatagattttaggatttttttgtggttattgatttttataattagtttgatttttgttttttggtttgtttgtttgtttttttagggtttagaattttttttttttaggtttgaggtttttttgggtgggaaaaattttatagaaatatttttagtgtatgttattggtaggagttttttttttttatacgtttattgaatgtttattgtgttttagttattatattaggtgaaagggatagaggaatggataagatagatgaggtttttgtttttatggagtttatattttaatgggagaagaaagtttaatagataaataatataatgttagatagtgataaatattatgaagaggtcgggtatggtggtttacgtttgtaattttagtattttgggaggttaaggtgggtaaattatttgaggttaggagttcgagattagtttagttaatatggtgaaattttatttttattaaaaatataagggtatggtggttagtatttgtagttttagttattcgggaggttgaggtaggagaattgtttgaatttaggaggtggaagttgtagtgagtcgagattatgttattgttttttagtttgggggataagagtaaaattttgttttaaaataaaataaaataaaaatattatgaagaaaattatataggtaatgagaaaggagaatgagtagatgataggaatgggtgatggtggatgatttttttttatattatgtggttagagggtttttcgttatcgggtgatatttgggtagagatttgggtgttggtaggaggttagttatgtgattatttggggaaataggaataaattttattatttgtaaaattttaggttattagtttattttttacgtttttttgtttttttttagttttagttaagttttttttatggtagtagtttttaagagtagagacgattttatgtattgttattttttattgtttatttagtatagggtttggtatatggttaattcgtagtgaatttttgttgaagatatttattggtgggtattagggatatggtggtaaattagatttatttagtttttttttttttttatgaattttaaatgatgttttgtaagaagtttttttggattgaaaattttaagattagtgttaagtagtacggataattatatagtaatttattaatgtataattttatataataatgttagttttttatttgtatttttttagatatattttcgtagtttcgaagggggtaatatggagaattaggagttttttggtgaggagagttaggtttttataaagttaggttttttttgagagaaaataagtattaagatttttttataggtttaatatattttatttaattgataattttgatttcgaggttttgttaaattattttagttataatagagatattgtaaaggattgaaaaattttgaattttaaaaaaaaataaaaaaaaaacgaaaaatagaagttaagttagaagataagaaaggataggtttgttagtttgttagttattgattattatatttgatagggttatagatatttaaatatgttttaaatattagattagtttgttagttattgattattatatttgatagggttatagatatttaaatatgttttaaatattagattgttatatttgatagggttatagatatttaaatatgttttaaaagaatagttttttttttttatatttttgggtagattttgtttataattaagtattatttcgtagtattggagttgatttaaatgatttttgatgtaggaaggttgtttttttttttgtagtgtaaaagtattttgattataattttttattaaagtgattagagatttttttagatttaaaagtatattttataagtatttgttggtattttgttgtgtattgtgaaagaattttggaggtgtgttaaatattgtttaataataagtattttttattagttgagtagtgttgaattttgtttttttatttattttttggttttaataaattaagttattttatagtttaaaaatatatttttattaatttttaatatttttttttatgtgtttaatatttttattttaaaattatattgttttttttttttaagaaatttattaaaagtaagggtataaagtaattgaatgtaatgagtgtatttattattaggaattataaaggagaaatagttaatttgatttaaatttgtaggaaaattattattttgaatagaaaataaagataaataggtatcgtatgtttttgtgttttgtattttaaaaagattttttgtttaatattattttaaatttatgagtttgaggataagagtttagaatttaatatgatgaaagtaaatataaagttaaaatttgggaaggttttttttaggtgttgtgtttattaaaaaggagatttgtaaattggtatttaatttgtttggtaaattttttttagttttgaagggtttatatgtttttaaagaatttattggagaaatatgtattataattttaaataagggtaatttgtttaaagttttatagttaggaagttggattgttagatttgagttttagtttttttattttaggaatggggatttttaattattttattatataattaatttattgtattttggattattgtttggtttttttttattggttttgttttattgttagtattatgttttttttttatttttaattttgtgtgtttatgtttttagttatattttgggttaaatagatttgtaaaaatttagttattttttgtagtgttatatatttggggaagtaaggtttgtgttttttgtgagaggtttttttttttttttttgatagggttttgttttatttttttagttggagtgtagtggagtgattttggtttattgtaatttttgttttatgggtttaagcgatttttttatgttagtttttcgagtagttgagattataggtatgtattattatatttagttatttttttgtatttttagtatagatggggttttgttatgttgtttaggttggttttgaatttttgagtttaagtgatttgttttttttggttttttaaagtgttaggattattggtgtgagttattgttcggttaaggtttgtattttaaaagaatttataaatgatttttttggaaaataggattgagaggatatttgattttgagaacggttgattttgaggtatattttttttttttatttagagaataaatttttagttttaaaattatatattttagaatatatttatttatggttttttaatgttataaagttttttaaaaattgggtattgtaaaattaaatatagtaataaggatggaaattgtttgttagatattttttaataaagtgtaaatattttaattgtaaatttattttttgggaaaagttttgtttttagtttgatatttatgttaaaatttattgaagtgaaatttaatatggggtttgagggaatatttagaagattgatatgtttaagatttggaagagttaaaggattggtttttttgtaattagattaagttatgttttgggtttttattgtagtgtgtttttattttgatataattaattagtatttattgaaaatttaatatgtatttagtattatttggaatgataggagatagaggaaaagtaatatatatggtgttttttattatgatatttatgatagatgatatttatataaaagatatattgttaggggttgtgggatatattagattatttgattaagggagtatattggagtttaaacgagtgatagaaatgttatttaaagggaattttgaatttatttatatatattatttatttatagatttggtattttttttattagtaataaattatttattgtatattataatttattatggtatattagtttgttatgaagtgatagttgaaaattgttgtgttggagtttatgatagtaggagggataggatttattgttataaaataattgaataatttaggataatgtaaaatatattgaaatgggatgtgtattattattgttttttgagggtttttatagttagggaaagttttgtggagaaaatggttattgaaaaaatagatagtatattagtttaggtttttaattgtaaggaagagaaatataatttgattgattttaagtagaaaagaatttattaaaaagaattgggatataatgtatattttttggttttatagttttatttttagatatatagttaatatatacgtatatatgtgtttattaatatgtgtaagaatgtttgtagtagtgtttgtaatagaattatattggaaattaaatgtttattaaaggtagtatagataagtagtttttttgtttgtttgtttttgtttttttttgagatagagttttatttttgttgtttaggttggtggagtgtattggtatgattttggtttattgtaatttttgtttttcgggtttaaacgatttttttgtattagttttttgagtagttgagattataggtatgtgttattatgtttagttaatttttatatttttagtagaggtgggatttggttatggtggttaggttggtttcgaatttttgattttaagtgatttattttttttggttttttaaagtgttgggattataggcgtgaattattttatttggtttgtatttatttgattatagaaggttatatagtagtgagtatagattgtaattatgtataatatgggtgaattttataaaatttaaaattgaggaaagaaagtagatataaaagagagtatagtgaatgattttatttatattaagttgaaaaatggataaaattaatttatagtgttagaaattaggataatggttatttttgggaagggaatagtaatttttgggaagggaaagggaaataaggagggttttggaagtgtagttgatttttgaataatataagtttgaattgtgtgtggatttatttatatatgagtttattttatttttattattttgaagatagtaagattaattttttttttttttttttttcgttatgattttttttttttgagacggagtttttatttgttgtttaggttggagtgtagtggcgcgattttagtttattgtaatttttattttataggtttaagcgatttttttgttttagttttttaagtagttaggattataggtgattattattaagtttagtaaatttttagtggagatggggttttattatgttggttaggttggtttcgaatttttgattttaagtgattcgtttgttttagttttttaaagtgttgggattataggtgtgagttattatgtttagttttttttatgatttttttaatatttttttttttttagttttatttttaaaatatagtatgtaatatatatataatatataaaatatgtgtgaatcgattgtttatgttgttggtaatgtttttagttaatagtaggatattagtagttaagttttgggggagttaaaaataatatgtagatttttaattgtgtagtgggttaatatttgttaatgttttgttttttgatataggtggttttggtttgtgaaattatttgagttgtagatttaatgttacgtgtattttttttttatatttgttatattgtgtttgtttttgtatatatgttatatattaaatgtttattaaaggggtatattgggtaatttagaatttttggtgtttttggttatatatattaaattttagtttaggatttaataatttagattatgttgttgaattgtattattattgttaagtgtgaaattgaagtttgttttgttggttttgttgtttgggagtttgattttgtttttgttattttatatttgtttttttttttgttttatttttggttttatttgtagttttttttttaaagtgtggggtggatatttttgttaggtagagtttagtataagtggttttttttattgtaagggagtttgggaaagtaagtatttagtgtttttagtttttatagtgggtggtgatttttgttagaaattgtaataaggggataaggggtgttttagatttggggtagttaaaaagcgagtaaaatttatttttgaggtgagtatttaggttaatagaagaaagtagattttaagtgttaggaataatagaagtttagggtagaggttgaatagagtatggtatttgagtttagtggaaataagtttaattggattaaagggtgtgttttgggaaaatagtttgagaaaagttgaaggaataggatgggataagattaaagattattttgaaagttaggtagaggaatttaaattttatatgggaatgttggagttagtaaaagtttttgaataagaaagtgttttaaaaggaaatggtatttaaggattattaatttggtagtatttttaggggtatttaggtattttttgttataatttaggtgtggggtgatagattgggagtagaaataaaagataaagattgtatttaagagaagatttgaaggaaaaaaattaataggattttttgaagagaaagaagtagaggttatttttgaaattgagtttgagtgattgattttattttttatttagagttagtaaagttgaggagggatttagtttggaggaagtagaagaatgaattttagtttgggaattgttgagtttgaggtgagagatattgagtaaaagtggtttttgtgtagttagagttggggattaagaagtggaaagaattgtatttaggtagaaaggttgtgaagggaatggaatagagtgtgttagaatttttagggtgttttttagtttttgtttacgggttattaggtatattattttgaatttaattttaagtgatacgtttgaattataatttttattttttgttttataaaacgttagtttttatattttaagatatattgatgtaagttatcgatgttattattattttatatggttttttttttgttattttaatatatttggaaagaaaatgattaatatatgtgaggttttttttggtaatttttaatatttttgaatgttttgaatataaggagaataatatattaaagttagagattttaaataagatcgagaaaagattgtatataaaaagtaaatttttagtttattaaaattgtaagttggagtttttggttttatggtagggagttttggattagtaagtataatagttttttttcgtattgtatttagaaaagaatgattataaaatttatttaggttttataaggtttttttgagttttagttaatgtatttagttattgttagtaattataagttttagtataatattttggtttgtaaagtagttaggtttttagagtatgacgataggtttttttatataatttgaaagttgttgttgaggtatatttttttgatattttttttagtatttttttttagtttatagtaagtttgtatttgtagatgatagtggattgtttagatattattaaagagtatgtaagtattttaataggaaatagtttattttttgggtaatgtgtgatatagtgaagaaaattttttaaatggttgtttaatatttatgttgttggtatgtttgttgggatatttttttttttttgaattagtattttgagtttttgggttttttagtttaatagataatgtttttatgtttaagtgtagaagatttattatgttagttgaaaagttttaaggtttttttgtttttgtaatatttttttgtttaaagaggtagtaggttgaaaatttaggaaataattttgcgttaaaaaatttattagtttttttaattaattcgattttaaagtgaaatagtgatgaattttgtatttattagaatttatgttttttttatggatttaatagttttttgtaattttgtttttttggttatatgatagaaagagtatttgattatattagaataaaatcgtttgggaagatattcgtgtgttatagattatgtagtttgtaataggatttaaagtaaaaagatggtagaatatcggatttattattatttttgtagtgaatgttttattagttggtttgagagaagttttatatttttattaggtttttttttattttatttatcgtaaaaattataagttttaataggtaaattgtaattgtttaaaataaaattagtaaggtataaatgtatgtggaaatgattatttgaaggtaaaaggtaaataaatgttattagtttgagttatgatttaagtattttaggtttagtaattatttttttggtaagggataatgttaatttttttattaataggattttgttaaaaatataaagaaaaatagttagtaggatattgtatttatatatatatatatatgtatatatatatatatgtatatatatgtatgtgtatatatagatataaaatatttttgttttattttagagttggttgaattttagtggtgggtagagtttgtttttaatttatataatttttgtagtataattttaaaatattatttttttaaatgaatttagg

SEQ ID NO: 1130 - DNA, 17538 bp, Artificial Sequence
  chemically treated genomic DNA (Homo sapiens)
tttggatttatttaaaaaaataatattttaaaattgtattataaaaattatataaattaaaaataagttttatttattattgaagtttaattagttttaaaatgaaataaaagtattttatatttatatatatatatatatatatatatatatatgtgtatatatatatatgtatgtgtatagatatagtattttgttgattgtttttttttgtatttttaatagaattttattgataaaaaagttggtattattttttattaaaagaatggttattagatttaggatgtttaggttatggtttagattggtgatatttatttgttttttgtttttaaataattatttttatatgtatttatattttattagttttgttttaggtaattatagtttgtttgttaggatttgtggtttttgcggtaaatgaggtaagaggaagtttggtaggggtgtaaaattttttttaaattagttggtgaaatatttattgtaaaaataatgatagattcgatattttattatttttttgttttaaattttgttgtaagttatataatttatgatatacggatgtttttttaaacgattttattttgatgtgattagatattttttttattatgtaattaaggaagtagagttgtaaagggttgttaaatttatgagaaaaatatgaattttgataaatgtaaagtttattattgttttattttaaaatcgaattgattagaaaggttgatgaattttttgacgtaaagttattttttaaatttttaatttgttatttttttaggtagagaaatgttatagagatagaaaagttttggaattttttagttaatatggtggattttttatatttaaatatagaaatattatttattaaattgaagagtttaaggatttaaaatattaatttagaggagaaaaaatattttagtaaatatgttagtagtataaatattgggtaattatttaagggattttttttattgtattatatattatttaaagggtaagttgttttttgttaagatatttgtatattttttaataatatttgagtaatttattgttatttataggtatagatttgttatagattagagaaaagtgttaagaggaatattaagaaggtatgttttagtaatagtttttaagttgtatagaagagtttatcgttatgttttggagatttggttgttttgtaagttagaatattatattaaagtttgtggttattgatagtgattaaatgtattggttaaggtttaaaaagattttgtgaggtttaagtaggttttatgattatttttttttaagtataatacggaagggagttgttatatttattgatttaaggttttttgttatggagttaagagttttaatttataattttaatgaattggaggtttgttttttatatgtagttttttttcggttttgtttaaggtttttagttttagtatattattttttttgtatttaaaatatttaaaagtattgaaaattattaagaaaagttttatatgtattaattattttttttttaaatatattagaataataggaagaagattatgtaaaatagtaatagtatcgatagtttgtattaatgtgttttagggtgtgagaattgacgttttatgaaataaaaggtagaggttgtggtttaaacgtattatttaaaattaaatttaagatagtatatttggtggttcgtaaataagagttgagaaatattttgagggttttggtatattttgttttattttttttatagtttttttgtttgagtgtaattttttttattttttggtttttaattttaattgtatagggattatttttatttaatattttttattttaaatttagtaatttttaaattaaaatttatttttttgttttttttaaattgggtttttttttagttttgttagttttaaatgaagagtgggattagttatttaagtttagttttagaaatagtttttatttttttttttttaagaagttttattgattttttttttttaaatttttttttaaatataatttttgttttttatttttatttttaatttattattttatatttaaattatgatagaaaatgtttagatatttttagaagtgttgttagattaataatttttaagtattatttttttttaggatatttttttgtttaaaaatttttattggttttaatatttttatatgaaatttaaatttttttgtttgatttttaaagtaatttttaattttgttttattttatttttttaattttttttaaattatttttttagagtatattttttaatttagttaaatttgtttttattgggtttaaatgttatattttatttaatttttattttgggtttttattgtttttaatatttgaaatttatttttttttattggtttaaatgtttattttaaagatggattttgttcgttttttggttgttttaaatttgaaatattttttgtttttttgttataatttttggtagaaattattatttattataaaagttgaaaatattggatatttgtttttttagatttttttgtagtaaggaggattatttgtgttaggttttgtttaataaaggtatttattttatattttgaaaggagggttgtaaatggagttaggaatggaatagggagggagataggtgtggagtaatagaagtaggattaagtttttaggtaataaggttagtagagtaagttttaattttatatttggtagtggtagtgtagtttagtagtatgatttgggttgttgaattttgaattgggatttggtatatatagttaggagtattagaaattttgagttatttaatatatttttttaataaatatttgatatgtaatatatgtatagaaataggtatagtataatagatgtaagggaaaagtgtacgtaatattaagtttatagtttaaataattttataaattaaaattatttgtgttaagaaatagaatattaataggtgttgatttattgtatagttgaaaatttgtatattatttttgatttttttaaaatttaattattaatattttattgttgattggaagtattattaataatataaatagtcgatttatatatattttgtatgttatatatgtgttatatattgtgttttgaaaataaagttagagaaaagaaaatgttaagaaaattataaggagggttgggtatggtggtttatatttataattttagtattttgggaggttgaggtagacggattatttgaggttaggagttcgagattagtttggttaatatggtgaaattttatttttattaaaaatttgttgggtttggtggtggttatttataattttagttatttgggaggttgaggtaggagaatcgtttgaatttgtgaggtagaggttgtagtgagttgagatcgcgttattgtattttagtttgggtaatagatagagatttcgttttaaaaaaaaaaaattataacgaggaggaggaagaggaggggttggttttgttgtttttagggtggtagaggtgaaataaatttatgtataagtagatttatatatagtttaaatttgtgttgtttaagggttaattatatttttaaagttttttttatttttttttttttttttaagggttattattttttttttaagggtaattattattttgatttttgatattatagattaattttatttattttttaatttgatataaataaaattatttattatgtttttttttgtgtttgttttttttttttaattttaggttttgtgagatttatttatgttatgtataattgtagtttgtgtttattgttgtataattttttatgattaggtgaatataggttaggtggggtggtttacgtttgtaattttagtattttgggaggttaaggagggtggattatttgaggttaggagttcgagattagtttggttattatggttaaattttatttttattgaaaatataaaaattagttgggtatggtggtatatgtttgtaattttagttatttaggaggttgatataggagaatcgtttgaattcgggaggtagaggttgtagtgagttaagattatgttaatgtattttattagtttgggtaataagaatgaaattttgttttaaaaaaaaataaaaataaataaataaaaaaattatttatttatgttatttttaatgggtatttagtttttagtgtgattttattataaatattgttgtaaatatttttgtatatattagtaaatatatgtatgcgtgtatgttggttgtatatttaggaatgaaattgtggggttaaagggtatgtattatattttagttttttttaataaatttttttttgtttaaaattaattagattgtattttttttttttgtaattaagaatttgggttgatatgttatttgtttttttagtagttattttttttataaagttttttttgattataaaagtttttaaggagtagtaataatgtatattttattttagtatattttatattattttgaattatttagttattttatagtagtaaattttgttttttttattgttataagttttaatatagtagtttttaattgttattttataataaattggtgtgttatggtaaattatagtatatagtaagtaatttgttattaataaaaaaagtattaagtttgtgaatgaatgatatatatggatagatttaagattttttttagataatatttttgttattcgtttgaattttagtatgtttttttgattagatgatttgatgtattttataatttttagtagtgtgttttttatatgaatgttatttattatgagtgttatggtaggggatattatgtgtattattttttttttattttttattattttaagtagtgttgaatgtatattagatttttaataaatattgattaattatattaaggtgaaaatatattgtaatagggatttaaaatatagtttaatttaattatagagaggttagttttttagtttttttaaattttgaatatattagttttttggatatttttttaaattttatgttgggttttattttaataaattttgatatggatgttaagttaggaatagagttttttttaaaaggtaagtttatagttgaaatatttatattttattaaaaagtatttagtaagtaatttttatttttattgttgtgtttgattttataatatttaatttttaaaaggttttatgatattaaaaaattatagatgaatatattttagagtgtgtaattttagagttgagagtttattttttaaataaaagaaaaaggtatgttttaaaattaatcgtttttaaagttaaatatttttttaattttgttttttaaaaaggttatttgtaaatttttttagaatgtagattttgatcgggtagtggtttatattagtaattttagtattttgggaggttaaggggggtagattatttgagtttaagagtttaagattagtttgggtaatatggtaagattttatttatattaaaaatataaaagaatagttgggtgtgatggtgtatgtttgtggttttaattattcgggaggttgatatgggaggatcgtttgagtttatgaggtagaggttgtagtgagttaagattattttattgtattttagttgggggaatggaataagattttgttaaaaaaaaaaaaaaaaattttttatagagaatatagattttatttttttaagtgtatgatattgtaaaaagtggttaggtttttgtaagtttatttgatttaaagtatagttgaaaatataaatatataaaattaggggtgggggaagaatataatgttagtaataaaataaaattaataaaaagaaattaaataatgatttaagatataatggattgattatataatgaagtgattaagagtttttatttttggagtggaagagttagaatttaaatttggtagtttaattttttagttgtgagattttgggtaagttatttttgtttagaattatagtgtatatttttttaataggttttttgaaagtatataaattttttagagttaaaagaaatttgttaaataagttagatattaatttataagttttttttttagtaaatatagtatttaaagggaatttttttaagttttagttttatgtttatttttattatattaaattttggatttttgtttttaaatttatgaatttagaatgatgttgagtaaaaggtttttttaaaatataggatatagaggtatacggtatttatttatttttgttttttatttagagtgatggtttttttataagtttaagttagattaattgttttttttttataatttttaataataggtatatttattgtatttagttattttatatttttgtttttggtaagttttttaaaggagaaaagtaatatgattttaaagtaagaatgttgaatatatgaaaaagagtattaaaagttaataaaaatatgtttttaagttataaaatgatttaatttgttaaggttaaagagtgggtaaggaaataagatttaatattatttaattaatggaaagtgtttattgttgagtagtgtttggtatatttttagaatttttttataatgtatagtaggatattaataagtatttataaagtatatttttgggtttgaggggatttttgattattttaataagaaattatgattagaatatttttgtattatagaaagaagagtagtttttttgtattaagggttatttaaattagttttagtgttacgaaataatgtttggttatagataaaatttatttaaagatataggggaagaaagttgtttttttgggatatatttgagtatttataattttattagatgtgataatttgatatttgggatatatttgaatatttataattttattagatatgataattaatgattaataaattaatttggtatttgggatatatttgaatatttataattttattagatgtgataattaatgattaataaattaataagtttgtttttttttattttttagtttgatttttgtttttcgttttttttttgtttttttttagggtttagaattttttagttttttatagtatttttattataattagaataatttggtagaatttcgaaattaaagttattagttaaatgaaatgtgttaagtttatagaaaaattttagtgtttgtttttttttagagaaaatttaattttgtgaaaatttaattttttttattaaggaatttttaattttttatattatttttttcgagattacggaggtatatttgaaggagtataggtaagaaattagtattattatatgggattatatattagtaaattattgtataattattcgtattgtttagtattgattttgaagtttttaatttaaaagaattttttgtaaaatattatttaaaatttatggaagaaaaaggagattaaatgagtttagtttattattatatttttagtgtttattaatgaatatttttaataaaaatttattacgggttaattatgtattagattttatgttaggtaggtaatgggaagtaatagtatataagatcgtttttgtttttagagattgttattataggagagatttgattaaaattagggggaaataaaaaagcgtggaaaataggttagtaatttaagattttgtaaatgataagatttatttttatttttttagatggttatatggttggttttttgttaatatttaggtttttgtttaaatgttattcgataacggaaggttttttgattatataatataaagaaggattatttattattatttatttttattatttatttattttttttttttattatttgtgtaattttttttatagtgtttttgttttgttttgttttgagatagagttttgtttttgttttttaggttggaggatagtggtatgatttcggtttattgtaatttttattttttggatttaagtaatttttttgttttagtttttcgagtagttgggattataggtgttggttattatgtttttgtatttttagtagagatggggttttattatgttggttaggttggtttcgaatttttgattttaggtgatttgtttattttgattttttaaagtgttgggattataggcgtgagttattatgttcggtttttttatagtgtttattattatttgatattatattatttatttgttgagttttttttttttattaaaatgtaagttttatgagagtaggaattttatttgttttatttatttttttgttttttttatttaatatagtggttgggatataataggtatttagtaaacgtgtggaagggagaggtttttattagtaatatatattaagaatatttttgtgaggttttttttatttagaaaagttttaaatttaaaaaaaaaaaattttgaattttaaaaaaataaataaataaattaaaaaatagaagttaagttagttataagaattaataattatagaagaattttgaaatttatgatattataaaaggattataattaggtaattatataaagaaaggatttttatttattatttattttataatatttttaaattatatagttttttttcggaaagttgtttggttagttataatttatttaaataaatattagtataatttaatttttatgaaaaagattaatatatagtttttaagaatttttttttgtatttattttaaagttgttgtttttaaaaggttatgggtgaagttgggatagagttataaagttataaagttaaattggtatagttagagtattaatgttaataagattataaatttaggataggtttttttttattggtatttcgtatagtatttaggtatagttttagttatatagtaggtattttataaatatttattgatttagttatatattaggtattttataaatatttattaagtttttaaaaatttattattggtatttattttgatatagaaaagtaatttgtgtaaaatttattaagtaattgttaaatttttgatagaaaaagttatatgggaggattttgggttttatattgaattaagagttattagaaaatgtagttgtatagaaaaatggtttttattttattttggaattttttaaaaattagatttaggtatattattaatatttatttttttaaattttgttttgaatttggaggcggagggaattaattttggaaattttttaagaggaagaatttagttagttttgattaataaatggtaaattagtagatgagttgatgggtttttttatgtgtttttttttgtatgtttattttttgtagtgagtaagtattgtttttgtaaaaataaaataaaaaagtttttattaaaaaataaaaaaaaatttaatgatatgaaagttaataagtaggataattattattttttttatttttttaaaataataatagtgttgtatttgtgtatagatttaattggtagggaattattgattaatagatgttttggttagatgtgttttagttattgataaggtattttttattgtaaataatttttttttagggttagttggtttttagtaagtgttttaaggtatagttaaggtttttaattaagtatttaagtaaagtttgttttaaggtcgttttttagaagtgttatagaagagttttttgcgcgttgtgaatagttggattatattagggatttttaaagttttggtgttaggatttttttatttttttatttattgaggattttatagaggtttatgtgagttatatgtattggtatttatagtattagaaattaaaattgagaaatgaataaaatataagaatattagagtggtgaggttattatatgttacgtagttattggaaaattttgttgtatattggtgagaggatgagagtgaaaaggataaaggataaataatttttttttttttttttttttttgagatagagtttcgtttatgttgtttaggttggaatgtagtggcgtaattttggtttatcgtaattttcgttttttgggtttaagcgatttttttgtttcggttttttaagtagttgggattataggtatgtgttacgatatcggttaatttttttatttttagtagagattgggttttattatgttggttaggttggttttgaatttttgattttaggtgattcgttcgttttagttttttaaagtgttgggattataggcgtgagttattgtgtttagtagaaaaggataaatatttttttaattttatttcgaagttttgattttatagacgtatgaaaaggttttcgagagttattgaattagataattaagaatttttttaatattatggttttcgagtaggatttattaatgttggtattattgatatttttagggagatgattttttgttgttaggggttgttttgtgtttagttaggatgtttagtagtatttttggtttttatttattagatgttaaaagtaattttttagttgttataattaaaaatgtttttagatgttgttaaatgttttttggttgagaattattattttagggtgttgattttattttattgaaatgtgaattataaaatgtatattttttattgtttttttagatttttaatatgtttattttttttttatttttatttgggtttgttttttatgttattttattaagttataaatagtaagagtaggtgggtagtaataagtatagtatgaattaaagttaggaagagatattttagttaaagtttatttttaggtattaaagttgttagcgatttattgtttattagggtataatataattagcgaatatttatttagttatttatttattgatttatttatttttattttttgagatagagttttatttttgtcgtttaggttggagtgtaatggcgtaattttggtttattgtaattttcgttttttgggtttaagcgatttttttgttttagtcgtttaagtagttgggattataggtatgtgttacgacgttcggttaatttttgtatttttagtagagacggggttttattatgttggttaggttggttttgaatttttgattttaggtgatatatttatttcggttttttaaagtgttgggattataggtatgagttattacgttcggttttatttagttatttttaggttttggtaataatttaatttttagtaagtttgtttatttgttttttgtatttttaaaatatgaggtaataggttagttgtgtgatggggaagaaagaaaagaagaaattttgaaggtaaagaggtagtttattaaatttaaatattttatttttaaaattttatatttgggaggtttttttaattgaaacgtttggggatttttttgttagcgtttggttgggaggaagtagtaaaattgggagaaaatcgatatttttaatatttttaagttagatgtgtattttttattaaagttttttttgaattttttagtttttagaggttgggtttaagtttttttttttggaaattgttttagttattttaggttttttcgtttttaaaattatgattattaaatttaaatttagtattatttttaattttttgaattattttttttttatagttttaaattttaatttttaaaatgtttaattttgttattgtttttgttttttaggttttattgttttatttgttttatttgttttttatttatatattttttttaagttattttaggtaggtatggtttttttttttaattttttattttattttatagtttttttattatttttaaaatttttttttgattttagtaaattaagatttttttaattgtttttggcgtttaaaatttgtatgtattatttttttacgtttattttttagtgttttttttaagttattttttttacgttgattttttttacgttttattttttttagtttattttttcggcgtttatttttcgttatcggtttttttttatttttttgggtttttttttttcgttattcgtcggttaggttttttttaggttatcgtttgttttttcgggttaatcgtcgtcgtttagtgttagttgttgagttttttaattttttttttttcggattagttttttaggttgtagttttgaattggtgtttcgggtttaggcggatagattaatcgggagggttcgataatttatttaggattaggtagattagaacgagttttgagttcggaatcgggaagaggcggaagtatattatgatttcgtagagtaggcggcgacggcggcgacggcggcggtataataatagttgtaatattagggaaaaggttcgttggatttgggttaagagtattgatgattatcgattatagttttgtaaaagttaggaatcggcgttttagtgcgagttataagattaggggcggggtttttttttgtttatagttaattttcgcgtttgaaagcggcgagaggggtggtgatgtagcggtcggtgggcggggcgattacgttttggttttttggtttatagttttttttatgtttttgagagatatgcgcggacggtatttttttttttttttttttttttttttttttttttttttaattttattttaagttttgggatatatgtgtagaatgtgtagttttgttatataggtatatatgtgttatggtggtttattgtatttattaattcgttatttaggttttaagttttatatgtattaggtattttttttaatgttttttttttttttggtttttattttttgataggttttcgtgtgtgttgtttttttttttgtgtttatgtgtttttattgtttaatttttatttatgagtgagaatatgtagtgttttgttttttgtttttgtgttagtttgttaaggatgatggtttttagttttatttatgtttttgtaaaggatatgattttatttttttatggttgtatagtattttatggtatatatgtgttacgttttttttatttagtttattattgatgggtatttgggttggttttaagtttttgttattgtaaatagtgttgtaataaatatacgtgtgtatgcgttaaatggtatttttggttttagatttttgaggaatcgttatattgtttgttataatagttgaattaatttatatttttattaatagtgtaaaagtatttttatttttttttagtttcgttagtatttattgttttttgattttttaataattattattttgattggcgtgagatggtattttattgtggttttgatttgtttttttttaatgattagtgataatgagtttttttttatgtttgttgttgtataaatgtttttttttgagaagtgtttggttatattttttgtttattttttgatggggttgttttttttttgtaaatttgtttaaggtttttgtagattttggatattagatttttgttagatgggtagattgtaaaaatttttttttattttgtaggttgtttgtttacgttaatgttaattttttttgttgtgtagaagtttttttaattagattttatttgttaattttgatttttgttgcgattgtttttggtgttttagttatgaggtttttgtttatgtttatggcggacggtattttttaaggttaaggagagaggaggaatttttgagggtcgtagatagtagattattttcgttttggttttttgataaagaagagaaaaattttgcgggtataaaaacggttgttaggtattttaaacgtaatatatataaaaataatatatgtttattttttaaatattgttgttatttatgtagtttatgttgtgagatggacgagggaatttagggggtagtatggagttacggattatcggaataagatatgattttgaaatttatttagttatagtattttgtttttaggtgggggaattgagtttagaaataagaagtattttttttaaatataggaagaaaaaaatgagagaaataaaatagaaggataaagcggaaaaatagagattatttgtatttttattattaatattattatatatatttatatatatatatatatatatttatatttatatttttagatattttttttatgtatatatatataaatattttgtaatgagtttatattaagtatattgtttgttatatttgatagatgaatagataaaatttaaaatatttaatagatgaaagtatttaaaaattttgagttggaataaagtattgatttttaagtgttagtttttaaaagaattatttggttttgggttttttttttttaatatatagatttttgtattttattttttagagattttgaaatagtaggtttgtggtagttttattaattatttttttaataaatattttaagtgattttgattttgtggtttatggattatattttgagaaaaatattgaaagagagttttaaaattatttagtttaggagattttaatttggagtttatgtatgagtttagataggatgggagaggtgtcggtgaatttttagaaattatatgtaatatttatgtatgtgtatttttgtggggaagtttgtagtttttattagttttttaatgggatttgtgattttttgttttaatttttattttaatttaaatattaagaagtatcgatttgttttattattgtttgttttaatgtaattaatttttgaaagtgagaatatttgttaatgaatgtttattattataggtgaaattaatttgtgaataagtgatttaatataagattaatgaatattgtatatagtgttagttattgtttttagtaaaatgttttttgattgttattaatgagatttggtaggagttatgttttgggtatagtagtttttagagaatttataattgagttgagttttttgaagatgttttattaatattttttggattttagttttttttttttaattgtaaatcgtataattttaatgtttagtaaaattttaagttttttttataagaagaaataaaaaaagaatatagtggaaagaatattgggttagtagttagaggagttggttgtgagatattatttattggtagtgtgattttaggtaggttattttatttgtttgaatttttatatttttattggtaaaatgaaataatgagattagagttgttttttgattttggttgtatgttggaattatttgtggagttttaaaagtggaaaattttttttggttttattttttgagattttgatttagtttatttgaagttaggtttgggtatggtgttttttttaaaattttttaaaataatattggtgggttttagatgatttttaagttggtattaggtttataatttaaggattttatgtgagtaaatgtttatttatttaaaattggttaggtgtagtggtttaaatttgtaattttaatattttgggaagttaaagtaggtagattgtttgagtttaggagtttgagattagtttgattaatatggtgaaattttatttttataaaaaattaaaaattagttgggggtggtggcgtgtatttgtagttttagttatttgggggttgaggtaagaggattgtttaagtttaggaggtggaggttgtagtgagttatgtttgtattattgtattttagtttgggtgatagagtaagattttgtttttgaaaatatatgtatatatttatatataaggatagttagttatggtggtgtatatttgtagttttagatattagggaggttgagatgggagggtcgtttgagtttaggaggttgaggttgtagtgttttttgatggcgttattgtattttagtttatgtaaatgagtgagattttgtttttaataattaaaataaaataaaatattgttttaatttgttaaatatttggtgtaataaattgtcgttttttattttttgaaggtgttattaaattaaaaaaataaatatagtgaaatatgagtagttttataagcgaaatttatttttatttttattataattttttttttaggtaaatataaatgttggttttttgattgggataggtatcgtcgtgagatataataatgttttgaaagttgtagatatatgttgggtattttgttagtataaataggttaaaaatttttaagtttttgtttgtattgagtttttatatttagaaatgtttaatgttttttttaaaaaatattgtgagaaagatttttttttttatatagttttttattattttgttttagattgaaggagtttttttttggttttcggtggtagatgtagatgtatacgtgagattggggttagtgtttgaggaaatttgtgagatttttttcgatttaagttttataaaggttgatttgattgttggtatcgttgtatttagggtgtttttatgtgcgtttttgaatatattttatattattttagtgtataaattttttagtagtttttttatattgttttttattattataggtagattaagattttttttagtatttttgagagtgtatgattttttggttaaagagtaggaaattattggtaaatatttttttatatgttaatatattgaatggtgtaagaaatgatgattttattagatttggtaaatgatagataatgaaatgtggggatgagtagaggaaatgaatttaaaggtgtagaagtttagaatggaagaataataaatagttattaaataaatgggttgggtacggtggtttatgtttgtaattttagtattttgggaggttaagagggatggattatttgagattaggagtttaagattagtttggttaatatggcgaaattttatttttagtaaaaagtataaaaattagttgggtgtggtggtatatgtttttaaatttagttattcgggaggttgaggtttaaaaattgtttgaattagggaggcgaagtttgtagtgagttaagatcgcgttattgttttttagtttcggtgataaagtgggattttgttttaaaaaataataataataaataataaaaataaataaatgagtgtttttgaggtattggtgttatttatttgttattaaaaatttttattttttaaatttgtattatttttttatttgttttattttttttttttttatttattttttttttagttttttttatttttttttttttttttttttttttttggtatgttttttttttttggataatatttttaatatttattgtttggatgatagtatggttatcgtttaattttatagcgaggttatagtgggtttaaggggttgttaattttttagttagagttttttggataaatggaaatatgttattttgagttgtttgtttttttggttagtag

SEQ ID NO: 1131 - DNA, 5909 bp, Artificial Sequence
  chemically treated genomic DNA (Homo sapiens)
  unsure 965, 5095: n is a or g or c or t
tatgattacgttattgtattttattttggatgatagagtgggattgtgttttaaaaataattttaaatattttttaaaaaaattaaaaatttatagaagtaaataaaaaaaggtgaaattttattgtaaataaattatattttaattttaaatttttaaattaaagattaattttaaaatagtggataaagaaaaataggtaagataaatagaatatagtgagatgaataaaatatatttttattatttatttaggttgttataataaagtatcgtagagtggatggtttataaataataggaatttattttttatagttatggatgttggaagtcggagataaggatgttcgtatggttttaggttttgatgagggtttttttttggtttatagattgttgattgttttttatgttttatatattagaaagagagtaagagagttttttggtgttttttttattagggtattaattttatttatgaagtttttttttttatgatttaattattttttaaaggttttattttttaatattgttatgttggggtaaggatatttatatatgaattggtgggagtcggggaatataaatatttagtttattgtattaattagtaattatattattttaaatgaagtaaatgttttaattgaggtaaaaattttaaattggaaataatatttaatgatatacgttttttttttttgttttttattttgattttttagttatttgtagagagaaggtgggattgtgagaattttagagtaggattgttagaggttaggcgtagtggtttaagtttgtaattttaatattttgggaggcggaggaggatggattatttgaagttaggagtttaagattagtttgggtaatatagtaaaattttatttttataaaaaatataaaaattaggttaggcgcggtggtttatatttgtaattttagtattttgnggaggtaagggggtggattatttgaggttaggagttcgagattagtttggttaatatagtaaaattttatttttattaaaaatatagaaatttgttgggtgtggtggtatgtgtttatagttttagttatttgggaggtaaggtaggagaatcgtttgaatttgggaggtagaggttgtagtgagttgagattatgttattgtatattagagggagattttgttttaaaaaataaataaatatatttaataagtagtagggtatagtgggttatatttataattttagtattttgtggaggttaaggttagtgagattatttgagtttaggagtttaagattattttggttaatatggtaaagttttgtttttattaaaattataaaaaattagttagatgtagtggtgtgtatttgtagttttagttattcgggtagttgaggtataagaattgtttgaatttgggaggtagaggttgtagtgagttgtaattgtattattgtattttagtttgggagatagtaattttgttttaaaaaaaaaaataaaaaaaagaagaagaagaaaaaaaaatttaataatttattgtgttttaaattttagtttttgttattattttttttaaaaaaaggtgttttaatgtaatagtttttaggtagaattagtttttaagtttttttttgtttttgggagttattagtttaggtagttaggaaatattttaggtcgggtgtagtggtttatgtttgtaattttagtatttcgggaggtcgaggcgggttgattatttgaggtaaggagtttaagattagtttggtcgataaagtaaaattttgtttttattaaaaatataaaaattggttagatgtggtggtgcgggtttgtagttttagttattcgggaggttgaagttggagaattgtttgagtttgggagtagaggttgtagtgagttgagattatattattgtattttagtttgggtgatagaatgagattgttttaaaaaaaaaaaaattatataaaataaagaagaaatattttagagtttaggatcgtggtttttaaatttaatatggttgtatattggaattatttggaaaatgttggggtttagaaaatgatatttttgattgaataaggtattttggtatgttgtatgttttgaattaaagaaaattgaaaggtttttgaaatagcgttagaattaaggtttttttttgatttttttttaattttattttttaattttttttttttaaagtattcggaggggttttgtttgaagtttttttatttgaataaggtaggtttttttagaataaaatataatagttttaaaattttttttttaagaattttattaggtaattaggaaatattaattattgggaagagaaaagattaaaagttattattatgtttagatagattttttatttatttttttgagggtagtttttgagagattttttaggagatattatttgtttaataaggtaatttttggttatagtgaagtttttttttttattttttgttgttgttttttttagagtttataggaattttgttttaggtaaattttttgttttttgaatttatttttatttttttaaaaattatttattagttttttaaattgtttattattttattttttttttttgtgaagtagatgttatttaagttttagttatttggtttttttttgagttttatatttcgtgtggtttttgtgtataagtatattaataaatgtgtatgtttggtttggtgtggtggtttacgtttgtaattttagtattttgggaggtcgaggtgggtagataatttgaggttaggagtttaagtttagtttgattaatatggagtaattttatttttattaaaaatataaaattagtcgggtgtggtggcgtatgtttataattttagttattcgagaggttgaggtaggagaattgtttgaattcgagaggtggaggtttcgttgagtcgagattgagttattgtattttagtttgggtaataagagtaaaatttcgttttaaaaaaaaaaagtgtatgtttttttttttgttaatttgtttattgttagtttattttagtagtgaatatttagagggtggaggggaagtttttataagagttttaaaagttattgatgtttgggttttatttagagattttgatatatttagtttaggtgtaagattttaaaagttgtttaggtgattttaatgttaaggttgaggtttttggaggaattttgtagagttgtatttattatttagtaattttaatttatacgtgaagggttaagtaggagtatatttgggtgtagggggtagggtattgttttgggatttaggggtttttgaggaggtttgtggtttgagtttttgttaataaattgaatgttttttttttttataataaagcgtagaagcgggaggtatttgtatttgtcgtaaggggttgtgatttttttgaatttgttttttaagttttaggtgttttagttttggtgggtgatgaagtagagtagtttgggggtgatttgtgttagggtttaagggtttttaagttttttagaaaattatattggttttagtggagttgtagagttatttgtaggagaatttggatgtgttgttttttggaagagtggttataagggtttacgagtttattttagggtgggtttagaaattagattgatttagtaggttttagagaggaatttgtattttttttttttttgacggagttttattttgtcgtttaggttggagtgtaagtggcgtaatttttatttattataatttttgttttttgggtttaagtaattttttcgttttagtttttttagtagttgggattataggtatgtttggttaatttttgaatttttagtagatatcgggtttcgttatgttggttaggttggttttttgaatttttggttttaagggattcgttcgcgttagttttcgaaagtgttgggattatagttatcgcgtttttttaattaatttttatttttttgtttgttttttggagatagaatttcgttttattgtttaggttggagtgtagcggtgtaattatatttattgtagatttgatttttaggtttaagttatttttttgttttagttttttgagtagttgagattatagggacgtattattatgattggttaatttttgtattttttgtggagatgggggtttttttatgttttttaggttagttttgaatttttgagtttaggtaatttatttatttcggttttttaaagtgttgggattataggtataagttatcgcgttcggtaaatttattttttattgatggatattgtaaaattttttttttattaaaaaaaaaaaaaaaaaaaagatagatataatttatattatttgtttaattttgttttttttaatttttttagggaaattttttttaggtgatagatggatagatatatgagatagatataacgtatacgattagtttaattttattttttttaatttttttagagaaaattttttttaagtgaatatttaaatttgaattacgttttgttaaattgttttttaggaaaataaaataaaataaatttttaagtttttgtttatttaataatttgttgtgtcgaataaatttttttattttttaggtaataaaatggtagtttaggttagaaagtcgtttatattcgtaggtataagggttgggtaagaacgtttcgtttggttgattaatttgagtttcgcgttttggataggaattatgtatagggcgtcgttgtggtattagaaattttaaagttataagcgttttagattcgattaggatgtcgttatcggttatagtttagaggttcgtttttgcggcgtaagttcgtttttttgaagaaaaagtttagtttcggtagcgttttttttcggtttcgtttttttttcgttcgattttttttgttattggttgataacggagtatataaggacgttattttttgtcgtttgtttttttcgtgttatttgtagaggggtttatacggcgttgttttgggtgagtttcgtgtagcgtttttggcgttttttagggttagaanaatgagttttttttgtttaaatgaagggtgagaagattagtgatgaaagtcggttagattggatttgtttttcgttcggcgcgttttattttaggtttgcggttcgtacgtggttaggttcgggttggcgggtttttagagtgtttcgggagcgggtggaggtcgttttttagcggaggtttcgagttggggttcggattaggtcgcgggtgggcgggagtgtagaaagcgggttaatattttgtgttgttattttttcggagttttatacggcggtgagtttaggtttaggcgttgatttatattagttatttgggttggtcgggtttttttttcgcgtcgtgcgggttaggagttaaggttttcgggtttttagataaataagtggtgatagtatagcgaagtaattttaaagtattcgtttataatttgtttgaaaatgtttgaaaataatttatgttttttttgtttttagtttgtatattttaaatatggttgtttttttgtatttagttgttaatttggcgtatttataatttttttttaatttttattttgagaagtgttgaatttttattcgttaatttcgtgtagttttattattcggttattttgtcgtttatattatttttttagtaagatgtgcgttgtttcgtaatatacgatatgtatgggttaattttttgtttattttttattatattgtaagtttaatgtttgatattatagtagatggagtttttggttgtttttaagggtgtgttttatttaatttaatggaatgaaaagaaataggttgtttttttattttaga

SEQ ID NO: 1132 - DNA, 5909 bp, Artificial Sequence
  chemically treated genomic DNA (Homo sapiens)
  unsure 815, 4945: n is a or g or c or t
tttgaaataagagagtaatttatttttttttattttattgagttaagtagggtatatttttaaaagtaattaaaaattttatttgttatagtgttaggtattgagtttatagtgtagtgaagggtaaatagaaagttaatttatatatgtcgtgtattacggaatagcgtatattttattgaggaaatagtgtggacggtagagtaatcgagtaataaaattatacgaaattagcgaatggaaatttaatattttttaagataggaattaaggaaaagttgtggatgcgttaagttaataattagatataaaagagtagttatgtttggaatatgtaaattaaaggtaaaaaaggtatgaattgtttttagatatttttaagtagattgtaggcggatgttttggaattatttcgttgtgttgttattatttgtttgtttaaaaattcgagaattttaatttttgattcgtacggcgcgaagggaaaattcgattagtttaagtagttggtgtaaattagcgtttgggtttagatttatcgtcgtgtgggatttcgaagggatagtaatataggatgttagttcgttttttgtattttcgtttattcgcggtttggttcgaattttagttcggagttttcgttggagggcggtttttattcgttttcggggtattttgggaattcgttagttcgagtttggttacgtgcgggtcgtaggtttaaggtggggcgcgtcgggcgggagatagatttagtttgatcggtttttattattagtttttttattttttatttgagtaggaaaagtttattnttttagttttggaaggcgttagggacgttatacggaatttatttagaataacgtcgtatggatttttttgtaggtagtacggaaaagataggcggtaggaaatgacgtttttatgtatttcgttgttagttaatggtaaagaaagtcgagcggaagaagggcggagtcggagaagaacgttgtcgggattgggttttttttttaggaaggcgggtttgcgtcgtaggagcgggtttttgggttgtagtcggtagcggtattttggtcggatttggggcgtttgtgattttggggtttttagtgttatagcgacgttttgtgtataatttttgtttagagcgcggaatttaagttagttagttaggcggggcgtttttatttagtttttgtatttgcgaatatgagcggttttttagtttaagttgttattttgttatttgaaaagtaggaaggtttgttcgatataataaattgttaggtaaataaaaatttgaagatttattttattttatttttttggagaatagtttaataggacgtaatttagatttaaatgtttatttaagggaagttttttttgaaaaagttaaaaaagataagattgaattgatcgtatgcgttatgtttattttatgtatttatttatttattatttgggggaagtttttttgaaaaagttaaaaaggataagattgaatagatggtatggattatatttattttttttttttttttttttttggtagaagaaaaattttgtaatatttattagtaggagataagtttgtcgggcgcggtggtttgtgtttgtaattttagtattttgggaggtcgaggtgggtggattgtttgagtttagaagtttaagattagtttgggaaatatggggagatttttatttttataaaaaatataaaaattaattaattatgatggtgcgtttttgtagttttagttatttaggaggttgaggtaggaggatagtttgagtttagaggttaagtttgtagtgaatgtgattgtatcgttgtattttagtttgggtaatagagcgaaattttgtttttaaaaaataaataaaaaaataggagttaattgaaggggcgcggtggttgtaattttagtattttcggaggttgacgcgggcggattttttgaggttaggagtttaagagattagtttggttaatatggcgaaattcggtatttattaaaaatttaaaaattagttaggtatgtttgtaattttagttattggggaggttgaggcgggagaattgtttgaatttaggaggtagaggttgtagtgagtggagattgcgttatttgtattttagtttgggcgatagagtaagatttcgttaaaaaaaaaaaaagtgtaggtttttttttggggtttgttgagttaatttgatttttgagtttattttaaaatgaattcgtagatttttatggttatttttttaaaggatagtatatttaggtttttttgtaagtggttttgtagttttattgaagttagtatgattttttgaggagtttggaaatttttggattttagtataggttatttttaggttgttttgttttattatttattaaggttgaagtatttggggtttgagggataaatttagagaagttatagttttttgcggtaaatgtaaatgtttttcgtttttacgttttgttatgggaagaggaggtatttagtttgttggtagaaatttaggttataagtttttttagaggtttttgagttttaaaataatgttttgttttttgtatttaaatgtatttttgtttaattttttacgtgtggattgggattgttgagtagtgagtgtagttttgtagggtttttttaggggttttagttttggtattaggattatttgggtagtttttaaaattttatatttgggttgaatatattagaatttttgagtgagatttaagtattagtagtttttaaagtttttgtaggggttttttttttattttttgagtgtttattgttaaaatgaattgataatagataaattaataggagaagaaatatatattttttttttttgagacggagttttgtttttgttgtttaggttggagtgtagtggtttaatttcggtttaacgaaatttttatttttcgggtttaagtaatttttttgttttagtttttcgagtagttgggattataggtatgcgttattatattcggttaattttgtatttttagtagaaatggggttgttttatgttggttaggttggatttgaatttttgattttaggttatttgtttatttcggttttttaaagtgttgggattataggcgtgagttattatattaggttaaatatatatatttattaatgtgtttatgtataggagttatacgaaatataagatttaaagaagggttagatggttgaagtttaaatagtatttattttatagggaagggagatgggatggtaaataatttagagggttagtaagtgatttttggaaggataggaatgagtttaaagaatagaaaatttgtttgagataaagtttttgtgagttttgggggaaatagtagtaaagggtaaggggaggaattttattgtgattaaaggttgttttattaggtaaataatgttttttggaaaattttttaaaagttgtttttagaaaaatagatgaagagtttgtttgggtatggtgatgatttttagttttttttttttttagtggttaatattttttggttatttgatgagatttttagggaggaagttttaagattattgtattttattttggaggaatttattttatttagataagggaattttagataaagttttttcggatgttttgggaaaaggggattgagagatggggttaggggaaggttagaaagaaattttggttttgacgttattttagaagttttttaattttttttaatttaaagtatgtagtatgttaaagtgttttatttagttaggggtattattttttgagttttaatattttttagatgattttaatgtgtagttatattgagtttaaaaattacgattttagattttagagtattttttttttattttatgtaatttttttttttttgagatagttttattttgttatttaggttggagtgtagtagtgtgattttagtttattgtaatttttgtttttaggtttaagtaattttttagttttagtttttcgagtagttgggattataggttcgtattattatatttggttagtttttgtatttttggtagagatagggttttgttttgtcggttaggttggttttgaattttttattttaagtgattagttcgtttcggtttttcgaagtgttaggattataggtatgagttattgtattcggtttagggtattttttgattatttaagttaatggtttttaggagtagagaagaatttagaagttagttttatttagaggttgttgtattgaggtatttttttttggagggagtggtgataaaagttgaaatttaagatatagtggattgttaaatttttttttttttttttttttttttttgtttttttttttgagatagagttgttgttttttaggttggagtgtagtggtgtaattgtaatttattgtaatttttgttttttagatttaagtaatttttgtgttttagttattcgaatagttgggattataggtgtatattattatatttggttgattttttgtaattttagtagagatagggttttgttatgttggttaggatggttttgaatttttgagtttaagtgattttattggttttggtttttataaagtgttgggattataggtgtgatttattgtgttttgttgtttgttaaatgtatttatttattttttgagatagagtttttttttggtgtgtaatggtatgattttagtttattgtaatttttgttttttaggtttaaacgatttttttgttttgttttttaagtaattgggattataggtatatgttattatatttagtaaatttttgtatttttagtagagatggggttttattatgttggttaggttggtttcgaatttttgattttaggtgatttatttttttgtttttntaaagtgttgggattataggtgtgagttatcgcgtttggtttaatttttgtattttttgtagagatgaggttttattatgttgtttaggttggttttgaatttttgattttaagtgatttattttttttcgttttttaaggtgttgggattataggtttgagttattgcgtttggtttttagtagttttgttttgaggtttttatagttttattttttttttgtaagtagttgaagagttagaatgaagaataggaggagaagacgtgtgttattgaatgttatttttaatttgaaatttttgttttaattgaaatatttattttatttaagatagtgtaattattgattgatgtaatggattgaatatttgtgtttttcgatttttattaatttatatgtggatatttttattttagtatgatagtattaggaggtggggtttttgagaggtgattaggttataagggagaagattttatgaatgggattagtgttttgataaaaggaatattaggaagtttttttgttttttttttggtatatgaggtataaaaaatagttagtagtttgtaagttagaagaaggtttttattagaatttggggttatgcgggtatttttattttcgatttttagtatttataattgtgagaaatgaatttttgttgtttgtaagttatttattttgcgatgttttattatggtagtttgaatggatggtgagaatatattttgtttattttattatgttttatttgttttgtttgtttttttttatttattgttttagaattaatttttaatttaaaaatttaaaattgagatatgatttatttatagtaaaattttatttttttttgtttatttttgtaagtttttaatttttttaaaaaatatttaaaattgtttttgagatatagttttattttgttatttaggatagagtgtagtgacgtgattatg

SEQ ID NO: 1133 - DNA, 5593 bp, Artificial Sequence
  chemically treated genomic DNA (Homo sapiens)
ggtaggaagaattttaggattttttgggtttatttatttgagcgttagtttttaggagacggggtaaagggttgttcgtttttcgtgattaggcggtttttttgtttttgttttatgtgtggttaacggggtggttgaaaggtttacgtgtttttttagttcgggggatttgagaaatttgattgttatcgtgtttttgtagtttagtcggtggtttggtagtggatagaggttttgtaggttattaaggaggacggaatttcggggatagaggaggagttgtagtgcgaggagtttaggttttgattatagttttattttcgggatattttaatttttgtattttttgtgtttgttttggggtatttattttttaattttatggaaaatattgtgatagtaacgtgggagtagtaagaatttaaataaaagaacgtgttatttacgttgttttttttttttttgagttgtaggtattagtatattcgggtattttttttatggttcgttgttttaattttgattattttagtatttagagagtaagtcgaaaataaaaatatttattatttatgttcggtattagaaaattttattggtatatgtttagattattttaaaaggaaattaaatttatagatatagttaggagtagatggagtttgtggggtttaaaatatacgtaaattttaggggttattttaaataataatagtaatatgaatttaagttagatatgaaaagaaatatttatttgaagtgataaaaaattataaggttcgtatatgaaaaagttgataggtgtaataaatattattaaatggaagaaaaaaaatttgattagttatttttaggtatatttttattaaatttattttttttatattttttggttgttattttttgattattgttttttatgaaaataattttttataaatagaatggaaaggtaatttagttttttcgttgacgtgaggtttaggttggttttttattattagttgggggttgcgtgatatacgcggtcgtcgttacgatgtgtatgtggtgatgttgttacgggtatttgtttcgtaagtagtagtttcgattaatttttttttgcgaggtgattattaaaggattgtagagttggtcggggtattcgtgcgtgtttatgatcgagaattttttatatagagaggattttcgttttgacgaaggagcgtagagttggtcgggtattcgtgtatgtttatgatcgagaattttttatatagagagagaagatttgtgttttgacgaaggattatagagttggtcggggtataaatgtttgtttatgattaagaattttttatatagagagagaggatttttgttttgacgaaggagcgtagagttggtcgggggtatacgtgcgtgtttatgatcgagaattttttatagagagaggatttttgttttgatatttttattgtattatagatgcgtttaaggttgtaaatttgaagtttatatttttttttatgtaatagtttttttattgtcgattttagtttattgttttgtagttataaagggcgggttttgttgcgttagttttgtgaagttttttatattgtttggtatgtggtttattttaaaattattttatgtgtatttaataagaattagtaattaaaattttttattgtaataattataataatataattgtttagtttttgaggtagtgtttttgtatattttataatgttggtgttaaagttttaatattgttgtgaatttttaatattttcgttttttgtttttaatggagaagttttggcgtttttcgtttcgattgtgtatttgatttttttgttttttagtttgttttggttttttgtattttgatgcggtatgtttttatatttatgaatattcgtttttttgtgattgtgtttttaattgtttttatgttggcgttttttttatttatattgatgaaaaataaattatgtttttgtttaataggtttgtttatgtattttgaaaatttattatttttgtttatttttttttatttttttttttatgtatcgttattttttcgtgtttaacgtgtatttttttgtttatatgaatttatgtatgtgggtataagtgtgttttgtgtgtgtatttttgtttatatgaatttatgcgtgtgggtataagtgtgttttgtgtgtatttttgttcgtatgaatttatgtatgtgggtataagtgtgttttgtgtgtatttagtattttttaaatatgtattgaaatagaattttttttttattattaaagtttgtattatttgtgtttgtatagttagtaggtagtttgttttgttgatattatttatttttttgatttcggttttttatagatttgttaaaatttttttttttaaattttttttgatggagattagtgagtggtagacgtttttagttgttgttgttgtttaatttttattattattattttttcgagatggagttttgttttgttgtttaggttggagtgtagtggtatgattttagtttattgtaatttttgttttttaggtttaagtaatttttttgtttttgttttttgagtagttgggattataggtgtacgttattatgtttggttaatttttgtatttttagttaagatggggttttattatgttggttaggttggttttaaatttttgattttattttggttttttagagtgttggtattataggtatgagttattatattgggttttagttgttttttaatgttcgagatgtttttattttgtttttaatattttatgaaagttgtattgagaataatatttataggtaaatgtgatttttttcgggtttgttaaagacgttattttattgtttttcggaaggtagcgttgttattgagaggtttgttattagtttatattcgtttttatggtatgtagtgtggtttttttttttggttattttgattttttttttttttttttggatgatttgtattttattgtaatattttaggagtggattttttaattttgattattttttggtaatttagatttggggtgttatttttatgtttttttaattttgaagaattttgagttattttgttgttttgttgttattttagaaaatgttttttttttagaatttttattttgtttatattggaattttttgatttattttttatgtgtgttaattttgtgtatgtgtgtgtatgtgtgtatgtgtgtgagtgtgtatgtgtgtgtgtatgtgtgtatgtatgtgtatgtatgtatgaatgaatggtgtgtgtacgcgtgtatgtttgcgtgtgtatgtgggtgtgtatgtgtatgggtttgtgtgtatttgtatgtgtgtatatgtgtgtgtgtgtatgtgtgtgtgcgtgtgtgtgtatgtgtgtgtgtatatttttgtgtgttgtgtttttagagttgttgtattttagttggttttttttatttattttattattagttttaggttggagattgaatttatttgtaatattttaattttttttttgaatttttttgtttttattgattttgttagtattattttttatgatattaagttttttttttattatgttaagtttggaatttaatttgtttattgagttttttatttattttattatttatttttaagatttgtaattatttttatttcgtttttttttattttttatattttggttagttttaattttatattttatatatttttaaattattaggtattttgattatatttttgtagttttaaagtgtgtgttagattttttttggttggtgtaagtttttgtattaattgtttatttttagtttgttttttttagtgtggtgtttttttgggtaatttggaatttggtttttttagtttattttaaggtgaggatattgtgtttttgtatttttgtttttttttgttattttgttgttattgttttttgtttagtagtgttttgtagtttttgtttttatttcgggttttaggtttttgttttgtagtgatgtagagtatgttatagataaagttattttttttaaggacggtttgttttagtttttgtttttgaggttgtgttgatgtttttttgtttttttatgtttatagtgttttattaagttatacgaagttatagttttgggatgtgttaaggagggttttttagttttttttttggagttagggaagttttttttattatttttaggagtcggatttaggttttttttgtttgttttgggatttggagttgataggtttttgtttttgttttattattagtttgtgttttttttttattttttgttttatgtgagtgtgtgtgcgtttgtgtatgtatatatgtatatatatgtatatatatatatatatttgttttggttttttgtttgtttgatttattgttgttttgtgtgtggagtagagagggtcgttattgtatattttgtttaggatagtggatatcgtttttaaatgtatacgggatcgtgtttatataggagggtttttttttttttatgatgaatttgaggttaagtaatttgtttagagatgtaggaagtttagttgagttttaagtttacggttttcggattttaattttaaatttttttgatagtgtgtacgttagtaagtgtgggatggttggggggtatttgttacggttgtatacgtttttaggaggtttgtatattttttattttttttagtttttttttaggtgaaatttgtaaatttgtttttttggatttggttttgtttaagtgattttttgggattaataagttgttatttattagtttttaataataatggtaggttatttgttttattgtagaattggtagtggtttatatttaggaagggattggttagttttttgtgttaggtttttgggggattttgagtttagcggtataaagggcggttgtgggaggattggtatagttttttttagttttagtaagcgatttgttaggcggtcgtggatttagatttcggagatgaagtttttgtttttggtcgttagttttggttttattgttgttttgtaggtttattattttttggttttagacgaggagatttaggatgtgaggttcggatgggaaggttgggttggagggggtaaggggcgaggttgagattggatggagattttatgttttttttatttaaggagattttcgtttttgggttgggtatttaagttttgttttgagggaatggtgggatggggtagtaggggtttgggttggtagggtaggtggcgtaggggtgtagagtgggtagggttgggagggtgggggtttggttgattttattttttttttggggatgagggtttttgtggttttggttggtttgtgggggttggagttatttttaagtgggtttggcgagggtgttgggtgttttttgggtgggttagattggggaacgtttttcgtttttagttttcggggtgcggtagagtttaggggttgtaggttagggaagggggaggttttggagtagtcggtttgagtttgatagagaggggttttttttagg

SEQ ID NO: 1134 - DNA, 5593 bp, Artificial Sequence
  chemically treated genomic DNA (Homo sapiens)
tttggagaaggtttttttttattaggtttaggtcgattgttttagagttttttttttttttggtttgtagtttttagattttatcgtatttcgagggttggaaacggggaacgttttttaatttaatttatttagaaaatatttagtattttcgttaggtttatttgaaggtggttttagtttttataagttagttaggattataggagtttttatttttagggaagaagtgaagttagttagatttttatttttttagttttgtttattttgtatttttgcgttatttattttgttagtttagatttttgttgttttattttattatttttttagggtagggtttgaatgtttaatttaaaaacgagggtttttttggatggaggaggtatggggtttttatttagttttagtttcgttttttgttttttttagtttagtttttttattcgggttttatattttgaattttttcgtttgaggttaggaggtggtgggtttgtagggtagtaatgaggttaaggttgacggttaggagtaggggttttattttcggagtttgagtttacggtcgtttgataggtcgtttgttggggttgggagaggttgtattagtttttttatagtcgttttttatatcgttgggtttagggttttttagggatttggtataggagattgattaatttttttttggatgtaaattattgttagttttgtaatggagtagataatttgttattattgttggaggttggtgaataatagtttgttaattttagaggattatttggataggattaggtttagaggagtagatttgtagattttatttgaagggaaattgaagggagtgaagggtgtgtaggttttttggggacgtgtgtagtcgtaatagatgttttttagttattttatatttgttgacgtgtatattgttaagggggtttggggttggagttcgagggtcgtgggtttggggtttagttgagttttttgtatttttgggtaggttatttggttttagatttattatggaaaaaaagggatttttttgtgtgaatacgatttcgtgtgtatttaaagacggtgtttattgttttgagtaaggtgtgtagtaacgattttttttgttttatatatagagtagtaataggttagatagatagaagattaagataggtgtgtgtgtgtgtatgtatgtgtgtatatatatatatgtataaacgtatatatatttatataaaataaggaatggaggagaagtataggttggtgatggggtagaggtaggggtttgttagttttaagttttaaggtaggtagagagggtttaggttcggtttttgggagtgatgggaggggtttttttgattttagaaagaaggttgagaaattttttttgatatattttagggttgtaatttcgtataatttagtggagtattgtgggtataggaaggtaagaggatattaatatagttttaagggtagaagttgagataagtcgtttttggaaaggatgattttatttgtgatatgttttgtattattgtagagtagaagtttgggattcgggatgggagtagaggttataaaatattgttagatagaggatagtgataataagatggtagagaaaggtagaaatgtagagatataatatttttattttgaaataagttagaaaggttaggttttaaattatttaaggaaatattatattaagaaaggtaggttaaaaatgagtaattggtataggaatttatattagttaaggaaagtttgatatatattttaaaattgtaggagtatgattaagatgtttagtgatttaaaaatatataaagtataaaattagaattggttagaatataagaaataaggagagacgaaatagaaataattataaattttgaagatgaataataaagtgaataaaaaatttaatagataggttaaattttagatttgatatagtagaaaagagatttagtgttatggaagatagtattaataaaattaatgaaagtagaaaaatttaaaagagaaattgaggtgttatagatagatttagtttttagtttggagttagtaataaaatgagtggaggaaattaattagagtgtagtagttttgaaaatataatatatagagatatatatatatatatgtatatatacgtatatatatatgtatatatatatatgtgtatatatataaatgtatataaatttatatatatgtatatttatatatatacgtagatatatacgcgtgtatatattatttatttatatatatatgtatatatatgtatatatatatatatatatgtatatttatatatatatatatatgtatatatatgtataaagttaatatatatggagaatagattaggaggttttaatataaatagaataggagttttgaaagaaaaatattttttaaaatggtaataaagtaatagaatagtttagaattttttagaattgaaaagatatgaagatgatattttagatttaaattattaaggaatgattaaaattgagaaatttatttttagaatattatagtgaaatgtagattatttaggaaaggagaaaaaaagttaaaatgattagaaagaagagttatattatatattataaaagcggatgtggattgatggtagattttttaatagtaacgttgtttttcggaagatagtggagtgacgtttttaatagattcgggagaaattatatttatttgtgaatgttatttttagtgtaatttttataaaatattgaaggtaaaataaagatatttcggatattaaaaaataattgaggtttagtgtggtggtttatgtttgtaatattagtattttgggaagttaaggtgaggttaggagtttgagattaatttgattaatatggtgaaattttattttgattaaaaatataaaaattagttaggtatggtggcgtgtatttgtaattttagttatttaggaggtaaaggtaggagaattgtttgaatttgggaggtagaggttgtaatgagttgagattatgttattgtattttagtttgggtaatagagtaagattttatttcgaaaaaataataataataaaaattaaataataataataattgagagcgtttattatttattggtttttattaaaggaaatttgaaagggagaattttagtaagtttataggagatcgaggttagggggataaatgatgttagtaaggtaaattatttgttggttgtataaatataaatggtgtagattttgatggtgggggaaaggttttgttttagtgtatatttaaagagtgttaaatgtatataaaatatatttgtgtttatatgtatgggtttatacgaataagaatgtatataaaatatatttgtgtttatacgtatgggtttatatgaataagaatgtatatataaaatatatttgtgtttatatgtatgggtttatatgaataaaaagatgtacgttaagtacgggagaatagcgatgtatggagagggaagtggaaaggggtgggtagggataataaatttttaaaatatataaataagtttgttagataaaagtatgatttattttttattagtatagatgaaaagggcgttaatatgaaaataattaaaagtataattataagaagacgaatgtttatgaatgtgaaggtatatcgtattaaaatgtaggaagttaaaatagattgaagaataaaggggttaaatatatagtcggaacgggagacgttagaatttttttattagaaatagagggcgagggtgttaaaagtttatagtaatgttggagttttggtattaatattgtaaagtatataaagatattgttttaaaagttaaataattatattgttataattgttataatgaaaaattttagttgttaatttttattaaatatatatggaatagttttaaaataggttatatattaggtaatatggggaattttatagaattaacgtagtagagttcgttttttgtagttataaggtaataaattagaatcgataatgaagagattgttatataaagagaaatataaattttaagtttatagttttaaacgtatttataatataataaagatgttaggatagaagttttttttttgtgaaaagttttcggttatgagtacgtacgtatgttttcggttagttttgcgttttttcgttaggatagaagttttttttttttgtgtgaaaagtttttggttatgaataggtatttatgtttcggttagttttgtggtttttcgttaggatataagttttttttttttgtgtgaaaagttttcggttatgaatatgtacgaatgttcggttagttttgcgttttttcgttaagacggaagttttttttgtgtgaaaagttttcggttatgaatacgtacgaatgtttcggttagttttgtagttttttggtggttatttcgtaaaggagaattgatcggagttgttgtttacggggtagatgttcgtggtagtattattatatgtatatcgtgacggcggtcgcgtgtgttacgtagtttttaattgatgatgagaaattaatttgaattttacgttagcgggaaggttgagttatttttttattttatttatgaaaaattatttttataggaagtagtaattaaggggtagtagttaagagatatagaaaaaataagtttgatagaggtatgtttgggagtaattaattaaatttttttttttttatttggtgatgtttattgtatttattagtttttttatgtgcgagttttgtgattttttattattttaaataaatatttttttttatatttaatttggatttatattgttattattatttaaagtaatttttaaagtttacgtatattttaagttttataaattttatttatttttggttatatttgtgagtttaatttttttttaaaataatttgaatatatattaatgagattttttaatgtcgggtatgggtgatgggtgtttttgttttcggtttgttttttgggtgttgaaatagttaggattaggatagcggattatggaaaaagtgttcggatgtgttggtatttgtagtttaggagaaagggaggtagcgtgaatgatacgtttttttatttgggtttttgttgtttttacgttattgttataatattttttatggagttgaaaagtgaatgttttaagataagtatagagggtgtaggggttggggtgtttcgagggtggggttgtggttagggtttggatttttcgtattgtagttttttttttgttttcggggtttcgttttttttggtggtttgtagggtttttgtttattgttaggttatcgattaggttatagagatacggtgatagttaggttttttaggtttttcgggttagaggaatacgtgagttttttagttatttcgttgattatatatgagataaaggtagaggggtcgtttggttacggaggacgagtagttttttgtttcgttttttggaggttggcgtttaaatgagtaaatttagggagttttgaggttttttttgtt

SEQ ID NO: 1135 - DNA, 5774 bp, Artificial Sequence
  chemically treated genomic DNA (Homo sapiens)
atggaatttatttttttagttgaaataaatacgtgttgttaaggaggagtgggggttgggtttgcgatgtttatttattattgggatgaagtggagggtatagaggttgtagtttgttttatttttagttttcgtagggtattagaggggttttaggtaggaggttgtgtgttgtggttttgaagttagggatgtttttagggatatttggttttatttgattttttcggaatttattattttgttttttgggttgggtacgtttttggattgttttgggttttcgggagaattagtttttaggagagttagatcggtttttttatttagttatttttgatggtgttagcggaggtttagttaaggatttggagagtagggagtacgggagtatgtggggtaacgtaggggtggtcgtagtggagatgttttttttttggggtgttgggggttgtagttcgggtaggaggggtgtagagttgggaggagtattggttttgagtagtattaggattatgtgggatagaggtttatgatagagggattgcggtttagttttatgggagtttggtatttattattgtttgtcgttgtttgtgtttattttagattttgtttagagttttgacgtttatttcgttgttatttatgattattgtgggtttttttgttcgtataggagtttaggttttggagtaaaaggtagagtatttatttaagtagtatgtttgggttaggtattaagggatggaattagtaagggttttgggtttagattttaagtagtagggttcgtttttttttgtttggtggattttaggggtttattagagggaggaatttagtgggtgtatttgggggagggttgggaggggatttttataggcgggtagggtttttgttaggtagaaggggtaggaggattttaaggttttttggcgagttttggtatgagagaggatgggggttggaaaattgtttttggaaataggagatttagtttaagattttggtagggtaagttttttatattaaatagtttttttcgtttttgggtgtttgagagtcgggtgtttagttcggatttgtcgtgattaaggagagttgatttgtagatattaagattttttgtatttgtgattgggttttttgggggtattttgattgtagattttttttaggtgtggtatttggtttttagaagtttagttagttattttttgtttagtttttaaatacgttagagggttaattatttatggttacgttgaatattatttataagattcggaaattagaatggggagttagattggatttttgagatgtaaggatcgttaggaagtattttgttgtttttatgtatggatgagatttgggtttttttatgggaggataggttgttgtagtttttagggagtatttatttttgggcgtggagagtggggatagttgtttgttagagattgcgaggggaggtcgggagtagtcggagtatttttggtttttggttacggaaaatttaggtagggatttgtttttaagtttttgttgttgttaagtcgatttgtatagtaggatttgggagtttagtttagttttttttaggaggggtttggttttattgtttttgtgtggttcgttgagggtttattagaggtatttgtagttttttgagagaaagtaggtttagtttaggggttacggtggaaattataggaggggtcgaggggaggtaggtgggtgtttgttatgttatgtatagtgttatacgtgtcgtggagattgttttaagagtttcggggtttagggatttttttaagcgttgagtagtgtgaatatttgtgtatttttattggttagggtttaatgaatggggtttagtggaaagggggtgggtgaggaatggggttttagtgttttgttgattttggagtttttggagtcggttaagtttgaatgggaggtttatattatagtttttatttaatttttttagtgttgagttttgaagtttgtgtggtgggtttatgtagagttgattttttttttgtagttttgttagattttgaagagagttaaggttagtgggtaggagataggtttggagttggtgtagagagaggaatgagttttgtatgggtttgattagaaatttagttttgtgtagggatattttggggttcggtgttgtttatgtatgattttatagaagcgtagagttgttttttttatagaggagcgtttgatttgtgtgggagttaggtagagatttgtatgtatgcggaggagttaggttttaagttagtttgggggatttttaagcgggattatttttttttttgtatttggttttggtgtttttttattgtggatttagtgttttgtttatttattatatttatattttggagttttgggtttttagagatttatgatattgttttatttttaattttaaattttttggggttttattcgttggttttagttacgtgaagtagttatcgtagattagagggtattttttagatttaggttattttattatttaggttggagtgtagtggtataattatagtttattgtagtttcggttttttgggtttaagtgatttttttattttagttttttcgaggatacgtggttttttttttttttttttagatagggttttattttgttttttaggttggagtgtagtggtgcgattttggtttattgtagttttcgtttttcgggtttaagttatttttttgttttagttttttgagtagttgggattataggtatgtattattttatttggttaatttttgtatttttagtagagacggggttttgttatattggttaggttagtttttgaggatatatttttttttttttcgagatggagtttttttttgtcgtttaggttggagtgtaatggcgtaattttggtttattgtaattttcgttttttaggtttaagtaatttttttgttttagtttttcgagtagttgggattataggtatgcgttattatgtttaattaatttttgtatttttattagagatagggttttattatgttggttaggttggttttgaatatttgattttaggttatttattcgttttagttttttaaagtgttggagttataggcgagagttattgcgtttagtcgaggatatttttttttttttttttttaagatagaatatcgttttgttttaggttaaagtgtaaaggcgtgatttcggtttattgtaattttcgttttttaggtttaagttgtttttttgttttagtttttcgagtagttgggattataggcgtttgttattatgttttgttaatttttgtatttttagtagagatggggttttatcgtgttggttagattggtttcgaatttttgatttcgtgatttattcgttttagttttttaaatgttgggattatagatgtgagttatcgtattcggtttggtagaggatattttttaaggttaaagatagtagtagaggtggagtttttgggaatagggttatgaggggaagagggggttcggagggagcgagtagttattggttatttttagaaagggaaggttttggtgtaatatcgtttttttgtagttttatttatttttgttttttgtttttttattatttaatcgggtaggtaggatagggtttgagggggtagggatttagtgggtgtttttttagattaattttagtttaggatttttagagttttttttttgaggttttgttgtttttaagtttagattggggattttaagtagtacgtaggtagagttagtgaggttttcgttagttttattgaaagttttaaaattagcgaatttttagtttagttttaggttaggtatttaggacggttttagtttttatgggtgagttatttttgcggatattgtatagggtttacgatttatcgttgtttttcgaggatgttagttaggttttcgttgagataattgtttttttgttggataaggttgggattagttatttcggtgatagttttagaatttttggtttgggttgttgggtttaatggaaaaaggttgtgattagagttagggggatggttttagtgattttaaggataaggttagatttttgtattgttagtgatttaaagtaataggtgtttagagtagtagtgtggcgtttttacgtttttatatattagtttaatttatttaggatagggattgtagttttagtatttaatttatgtgttttgtgtggggtttttttttattgtatttataggagaggaagggttttttaggggtttattggggtttttttttgtaaatggggtaaggagaggggtaaggggttgttttaaggtttttggagtatatgtaggttttggattggggtttttgggagggttatgattttgggttttatgagtttagagtagacgttttgtttttttttgtttattgttagttattttatttttttttgatttttaaaagaattaggaaatagtatatgatttgttggaaggaggtatttatttttttttttttgtgggtgtggggaggggattatagggtatatattttattttgggatttagttgagtaggggggttagagatgatagttttttcggtttataggttatcggtttatatatagggtaattagaagaaagaaatagtataaggaaggtatagagggagtcgttgtttttgttagaggtgtagtatttcgggaatgttttttatttttttcgtttttttgttttgtttaattttgattaggtgtagaaattttgttaagtgttttcgtaggagttgttggtaattgttttatatttttggttttggtaaagaatgaattaatttattttagattttataaatagggttatttaggtgagttttttattcgttatttttttttttatttttgttaggtttagtagttattatagcgtttgttttttcggttttgaaattatgtttttaggttttttgtggttgggtttagttttgttgggggttttgtatgtttaggtttaggattttattttagatttgattttagttttatttttgagtaaggtttttttgtagtagaatttttaggataattaagtaaggggttaagaggggtatttgtaggtagggtttggggaagagtgggagtagaggggaggagaggtgaagagatttaggaagagcgttgggtaggattttaggagtttagggtttaggttttagtttattttgtgttattagggttttttggtggaaattatgttttttgtttttatgtttattttttgtgagtttgaatatattttttttttgtgttaatatagtttataataaatgttttttttttttttagtttgaatagatttttttaggtttatatttttttttttataatttttattgtttaaagaaggtgggagtatttttagtttttttgtatagatgaggaaattgaggtttaggaaggtttattagttatatgttttttttagtgaggaggttatttttttttttgttagatttagaatcgtttttttttttaggatttttttttggattgatggttttttgtttttgtttttttattagtgtaggtttagtttgggttttgttgtttagttagaggggtttatggttttaagttgggcggtttagaggtgttatagggatagagttggaggggtggtttttagggttatttttgggttgtgttttttattagttttttgtagt

SEQ ID NO: 1136 - DNA, 5774 bp, Artificial Sequence
  chemically treated genomic DNA (Homo sapiens)
attgtaagggattgataagaggtataatttaggaatggttttaggagttatttttttagttttgtttttgtggtatttttgggtcgtttagtttggaattatgagtttttttagttgggtagtagggtttaggttgggtttgtattggtgaaggggtaggagtaggaggttattagtttagaagggagttttgggggaagaggcggttttgagtttggtagggaggagggtgatttttttattggaggaggtatgtggttggtgggtttttttgagttttagtttttttatttgtgtagggggattaaaagtgtttttattttttttggataatgggggttatgggagaggggatgtggatttgggggagtttgtttaggttgagaggaaaaaaaatatttattataaattgtattggtataaaaagaaagtatgtttagatttatagggggtgggtatgggggtaaggggtatggtttttattaggggattttggtggtatagagtgagttgaaatttggattttggatttttagagttttgtttaacgttttttttgagtttttttatttttttttttttttgtttttatttttttttaggttttgtttgtaggtgttttttttggttttttatttggttgttttggaagttttgttgtagagggattttgtttagaggtggggttgggattaggtttgaggtggagttttgggtttgggtatgtagagtttttaatagggttaggtttagttataggagatttaggggtatgattttagggtcgaggaagtaggcgttgtggtggttgttgggtttggtaggggtggaagaggaggtggcgagtgagaggtttatttgggtggttttatttatgggatttagggtgggttgatttattttttgttaaggttaggaatgtgaggtaattgttagtaatttttgcggaaatatttggtaagatttttgtatttggttaggattgggtaagatagagggacggggagagtgagggatattttcggagtgttgtatttttggtagggataacgattttttttgtgttttttttgtgttgttttttttttttgattgttttgtatgtgggtcggtggtttgtgagtcggaagagttgttatttttgatttttttgtttagttggattttagggtggggtatgtgttttgtggttttttttttatatttatagaaaggaaagaatgaatgtttttttttaatagattatgtgttgttttttggtttttttaagggttagggaagggtggggtggttgatagtggataaggaaaaataaggcgtttgttttgaatttatggagtttagaattatggtttttttaggagttttagtttaggatttgtatgtgttttaggggttttgagatagttttttgtttttttttttgttttatttgtaggaggggattttagtggatttttgagggatttttttttttttgtgagtgtagtgggaagagattttatatagggtatatgggttgagtgttgaggttatagtttttgttttgggtgagttgggttgatgtgtgggggcgtgaaggcgttatattgttgttttggatatttgttgttttgggttattgatagtgtaaggatttggttttatttttgaggttattgagattatttttttgattttagttatagtttttttttattgaatttagtagtttaggttaggggttttggaattgttatcgagatggttggttttagttttgtttagtagggaagtagttattttaacgggggtttggttggtattttcgggaggtagcgatggatcgtaggttttgtgtagtgttcgtagagatggtttatttatgagggttgaggtcgttttggatgtttgatttgaggttggattgagggttcgttggttttagagtttttaatgggattaacggggattttattggttttgtttacgtgttgtttgggatttttaatttgggtttgggggtagtagggttttagggaaggggttttgggagttttgagttggggttagtttagagaggtatttattggatttttgtttttttaggttttgttttgtttgttcgattggatgatgaaagggtaggaagtaaagatgagtaaaattgtaggggaacgatgttgtattaaagttttttttttttagaggtagttagtggttattcgtttttttcgaatttttttttttttttatgattttgtttttaggaattttatttttgttattgtttttgattttaaaaagtattttttgttaggtcgggtgcggtggtttatatttgtaattttagtatttgggaggttgaggcgggtggattacgaggttaggagttcgagattagtttggttaatacggtgaaattttatttttattaaaaatataaaaattagtagggtatggtggtaggcgtttgtaattttagttattcgggaggttgaggtagaagaatagtttgaatttgggaggcggaggttgtagtgagtcgagattacgtttttgtattttagtttggaatagagcgatattttgttttaaaaaaaaaaaaaaaaaggtattttcggttgggcgtagtggttttcgtttgtaattttagtattttgggagattgaggcgggtggataatttgaggttaggtgtttaagattagtttgattaatatggtgaaattttgtttttagtaaaaatataaagattagttgggtatggtggcgtatgtttgtaattttaattattcgggaagttgaggtagaagaattgtttgaatttgggaggcggaggttgtagtgagttaaggttgcgttattgtattttagtttgggcgatagagggagattttatttcggggaaaaaaaaaatgtatttttagggattagtttggttaatatggtaaaatttcgtttttattaaaaatataaaaattagttaggtggggtgatgtatgtttatgattttaattatttaggaggttgaggtaggagaatggtttgaattcgggaggcggaggttgtagtgagttaagatcgtattattgtattttagtttgggagatagagtgagattttgtttgaaaaaagaaaaaaaaaattacgtattttcggggaggttgaggtgggaggattatttgggtttaggaagtcgaggttgtagtgagttatgattgtgttattgtattttagtttggatgatagagtgatttaaatttaaaaagtattttttagtttacggtgattgttttacgtagttgagattagcgggtggagttttagagaatttgaagttgggggtgaggtagtgttatggatttttgaggatttaggattttagggtatgaatgtggtgggtgagtagggtattgggtttatagtgggaagatattagagttaggtgtagaaggggagatagtttcgtttgggggttttttaggttggtttgaagtttggttttttcgtatgtatgtagatttttgtttagtttttatataaattaggcgtttttttgtagagagggtagttttgcgtttttgtgaggttatgtatggatagtatcgggttttagggtgtttttatataaggttgagtttttgattaaatttatgtagggtttatttttttttttgtattagttttagatttgttttttatttattggttttggttttttttagagtttagtagggttgtagggagggggttagttttatatagatttattatataagttttaggatttagtattaggaaggttgggtaaggattgtggtgtagattttttatttagatttgatcgattttaagggttttagggttaataggatattggggttttattttttatttattttttttttattgggttttatttattgggttttagttaatgagggtatataagtgtttatattgtttagcgtttgggggagtttttggatttcggggtttttgggataatttttacgatacgtgtggtattgtgtatggtatgataggtatttatttgttttttttcggttttttttatggtttttatcgtggtttttggattgggtttgtttttttttaaggagttgtaggtgtttttagtgagtttttaacgagttatatagaagtaatggggttaagttttttttgagaggagttgggttgggtttttaagttttgttgtgtaggtcggtttagtaatagtaggagtttaaagataggtttttgtttgggtttttcgtggttagagattagaagtatttcggttgttttcgattttttttcgtagtttttggtaggtagttgtttttattttttacgtttaagagtgggtgttttttggagattgtagtagtttgtttttttatggagaggtttaggttttatttatgtatgaaggtagtaagatgttttttggcggtttttatattttaggaatttagtttgattttttattttggttttcggattttgtgagtagtgtttagcgtggttatgaatggttaattttttgacgtgtttgaaggttgggtaggaggtgattggttaggtttttaggagttaggtattatatttggaaggagtttatagttaagatgtttttaggaggtttagttatagatgtaggaagttttggtgtttgtagattagttttttttggttacggtaggttcgggttgggtattcgatttttaaatatttaggaacgggaggggttgtttagtgtgaggagtttgttttgttagggttttgggttgagttttttgtttttagaaatagttttttaatttttatttttttttatgttaaggttcgttaaggggttttgaggtttttttgttttttttatttgatagggattttgttcgtttgtgaaaatttttttttaatttttttttaagtatatttattggatttttttttttggtgaatttttggggtttattagatagggggaagcgggttttgttgtttgaggtttaggtttagggtttttgttggttttattttttggtgtttggtttaggtatgttgtttagatgggtgttttgttttttattttagagtttggatttttatgcgggtaagagggtttataatgattataggtggtagcggagtggacgttaaggttttgagtagggtttagggtggatataggtagcggtaggtagtggtggatgttaggtttttatggagttgggtcgtagtttttttgttataggtttttgttttatatggttttggtgttgtttaaaattaatgttttttttagttttgtattttttttgttcggattgtagtttttagtattttaggaaaggggtatttttattgcggttatttttgcgttattttatatgttttcgtgttttttgttttttaggtttttggttgggttttcgttggtattattagaggtggttgggtgagaggatcggtttggtttttttgaaagttggttttttcgagagtttaggatagtttaggagcgtgtttagtttagggggtagggtaataggtttcggaagggttaaatgagattaaatgtttttgaagatatttttggttttagaattataatatatagttttttgtttggagtttttttggtgttttgcgggggttgaggatggaataggttgtagtttttatgttttttattttattttagtggtggatggatatcgtagatttagtttttatttttttttggtagtacgtgtttattttagttgagggggtgggttttat

SEQ ID NO: 1137 - DNA, 6134 bp, Artificial Sequence
  chemically treated genomic DNA (Homo sapiens)
taatgtaaaatatttttaatttagttatgaatattttgagttattgtaaaagttgagtattgatttaaataaaagggtattataaattgttttggaggatgatgggaaggttaatatgtatatgttggattgggggatgtgagagggttaaatatttattttttaagtaggaaggaaaaaatatatgaatatatatatatatatatataaatatatgtaggtatttgaatttaattaagatatattataagtataatatttagaaatatgtaataaaataatagaagaattagttaaaattgtttaaaatatttggttttagggaatgggaattagaggtgaaggagtgtgtcgggagattggtgttttatgagaagttttgaggtaatatttgatttttaaaattaaatatatatattattttgattaataaattaaagaaaatatatgtttatacgtataaaatgtatataaatgttaattgtagtatttttataatattaaatagtaggtagtatttaaatatttattagttgatgagtaaataaaatgtgatatatttatatagtggaatagtatttttttataaaaaggagtgaaggttaggtgtagtggtttatgtttgtaattttagtattttgggaggtcgaggtaagaggattatttgagtttaggaattcgagatcggtttggttaatatgataagattttgtttttatagaaaaaaaaaaaatttaaatatttaggtgtgatggtgcgtgtttgtagatttagttatttaggaagttgaggcgggaggatggtttgagtttaggagtttaaggttttagtaagttataattatattattgtattttagtttgggcgatagagtgagtttttattttaaaataaatgaataaataataaaatgaagtagtgatatgttataatatggatggattttgaaaatatgttaagtgaaagaagttcgttataaaagagtatgtattgtgtaattttttttatatgaaatgtttcgaataggtaaatttatagagagagaaaataaattagtggttggttgtggttgggaatttgggagatgggggtgaatggggaggaatttttaataggtatagagttttttttggggatgatgaaaatgttttggaattatatagtgtaattgttgtataattttgttaaaatataataaattattgaattgtatattttttaaaggtgaattttatggtatgtaaattatattgtaatgaagttattattttaaaaattaaagaaaaaaattaataattatatttaatttatagagttgttgtgaggaataaatgaaataatggatgttaggggtttagtttagagtttgacgtaaatattaagcgattagttaatacgtatataggatatattacgtgttaggtatttttttaagttttttatatatattaatttatttattttttgtaataattgtttaaaatagatattgtttttatttttattttatagattaggaaattgaggttagtgtaagtaattaatttgtttaagattatatagttagtataatagtagagttggaatttgattttagttagttggtttagtatttttattttttattattttgatgttttttttttttgttttttaggttttatgtttgggttagtgttgtgtgtttttagggacgttgtttttcgtttgttgtgtttttaagtagataattttttatttgttttttttttttgtttgtgtttttaattatagtggatattttataatggtaaggattgtatttattttaatttatttttattttttgtttatgatatgttgggatgagggtgggttgtagagtgaagtaaaggtgtttttttttttatataaattttatgagtgtatggagaggaagtggggagagttgaagatgttagtattaagatgttagagaaatacgagataattgatggagtaagatatttaaggaagtagaatattaagagtgagatagtgttgaaatattgattttgggaagaaagaagaatgtcgtttttattaagattgaaagagaggaggaagaggtggatattgtggaagtagagaggaagtttatattagacgatttggattattttagttaagaaggggtaatagaagaattttgggttaggataaagtataggagggtgaagtggaaggttgaggtaagaggagagagtttagaataaatatttaattttttggggtttgtgatttttttattaatataatggattttttttttagaaaaaaagtatatatatataaaattgtgtatttagttttaggggtttatggattttaggttgagaatgtttgtttttaagatttagtaaaattgaatagaagtatttttgaaagtaatttgaagttaagtattttgattttttagtattttaagtttgtgtttttgtgattttttttagtaatatttagaggtttgagagtagtaggtgatttgatatttgggattgaggttagaggttttagggtaggagagggtgggatgaagtttgagagggtggtagggtttagaggaaggtaaaatttaggttaggaataggtggtagtggaggtttatagagggtgggttgagaaaggtttatttcggttttaggttataagggggcgtattgtttgtatagaatataaaaacgtaagaaaattaaaagttagttttttgtttattagtattatgttgtataagtaatttaaaatattaatagtaaaaaaatatatttttttgaaaaagttttggtttaggatttaaataattgtttgaaattgggtagatttatattaatgagaggtagataaagagattaagattgagggagtagggtagggtttgtaatggtgtcggttaggatgtggttgagggggtgtgggtgtttgtcgtggatgttagggtagaagacgattttattaattgggtggttgtaagtagtatttaggttaatgttttttattttttataatttcgacgttgtttggaattttaaatttttttttttatttaataaatattatttttgtttaaatttgtaattgttttgatattatattgttttttttatttttttattatagatggtatttatttatttatatgttttttttttattagattatattttttgagaatagcgattgtgttttatttatttttgaattattaatttagataggtatgtaaatatttgttgaattaatgtataaatatattttgtttttttttatagattttttcggttttagatgattaggtattattagatatagaatattgtgttttttttttttaaggtaaaggaataaatatttgtttttttttatgaagtgttattgttgggtttttatgttattttgaagttattaggatgtggaattagattagggaggtttatagttataattttttgtatttgtaatattagtaggatattatttatagagttttgttgtagggtttcgaatgaagatagtattttgttgttttgtagcgtgagtagtgttgtaatagtgatgtatggatgtttttttggtgttttgaaagaatgtaggtgttttttgaaagttttttgtaatttattaattgggagtgattatgcgatggagaaaatagagttttattatttttttagttttttttgggaaattataagagggttgatagttttttgtgaggtgaatcgtttttagaatttttatcgtttcgttttgttttttcgtttatttagttttttaagatagtttttgtgggtttttgatgaagttattatattattggttaatgaagtagataaattagaatagtttggtttaatatttaaggttagaaataggaattttttagaggagaaattaaaaaagtaaaagaagtataagggtagttttttaattagttagaatatcgtgattatttgagaggttcgtggtttagcggatacggacgtatgttaattttggagtagatatttttagcgtagtatttgatttgggagtatagttatatatttttatttttaaacggtagattgattattggagttatatatagttttcgggtaatgtggagatatgtttaatatttagttaatataatttagggtgttatagtttttataattgttgtgagtatttgaggatgttttatttgaagataggaatttgtttttaagtatttggggtttgggtatagaatagagttttttttgttattatttgttaattttataaaatgtgtatttaaaaaaaaattttgtttgtaagaaggaattaagttatttatttaaatataatagttgtttgtgtaatttattgttgttttttataggaaacgtttaaataattgagatatttaattgggttaaagagatttttagtatatagatgttttataaataaaagaatgagtaaataatttagtaatttttttttttatgttttttatttaaagagatcgttttgttttgtttgtattaataagattattgttagaggattttagagaggtttgattttaggtggggtggggtttttttaaggaagtttttttttatttgttttaggtgtattgttatttttttttttggtttttttattaaaaatgaaaaatttgttgatttttgttgtaagtaggtaggtatttgggttttgtttttgtaattagagttaaagaagttaagttattaggttgattttgttttgttatttagaattagaaaggtttaagtagtttagggattatttaaagatagttggaggagaaagggagagagaaaaatgtttataaagaggtgggtaaaagagcgggattttgttttaaaaaaaaaaaaaaaaaagaggaagtggtaggaggtgtttgaattttattgtgatttgttttgttaggtgatttttggtggggcggggatatgaaaaaaaagttaaaatgtttttataaagataaaattttttttttttttggttgatgatttgttattttagttattttttgttttgtgattatatatttaggtttgataaagttgttttgtagattagaaagaaggggtttttggttatatattagtattattaaggatagttttttttttgtaaggtaaatgttttttatgtgtttttgttggttttaagcgtttgtgatgtatttcggtattgtttttgtggattgtgggttttgtttttaggggattagagatttgagtatgttatttgagatttttgtgatttttgttattgtttaattggttaggatatttgtcgttatttcgcgtggttatttaagatggagtatttcggttttttgggttgggttttttttaatttatttgtagttattatttttgtttaaaattaaggtttttttttttttttaaaattaaattatgttttggtttatttttattgttttattttacggaggttatttattgtgattttattttttttaaaatgtttttaggaaaagcgcgtattgataatttagattgtatggtttattggtttaatgggggtagtttaattttagtttttgcggttttgtttttttaaaaaatttttttatagtattttagtggataaattatttagagttatatgttattgaatgtgatattggttatttgagtgatttttggcgttaagggtttttaatgggtgtgttttataattatatggaattagaggtttttttttttttatttgttttttaaaaataaaagtaatttgtataatgtttaattgtagtgtttttgtaggattgtttgaattatttgttatgtttatgattatattaatgaatatttatttaaattttgggagaaaggtttttatttataatagaaatttttatatagttgatatgggatatttattttagaaattgtttaaatatagatattttggattttgtagtataagtttttatttaattattattattatataatattaagaattattgataaatgataattataaaagttatttagattggaaatgcgaatattaattaggatgtttattaaaatcgaattttttttttatatagtaatttgttttttaaaattattttgttagaatta

SEQ ID NO: 1138 - DNA, 6134 bp, Artificial Sequence
  chemically treated genomic DNA (Homo sapiens)
tagttttgatagagtaattttagaaaataagttgttgtgtaaaagaaaagttcggttttgataaatattttgattaatgttcgtatttttagtttgaatggtttttatagttattatttgttaatggtttttagtgttatgtgatagtggtaattaagtaaaagtttatattataaaatttaaagtgtttatgtttgggtagtttttgaaataaatattttatattaattgtgtaaaaatttttattgtagataaaagttttttttttagaatttgagtgaatatttattgatatggttataagtataataaataatttagataattttataaaaatattataattaagtattatataaattgtttttatttttagagaataaatggaaaagagaaaatttttaattttatgtggttataaagtatatttattaaaaatttttggcgttaaaaattatttaaataattagtattatatttagtaatatatgattttagataatttatttattaaagtattgtaaagaagttttttagaaaaatagaatcgtaggaattaaaattaaattatttttattgggttaataagttatataatttaaattattaatacgcgttttttttgaaaatattttaaagaagataaaattatagtaaatagttttcgtgaaatagagtaatagaaataaattagaatatggtttggttttaaaaggaaaaagaaattttaattttgggtaggggtgataattgtagataagttgagaagaatttagtttagagagtcgaggtgttttattttggatggttacgcgaggtggcggtagatgttttggttagttagatagtggtaggaattatagaggttttaggtgatatgtttagatttttggttttttgaaggtaaaatttataatttatagaaatagtgtcgaagtgtattataagcgtttaaaattaataaaaatatatgaagaatatttattttgtaggaaaaaagttgtttttggtagtattggtgtatgattaggaattttttttttttgatttgtagaatagttttgttaagtttgggtgtgtggttataaggtaggaagtgattagaatgataaattattagttaggaaagaaaaagattttgtttttataaggatattttaattttttttttatgttttcgttttattaaaaattatttgatagaataggttatagtgaaatttagatattttttattatttttttttttttttttttttttttgagataaggtttcgtttttttgtttatttttttataagtattttttttttttttttttttttttagttgtttttgagtagtttttgggttatttaaatttttttgattttagatagtaaggtaagattagtttgataatttgatttttttgattttagttgtaaaagtaaagtttagatgtttatttatttatagtaaagattaataaattttttatttttagtgaaagagttagggaaaaaggtggtagtatatttgaaataaatgaaaagggatttttttgggaaagttttattttatttgaaattaaatttttttggagttttttaatagtgattttattggtgtaaataaaatagaacgatttttttaagtgaaggatatgaaaaggaaggttattagattatttatttatttttttatttatagaatatttatgtgttagggatttttttaatttaattaagtattttaattatttaagcgttttttataaagagtagtagtagattgtataggtagttgttatatttaaatgggtagtttaatttttttttataggtaggatttttttttgaatgtatattttataaaattagtaggtggtggtaggggaagttttgttttgtatttaaattttagatgtttgagggtaaatttttatttttaaatggagtatttttaagtgtttataatagttgtgaagattgtggtattttgagttatgttgattaaatattagatatgtttttatattgttcggagattgtgtgtgattttagtagttaatttgtcgtttaggaatgagggtatgtggttgtatttttaggttagatgttgcgttgaagatatttgttttagagttgatatgcgttcgtgttcgttgggttacgggttttttaggtggttacggtattttgattggttggagggttgtttttatattttttttgtttttttgattttttttttagaaagtttttgtttttgattttaaatgttaaattaaattgttttggtttatttattttattagttagtggtgtggtgattttattagaagtttataggggttattttgaggaattgggtgggcggaagaataggacgagacggtggggattttagaaacggtttattttatagagagttattagtttttttgtgattttttagggaagattgagggggtgatgggattttgttttttttatcgtataattatttttaattaataagttgtagagagtttttaagaagtatttatatttttttaggatattagaggaatatttatgtattattgttatagtattgtttacgttataaagtagtaaaatgttgtttttattcggggttttgtagtaggattttgtagataatgttttgttggtgttatagatataaggggttgtaattgtggatttttttgatttggttttatattttggtggttttaggatggtataaaggtttaatagtaatattttatgaaggggaatagatatttatttttttattttggagaaggaaagtatagtgttttgtatttagtggtgtttggttatttgaggtcggaggaatttatgaagaagagtaaaatatatttgtgtattggtttagtaagtgtttgtatgtttgtttgaattggtgatttagaaataaataagatataatcgttgtttttaaggagtatagtttagtggggaaaaaatatgtaagtaaataaatgttatttataatagaggggtgaaaaaggtagtgtgatattaaagtagttgtagatttgagtagaggtgatgtttgttaagtgaagaaaaagatttaggattttaggtaacgtcgaggttgtagaagatgaaaggtattgatttgggtattgtttatagttatttagttaatagagtcgttttttattttagtatttacggtaggtatttatatttttttagttatattttggtcggtattattgtaagttttgttttatttttttaattttaatttttttatttgttttttattggtgtaagtttatttagttttaggtaattgtttaggttttagattaagatttttttagagaagtgtatttttttgttgttggtgttttaaattgtttgtgtagtatagtattagtaaatagaagattgatttttggtttttttacgtttttatgttttgtatagatagtgcgtttttttatggtttgaagtcggagtggattttttttagtttattttttatgagtttttattgttatttgtttttggtttgggttttgtttttttttaagttttattatttttttagattttattttatttttttttgttttgaagtttttggttttagttttagatattagattatttgttatttttaggtttttaaatattgttgaggaaagttatagaaatataaatttggaatgttaaaaagttaagatgtttgattttaaattatttttagaaatatttttatttaattttattaagttttgagaataggtatttttaatttggagtttatagatttttaaaattaaatgtataattttgtgtgtatgtattttttttttgggagaagggtttattgtattagtaaagagattatagattttaaaaagttgggtatttattttaaattttttttttttgttttaattttttattttatttttttatgttttgttttggtttaagatttttttgttgtttttttttgattgagatgatttaagtcgtttggtatgagttttttttttatttttataatatttatttttttttttttttttttagttttaatggaagcggtatttttttttttttttaaggttagtgttttaatattattttatttttaatattttatttttttagatattttgttttattaattgtttcgtgtttttttagtattttaatgttagtatttttagttttttttattttttttttatgtatttatgggatttgtatgaagagaaaaatatttttgttttattttgtagtttatttttattttaatatattatgggtagggaatgaagatgaattaagatgggtatagtttttgttattgtagaatgtttattgtagttgaagatatagataaggaaaaaaggtaagtgaagagttatttatttggaagtataatagacgaaaagtagcgtttttaggagtatatagtattaatttagatatgggatttgggaggtagagagagggagtattaaagtggtgaagagtaaagatgttgggttagttggttggggttaagttttagttttattgttgtattagttgtgtgattttgggtaaattagttatttgtattggttttagttttttagtttataaaatgggggtaagaatagtgtttattttagatagttgttgtaaggggtaagtgaattgatatatgtaaagaatttagaagagtgtttggtacgtagtatattttatgtacgtgttaattaatcgtttaatatttacgttaggttttggattagatttttaatatttattattttatttattttttataataattttatgaattaggtatgattgttaatttttttttttaatttttaaaataatggttttattgtaatatgatttatatattataaaatttatttttaaaaagtatataatttagtggtttgttgtattttaatagagttgtgtaataattatattatataattttagaatatttttattatttttaaaagaaattttgtatttgttagagatttttttttatttatttttattttttaaatttttagttatagttaattattagtttattttttttttttataaatttgtttattcgggatattttatataaagggaattatataatatatgtttttttgtgacgagttttttttatttagtatgtttttaaggtttatttatgttgtaatatgttattattttattttattatttatttatttattttgagataggggtttattttgtcgtttaggttgaagtgtagtggtgtgattatagtttgttgaggttttgaatttttaggtttaagttattttttcgttttagttttttgagtagttgggtttataggtacgtattattatatttggatatttaaattttttttttttttatagagatagggttttgttatgttggttaggtcggtttcgaatttttgggtttaggtgatttttttgtttcggttttttaaagtgttgggattatagatatgagttattgtatttgatttttatttttttttatggaagaatgttattttattgtatgaatatattatattttatttatttattagttgatggatatttggatgttgtttattatttgatattataaaaatgttgtaattaatatttgtgtatattttgtgcgtgtggatatatgttttttttaatttattaattaaagtaatatatgtatttggttttagaagttaaatattattttaaggttttttatgaaatattagtttttcgatatatttttttatttttgatttttattttttagaattaagtattttgaatagttttagttaatttttttgttattttattatatatttttagatgttatgtttatggtgtattttgattgggtttagatatttatatatatttatgtatatgtatatatatgtttatatatttttttttttttatttgagagataaatatttgatttttttatattttttagtttaatatatatatgttaatttttttattattttttagaatagtttataatatttttttatttaaattaatatttagtttttatagtaatttaaaatatttataattgagttaggaatattttgtatta

SEQ ID NO: 1139 - DNA, 9447 bp, Artificial Sequence
  chemically treated genomic DNA (Homo sapiens)
cgttttattggatttttttatgtggtggagttttttgttatttataaggattttaggtatggagggtgtttttattgtttgttttaaggatggaggggaaaattgttttttttttttgtgaggatgatagttgtagtttttgtttttatgtaggttttttaggaagttttaatagtaagggattttagtttttggtgataaatttgagatgttaaaaagttggtgggagtgaggttgggtggatacgggtaagggtatttttagattgtttgtggtgtttgtgttacgttagtattttttttgggttacgtgttattattttatttttttttttatggttaggattttttgtttaagttaaatttaaataagtatttttttttatttattttttaattttttgtgttttttttttaagaaggttaatatattttcgtttgtaaagtttttgttttttatttttttcgtttttaagtattaattttttagattttttttttagttttatatatagaagttgtaatttttaagttttttttaaggaattgtgtatttttttcgtttttagaattagcggtgaaggaaggtagttatttgtttatatgattttgttgtgggttagatggaaagggagggagttgggagtttggacgtgatgggtggggtggggaggagatttaggcgatgttttgggttgtagtttgttgtttttatatttatttttataatttgatatagtttttttgtaggtattgtttttttgtttataggttttattggttgtgtagtaaaggtttttattttttggtcggacgtggttgtttatatttgtaattttagtattttgggaggtcgaggtaggcggattgtttgagtttaggagtttgagattagtttgggtaataaggtgaaattttatttttattaaaaatataaaaaattagttgggcgtggcggtatgtgtttgtagttttagttattcgggaggttgaggtaggagaattgtttggatttgggagggggaggttgtattgagtagagagggtattattgtattttagtttgggtgatagagtgagattttatttttaaaaataaaaataaagaaaaattatttttattttatgagttttgtttttgtgtaggagtagaatgttgttttttttttttttttttttgagagggagttttgttgtgttatttaggttggagtgtagtggtgttatttcggttcgttgtaattttcgttttttaggtttaagtaattttgttttagtttttttagtagttgggattataggtatttatgttattacgtttggttaatttttgtatttttcgtaaaggtaaggttttattatatgggttagattagtttcgaatttttgattttagattatttatttattttggttttttaaagtgttgggattgatttataacgtgatttataggtatgatttattgtgtttagtttttagaatgttgtttttattttgtttagaggttgtttatttttttttaaattttgagttatgtattataaagtttaagaaggtttttgtaatttcgtttttcgttcgtatttgcggagttttttatttggttgggggagggagatagatatgggcgagggtatttttattattgttttaaattattatgttttattggatttttattttttgttttgttttatgtttgaagttaatagatagatgttgtatatttagttgttgtttttggtttttatggttatggtagttacgttgtcgggggttgtatttagaggttgtttttatggtcgttttattttggaggtgaggggtttgcggttgagtttgtatagggttatagtggtttttttggttttttgagttttttttgggggttaattagttcggtttttggagttttaggaattcgttagttagagataggagatgtgaaattcgtgagtgttgggaaattagtaaggtttggggaagaggaaagtttttaggtttgaagtaatatgtttttttttgtattagttgttttttttgaggaatgggtttgtggttttgtggggagggggtattaagtgttcgttttatgtagagtgttgtattttttattgagtttgtttagattgataatttttttttttttttattagaggttatagagaagaaattgcgtaggttttggagatagattgggtttgaattttaagtttattttaggtagtttttgtaatattttagagttttaaggtggtaaatggttaaggataggggttttggatttagattaattttggaagagttttggatttattttttatttgttgggtttagggggtaagtagtttattttttggagttttaatttttttttttgtagagtaggagtaataatagtgttaataattaagatagttagtaagaagtttttagtttgtgttttttggattataggaagagtttaaggtatcgtgtttttttatgttttttaaagttattattattgttatttaggttttttagttgttttgtttgttttttaaatgagttttatggattttttattttggttatattaattggataattttttttaaaggagtttaatatttagtgatatttttattataattgtttttttgtagattttttttattttgagtggggtgaatattattaagaaaattaggttagttttggtggtttatatttataattttagcgttttgtaatgttaagatgggagggtcgtttgagattaagagtttaagaatagtttggaaaataaagtaagattttatttttataaaagagtaaaaataaaaaaattagtcgagtatggtggtgtatgtttgtatttttagttatttgggaggttgaggtgagaggattatttgattttaggagttcgaggttatagtaagttataattgtgttattgcgttttaggttgggtaatagagggaggttttatttttaaatataaaataaaagtaaataaaaaggagaaattaaaataaaataaagtaaaattgtttttatttttaaggatgatttggaatgtttttttttataggtggtatgtgttttgagagatagcgagagagagattgattgatttacgttaggaatgtttttttttttattttattttttacggttttgtttaaattttagttaattttatgatattttttgtgtttattttattttaaagtgatttttttttttttttttttttaaatggttttttattgtttattgttatgttagtgatttgaaagattaggtgattttttattcgtgatggagtttttgtatagtagagttgtgttttatatagaatgattagttataaagagtttttaggtgcggtttaggtataatggtttacgtttgtaattttaatattttggaaggtttaggcgggtagattatttgaggttgggagttttaggttagtttggttaatagggataaatttcgtttttattaaaaatataaaattagttgggcgtggtggtgtatgtttgtaattttagttattcgggaggttgaggaaagagaatcgtttgaatttgggaggtagcggaggttgtagtgagtcgagatggtattattgtattttagttcgggtaataagagcgaaatttcgttttaataaaaaaaaaaaaaaaaaaagaaagaaagaaagaaagagagaaaagaaaagagtttttaggtgtgaggttttgtaaggagtaaatggtttgggttatttttattgatgtttttagtattttttaaggtgaggttaatattagtttatattgatgagttagtgttgggtttggagtaaaatgtgtattttatttaagttgtttattagtttgtgaggtaggtgtattatcgtgacggcggggttttttagagtgtgtataagaagaaaattgtgtatggttaaagttatgtttgaaaatttttaggaaggtattattttaaggattaatatagtattatttagtaaaggtaatagttttggaatagatgattcgtgtgtgtgtgtgtgtgtgtgtgtgtgtgtgtgtggtattagatgaagtagtaatttgtgtttagaggttgttttattgtataaatatagttgtttttatatattggatttattttttgttaataagttgtttagttatgagaaatgaataatgtttgaaattaagaaaatagtaaatttttattttttatttttagggaatgtgttttttggttagaatatatggtagaattaatagtgaataaaatatattgtggaaataatagtgaatggaatatatgatattattaatagtaattgttaagttttttttttttttaatttttttttttaggtttgtttagttgaatgtatttaagttttatgtgtatatgaagaattattgtttttttattatatagatttggaaattgagatttttagtttttaattttttgtttaaggttgtatagtatagaaatagttatattagaaattgagttttgtttgtatagtgtagtattttgtttagttttgggtgtttgatttatttattttttgaggatttttttatgataattgtaaagaggtagttgaaagaattttagtttttgatggtgggaggggaaagtggttggaaagtattaaaaaaatatgttttagtagtttattgatgtgggaaattgtttgtattttaggttaatcgttaggatagattttggtttgtaaagttttagttgagtaagaatgtagtgtagatatatgggtgtttagagtttaaaggaaaattatttagatttatattggagtttaagatttttttattgttttttttattgggttggggtgattggagttagtggggaattattaattttgtggttttttttgtattttaagtttttagagttgggtttttttgtttatttatttagagtttagtagaggaagtggtaaaggaaattagttgagtcgttttttgagaagagattatatttgttcgtagaggaagtcgttgttttttgggatttggttacgttagaaaagatatcggttttaataggggtgttttatagggtagttgggagttggaagagttaagaacgttttcgagttttggatttgagtttttttgtttatgggtgaagcgtttatgtttagtttgtgagttttttttcgggagagtagttatggtattgaggaatgtgttttttcgtttagaggttttgggttgggatttcgatagttttgttgattattttaagaaggtaagttttgtttttgtgtgaatggttatgatgttagtgtttttggtgggttgagttgaggtttgacgatggaattggggtagaatgtgggaggtgtataagatagtaatggaattttatggtaattttattggttgagtgagcgttatatagatcgttgagtttttttgattatgagtttcggagagaaggatgggagtagaagtttttaaatgagtatgtgtttattatgtgttagggtttgaattcggtgttttataggtattgttttatttagcgttttttattatgttgtgaggttagtattgttatttttttgatttagttgtaaaattagtttagggaagtgaaatggttcgaagttttagggattatatgtgatagaggtaagatttaagttatatttatttggttttaaagtttatgttttgagatgtagagaattgttgtaattgttaatgagattaacgttatttattagaaaggggagacgtggtgttttggaggtaggagaaagaataggtagggtgggagggttggatagaggattatgatgagtagtgttagatatagtatttgggtttttattgtttacgattttaaggggggtttttaagttttcgtttggggtagtttttttggagttttatgagagttttgtgaagtaggatagaaaattgatgtgagttttaatttatagttatgaaaattgaggtttttagaggaaaagaggtttgtggcggtgttgggattagagcgttgttgttttattttttggatttagaggaaaggttgaaggatttttgtgtttggttattggtagaaggggataacgtatttgtttgggtagattttaagttatatgatttagttatagtttttttattttgattatgtggtaagatgatttgtgcgagacggttaagtttttaatatttttatttttgtaggttggtatcggattttgttgatattttagattgttataaagatgagattgtaaagttaagatggtagaagttatttaatttagtttcgtgttttttttggggaaattgagatttaagagggtagacgaggttttttaggacgtatagttaaatttggggtttatgtattttcgaggtatttatagttatagttgtttttttttaatttgaagaagaaaatgagaatatgttgaattaggtgtggtatggtaggggtatagtttatagattttgttttttgttatattttgtgtttttatttttgttattttttttttgtaaggttataataaatttagattttagtaaatattgttgcgtaattggttttttgaaggatgtttttaaatattttgtttaaatatagattaaataagatagggtaataaggtaaaatttgttaagagggaataaagtggtatgttattttgataagggaaaaagaaaggaattgagaattatgaagagaaagatttgggacgggttgagaggtatagataggtttaatatttaggtgtgattaggagaattatataatttaattgagtaatagagaattgatttttaaaatttttattagtatagggagatggattacgggttagggatggtataggaagattttattgtttgagttgggggaagggagagttttttttttggagattttagattttaggataaatttatagtatttaggtaggtttttttttttgttataaatggattgagggaagaaattaggagattgaggtaaatttgtgattttggaagttttagtttttttatagatttggatagaaattttttagattttgagtattttagttttttgaaagaaattattaaacgaatggatcgtagagttatttgggaatggattttagttgttaaatatgatatgtaaagaattgatttgtagatgtaaattttatttaagtagtggggttaggttttttttggagatagttttcgatttagttttgaggtcggatatattttattttggttttgttatttgttagtttggcgatttttttgtagttgttttgtttttttgtgttttaatttttttattagtgaaatagagatatgaatagtaattaatttaatgggttggttgtgaggattaaagtaaatgatgtgtgtaaggtatttagtagataaatggattttaatgcgtgttttttttgtttttttattttttttattaattggtttttagttggggatatttatgtagattggtgggattttgcgtttttttgtttttgatatgggtatttcgttttgtgtttggaatataagtttttgaggatagagattatgttatatatttgtttaatttttttaattttttttgatttgtaggagaatatttttgggtcgtgtagtggagaggtattggtttagagttgtgtgttttaattttaggtggggttttagttggtattttagtttattgtgtgattttagattagtttttttttttttagaggttttagttttttttattataaatttaggtaatttttttggattagtgtttattaatgttggatgttataggaatcgtttagggtgttttttaaaaatatagatttgaggtttataagtttagattttgttggagtagaattaaatgtttgggttttagtttgtaggattttttgttgatttagatataaagttagtattttttaaaattatttggtttattttataatgataatagtgagaatgatgaattaaaggtagttgatttttttaagaattatttattttttattgtttgtagataaaggggatattagggttttatagatgggatgtgtttttaatattaatttttaagttagttttttgagtgtgataattattttatttttttaagttaagattttataataattgtatttattttttggatttgttagttataagataaaaatatggtttaaaatgtgttttaaaagaaggttgttataaattatgaggtttatttttgtgagaagaatttaggatttttaaggagaaatatttaattttaaatgttttattttaaagtagtaagttgagagatattttaaatgtgaatatttatgttgttgaggataagttgaaattagtattttatatgattgttgattggtttaggaaaataattaagattttaaaaatgttcgtttttatggattttatataattcggttttgaggttttgatttaaataatttattttaaagagggagaaaaaagttcgtaaaatagtatttatgattgtttttattttgattgggatgaggtattgtaaataaatgaagttgtatttttatttgtttattttatttattgtatataagttatgttgtaattaaaaggggaatatttttgaaagagatattaaagtttgttttgaaatttgttatttaaaatttatggaattttatgtaagttatttgttgtttgtgttttttattttttatttgtaaaatgtgagggttaaatgattgaagattagtttaattatttggtatattgtttgttatatagaaagttttcgataattgttcgtcgtttttattattattattgaaatagtagtttggtaaataatttaaatgtttagtaataagggtatgattaaataatgttgtggttattaaaattattttaaattgagtttgtataatattaggtagtgtttatattatttttttaggtaatttaagagaaaaaagttagaataatgagattgaatataaattataattttaattatgtttagaaatatgttaggaagaaagtatggaaagaaatatcgaggtcgtttttgggtatcgagataatggatggtattttttttttttttttagtttttttttttgaggagtatagggtagagttttgtatgttttgaaggtagtttttttgtaagggttggtttcgaagttttagagtaaggtaatttttttattttaggtagttttaagggggtagtgaaagcgaggttgaggtggggattgggttttttgttagttaagggagggtagtggggagtttggttagttataagtatcgtaaagtgttaagtttttggggtaggtaagggagaggaattaatggtaagagattgttcgttattaataatattttttttttttttttgtagt

SEQ ID NO: 1140 - DNA, 9447 bp, Artificial Sequence
  chemically treated genomic DNA (Homo sapiens)
gttgtaaagagaaggggaaggtgttgttagtgacgggtagttttttattattggttttttttttttgtttgttttagaaatttagtattttgcggtatttgtggttagttaggttttttattgtttttttttggttaatagagggtttagtttttattttagtttcgtttttattatttttttgggattgtttgaaatggagaaattgttttgttttaaggtttcggggttaatttttatagaaagattgtttttaaggtatgtagagttttgttttatgttttttaggaaggagagttaaaagaagaaaagaaatattatttattgtttcgatgtttagagacgatttcggtgtttttttttatgttttttttttagtatgtttttaaatataattgaggttatgatttatatttaattttattattttgattttttttttttaaattatttaaagggataatataaatattgtttagtgttatgtaaatttaatttaaaataattttaatgattataatattatttaattatgtttttattgttgaatatttagattatttattaagttgttgttttaataatgataataaaaacggcgaataattatcgaaagttttttgtgtggtaggtagtgtattaagtagttaaattagtttttaattatttaatttttatattttgtagatggggaatgagaggtatagatagtaagtaatttgtatgaggttttatgggttttaggtgataagttttagaataggttttaatgttttttttagaaatattttttttttaattatagtataatttatatatagtaagtaaaatgagtaaatgaaaatgtagttttatttgtttgtagtattttattttaattaaaatagagataattatggatattattttgcgaatttttttttttttttttgagataaattgtttaagttagaattttagaatcgagttatataggatttataggaacgagtatttttaagattttggttatttttttagattaattagtaattatatgaggtgttagttttaatttgtttttaatagtataaatgtttatatttgaagtattttttaatttgttgttttggggtggagtatttgaggttaaatgtttttttttgaggattttaggttttttttataagggtgggttttatggtttgtggtagtttttttttggagtatattttaagttatatttttattttatagttagtaaatttaaagaataaatataattgttatgaaattttagtttggaagggtgggatgattattatatttagaaagttgatttagaagttgatattgaaagtatattttatttatggagttttggtattttttttatttataggtagtggggggtaagtggtttttggaagagttaattgtttttaatttattatttttattgttattattatgagataaattagatgattttgaagagtgttaattttgtgtttagattagtagagagttttgtagattgggatttaggtatttgattttgttttagtaagatttaggtttgtggattttaaatttgtatttttaaggagtattttagacgatttttatggtatttagtattggtaggtattggtttagaaaagttatttggatttgtagtaaggaagattgaggtttttagagggaaagaggttggtttaaggttatatagtgagttgggatattagttgggattttatttgggattaggatatatagttttgagttagtgtttttttattgtacgatttaaggatgtttttttgtaagttaaaaggaattggagagattgaataaatatgtaatatggtttttgtttttaggagtttatattttagatataggacgaggtatttatgttagagataagaagacgtaaagttttattagtttgtatgggtgtttttagttaggagttagttaatagagaaggtaaaagggtagaaggaatacgtattaggatttatttgtttgttgagtgttttgtatatattatttgttttaatttttataattaatttattgggttagttattgtttatatttttattttattgatgaggaagttgaggtatagagaggtaaagtaattataggaaagtcgttaagttagtaggtggtagagttagggtaaagtgtgttcgattttagagttgagtcgagagttgtttttaagggaggtttgattttattatttgggtagagtttgtatttgtagattaattttttatatgttatgtttgatagttaagatttatttttaaatgattttgcggtttattcgtttggtagttttttttagggggttgaggtatttagaatttgaagggtttttatttaagtttgtggagggattagaatttttaggattatagatttgttttagttttttagtttttttttttagtttatttatggtagaagaaggaatttgtttgggtgttgtagatttgttttggggtttgagatttttaggaagaaaattttttttttttttagtttaggtagtgaggtttttttgtattatttttgattcgtggtttatttttttgtattgatgggagttttagggattaattttttgttgtttaattggattgtataatttttttggttatatttgaatgttaggtttatttgtgttttttagttcgttttaagtttttttttttataatttttaattttttttttttttttttattaaggtaatatgttattttatttttttttggtaaattttattttgttgttttattttatttggtttatatttgagtaagatatttagaaatattttttaaaaaattagttgcgtaataatatttgttgaaatttaagtttattatgattttgtagaaggaaaataatagaaatgaaagtataaaatatggtaaaaaataggatttgtgaattgtatttttattatattatatttagtttaatatgtttttatttttttttttaggttgggggagaatagttgtgattataaatgtttcggaaatgtatagattttaggtttggttatacgttttagggaatttcgtttatttttttgaattttaatttttttaggaaaaatacgaagttgaattagatgatttttattattttagttttataattttatttttatgatagtttggaatattaatagaattcgatgttagtttgtagggatgagggtgttagaagtttaatcgtttcgtataagttattttattatatggttagggtagagggattataattaagttatgtggtttgagatttgtttaagtagatgcgttgtttttttttgttaatgattaagtatagggattttttaattttttttttaagtttagaagataagatagtaacgttttggttttagtatcgttataagtttttttttttttaggggttttagtttttatagttataaattggggtttatattagttttttgttttgttttataagatttttataaggttttaaggagattgttttaggcgggagtttgaggattttttttagggtcgtgagtagtgaaagtttaaatgttgtgtttggtattgtttattatagttttttatttagtttttttattttgtttatttttttttttgtttttaggatattacgttttttttttttagtaagtagcgttgattttattagtagttataatagttttttgtattttagagtatggattttaaaattagataggtgtggtttgagttttgtttttattatatgtagtttttagggtttcggattattttatttttttgagttgattttgtagttgagttaaggggataataatgttgattttataatatagtagggagcgttaaatgggatagtgtttgtgagatatcgaatttaaattttagtatataataggtatatatttatttgagggtttttgtttttattttttttttcggaatttatggttaggaaaatttagcggtttatatggcgtttatttaattagtaaagttgttatagggttttattgttattttatatattttttatattttgttttaattttatcgttaagttttagtttagtttattaagggtattagtattatgattatttatataagagtaaggtttatttttttgaaatagttagtaaggttgtcggggttttagtttaggatttttgagcgaaagggtatattttttagtgttatggttgttttttcgggaagaagtttataagttgagtatgggcgttttatttatgggtagagaagtttaaatttagagttcggaggcgtttttggtttttttaatttttagttattttgtggaatatttttgttggagtcgatgttttttttggcgtagttagattttagaaagtaacggttttttttgcgaataaatatggtttttttttagaaaacgatttagttagttttttttattattttttttgttgggttttaaataagtaaataaggaagtttagttttggaggtttgagatgtagagagagttatagggttggtaattttttattggttttagttattttaatttagtaggagaggtaatgaaggggttttaaattttaatgtgagtttgagtaatttttttttaaattttgggtatttatatgtttatattgtatttttgtttagttggggttttgtagattaaaatttattttgacggttgatttgaaatatagataattttttatattagtgaattgttggagtatgtttttttaatgttttttaattattttttttttttattattaaagattgggatttttttagttgtttttttatagttgttatgagagggtttttaaggagtgagtgagttaggtatttagggttgaataaggtgttatattgtgtagatagggtttagtttttgatatgattatttttgtgttatgtaattttaggtaaggagttaaaagttgggaattttagtttttaaatttgtataataggaaaatagtgattttttatatgtatataaaatttagatgtatttaattagataaatttaaaaagaaaaattaaaaagaaaaaaaatttaataattgttattggtagtgttatatattttatttattattgtttttataatatattttatttattattgattttgttatatattttagttaaagagtatattttttggagataggaggtgagaatttgttgtttttttagttttagatattgtttattttttataattgaataatttattggtagagggtgagtttagtgtataaaagtaattatatttgtgtaataaggtaatttttaaatataagttattattttatttaatgttatatatatatatatatatatatatatatatatacgagttatttgttttaaggttgttgtttttattaagtgatgttatgttggtttttgaggtggtgtttttttgagggtttttaagtatagttttggttatgtatagttttttttttatatatattttgaggagtttcgtcgttacggtaatgtatttgttttataagttggtgggtagtttaaatgaaatatatattttgttttaggtttagtattagtttattaatgtgagttggtgttagttttattttagaaggtgttgagggtattagtgaaggtagtttaggttatttgttttttgtagggttttatatttaagaattttttttttttttttttttttttttttttttttttttttttttttttttttattgagacggagtttcgtttttgttgttcgggttggagtgtaatggtgttatttcggtttattgtaattttcgttgttttttaggtttaagcgattttttttttttagtttttcgagtagttgggattataggtatgtattattacgtttagttaattttgtatttttagtaaagacggggtttatttttgttggttaggttggtttggaatttttaattttaggtgatttgttcgtttaggttttttaaagtgttgggattataggcgtgagttattgtgtttgggtcgtatttaagagttttttgtagttgattattttgtataaagtatagttttgttgtataaaagttttattacgggtgagaggttatttggttttttaaattattagtatagtagtgaataataaaaagttatttgaagagaaagagagagagaaattattttgaagtagagtaagtatagaagatgttatggaattaattgggatttaagtagggtcgtggaggatggagtaaaagggagggtatttttgacgtggattaattaatttttttttcgttattttttaaaatatatgttatttatgaaaaggaatattttagattatttttaaaagtagaagtaattttattttattttattttaattttttttttttatttgtttttgttttatgtttagagatggggtttttttttattgtttagtttggaacgtagtggtataattatagtttattatagtttcgaatttttgggattaagtgatttttttattttagttttttaagtggttgggagtataggtatgtattattatgttcggttaatttttttatttttatttttttgtggagatggagttttgttttgttttttaggttgtttttgaatttttggttttaagcgatttttttattttggtattataaagcgttgggattataggtgtaagttattaagattggtttaatttttttaatgatgtttattttatttaggataagaaaaatttataaaaaagtagttgtaatgaaggtattattaaatattaggtttttttagaaagaattatttaattaatgtggttaagatggaggatttatggagtttatttagaagatagataaagtagttaagaaatttggatgataataatggtgattttgagaaatataaagagatacgatgttttgagttttttttatggtttagagagtataagttaagaattttttattgattgttttaattgttggtattattgttgtttttattttatagaagagaaaattgaggttttaagaggtgaattatttgttttttgaatttagtaagtagggagtgaatttaggatttttttaaagttgatttgagtttagagtttttgtttttggttatttgttattttgaggttttgagatgttatagaaattgtttaaggtagatttgggatttaaatttagtttgtttttagagtttgcgtagttttttttttgtggtttttggtgaggagaaagagaggttgttaatttgaataagtttagtaaaggatgtagtattttgtatgaggcgggtatttggtgttttttttttatagaattataggtttattttttagaaagggtagttggtgtaaggggaagtatgttgttttaggtttggaggttttttttttttttaggttttgttgattttttaatatttacgagttttatattttttgtttttggttggcgggtttttgaagttttagagatcgggttagttagtttttaagagagatttaggagattagaaggattattgtgattttgtgtaggtttagtcgtaggttttttatttttaaaatggggcggttatgaaagtagtttttgggtatagttttcgatagcgtggttgttatgattatggaggttaggggtagtagttgggtgtatagtatttgtttgttggttttaagtatgaagtagagtagagggtggggatttagtagggtatagtgatttgaagtagtggtggggatattttcgtttatgtttgttttttttttttaattaggtggagaatttcgtaggtacgaacgaggaacgaggttatagaggtttttttaggttttgtgatgtatagtttaagatttgggaaaaggtaaataatttttgagtagaataaaaataatattttaggggttgggtatagtgggttatgtttgtgagttacgttgtgggttaattttaatattttgggaggttaaggtgagtggataatttgaggttaggagttcgagattggtttgatttatatggtgaaattttgtttttacgagaaatataaaaattagttaggcgtggtggtatgagtgtttatagttttagttattgggaaggttgagatagaattgtttgaatttgggaggcggaggttgtagcgagtcgagatggtattattgtattttagtttgggtgatatagtaagatttttttttaaaaaaaagaaaaaaaaagataatattttgtttttatatagaaatagggtttatggaataggaatgatttttttttgtttttgtttttggagatggagttttattttgttatttaggttggagtgtagtggtgttttttttatttagtgtaattttttttttttaggtttaagtaatttttttgttttagtttttcgagtagttgggattataggtatatgtcgttacgtttagttaattttttgtatttttagtagagatggagttttattttgttgtttaggttggttttaaatttttgagtttaggtaattcgtttgtttcgattttttaaagtgttaggattataggtgtgagtaattacgttcggttaagggataggaatttttattgtataattagtggagtttgtggataagaaagtagtatttgtagggaggttgtgttagattgtgagagtggatgtgggagtagtaaattgtagtttagggtatcgtttgaattttttttttattttatttattacgtttagatttttagttttttttttttttatttgatttatagtagaattatgtgggtagataattgtttttttttatcgttaattttagaggcgagagaaatgtataattttttagaagagatttgggagttgtaatttttgtgtgtggggttgggggaagggtttggggagttgatgtttagggacggggagaatggaaagtagggattttatagacgagaatgtgttgatttttttaggagaggaatataagaagttagaaggtgggtgggaggaagtgtttatttgaatttgatttggatagagggttttgattatgggagagagaataaggtggtggtacgtggtttagagaggatgttgacgtgatatagatattataggtaatttgaggatgtttttgttcgtgtttatttagttttatttttattaattttttaatattttagatttattattagaggttgaagttttttgttgttggaattttttagagggtttgtatgggagtaaaggttgtagttgttatttttatagagagagggggtaatttttttttttatttttaaggtaggtagtgggagtattttttatgtttgggatttttgtggatggtaaagggttttattatatgagagagtttagtggagcg

SEQ ID NO: 1141 - DNA, 7781 bp, Artificial Sequence
  chemically treated genomic DNA (Homo sapiens)
ttttttgttttgtgttaggaaaatatttttttttagtggaaagaaagttttttagtggaaaaaaagtttatttgtattaggagtttatagtttagtgatagagatatatataaatatgaattaatttatttgggaggttgaggtaggtagatggtttgggtttaggagtttaagacgaggttggataatatggagaaatttcgtttttattaaaaatataaaaattagtcgggtattgtggtgtatatttatagttatagttatttaggaggttgaggtgggaggattatttgagtttgggatgtggaggttgtatatagtgagttgagattgtattgggttatagagggagattttgttttaaaaaaaaggaatatattgagtgttggttatgtggggtttaggtgggtagggatgatggtaaaggagagggtatttagagtgaaggaattttttaggtggaaggtttgaggtgagagagtatatggtatatttggagaatgtggtgcgtagttttgggattggtatataggaagtatgaaggaaaatagataaaattagagaggggatgtgggcgttggattataggggtttggttgtgtttttttaaagtgtttggattttatttttgaggtaatgaggggttatcgaatgtttttaaggaggcgtataataaatataagatgaaggaatgatttagtattatgttttggatggatagtattttgtagttagggttattttaggaaaattttatagtgggtgttaagtagtatttattttttgaggttagtttgttttttggttaaattatttttttatgggattttttttttaaaaaaattttattgatatataatagttgtatatatgtatgaggtatatgtgatattttgatataagtataaaatgtataatgattaaatttggggaattggtatatttattattttaaatatttgtgatttttttgtgttgggtatattttgaattttttagttattttgaaatatataataagttattaattatattcgttttatttaattgtatttttgtatttattaattaatttttttttattttttatttttattattttttttaatttgtggtaattattattttatttattatttttataagattaaattttttagtttttatatgagtgagaatatgcgatgtttgtttttttgtgttagtttattttatttaatataatgatttttagttttatttatgttgttgtaaatgataggattttattttgaaatagttgaatagtattttattgggtatatatagtatattttttttttttttttttaaatttttttttttgagatagggttttgttttggattgtagtggtgatattatagtttattgtagtttggatttttttgggttaggtgatttttttattttaattttttgggtagatgggattataggtatttattattatttttagttaatttttttttttgtattttttgtagatatgggggtttattatgttgtttaggttggttttgaatttttgggtttaatttgtttgttttagttttttaaagtgttgggattataggtatgagttattatgtttagtttttttgttttttgggtttaagtaatttttttgttttagttttttaagtagttggggattataggtatgtattattacgttcggttaatttttttatttagtagagatggggttttattatgttggttaggtcggttttgaatttttgattttaggtaattcgtttatttcggttttttaaagtgttgggattagaggtatgagttattgtatttggttaatatattttttttattatttatttattgatgatatttagattgagtttatttatattttagttattgtgaatagtgttgtaatagttatgggagtgtagatatttgtttgatatattgatttcgttttttttggatatatatttagattgttggattatatggaagttgtagttttagttttttgaggggtttttatattgttttttatagtgattgtgttaggggtttttttttttgaagaggttatatttaaagaatatttggttagattaagaattttgttttgttttttgaaagtgttttttgatttgttttaagggttttatatttttttttggttttagtatagaagttttattgtttggattgtattagttagggttttatattagttagggttttttagagaaatagaattaatggaagaatatatataaagagatttatgaggaggaatttatttatgtgtttatgtaggtagagaagttttatgattttgttatttgtaagttggagatttaggaaagttggtggtataaattttagttcgagtttaaaggtttgagaattaggagagttaagggtttaagttttagtttaagggtagaatattaaggttttagtagatatatttattggtatttatagttttttttgagtttgggattggtttgggttttttagataattttttgttttttgtatggagtgatgtgggataatattttataatagagagaaaattataggttttggggttagttagtattgggttaaagttttagttaaaattatttattagttgtattattttagtaaagttatttatttttttgagttttggtttttatatttgaaaaatggggataattatgtttattttaaaggatgagtatggggattatttagttggttgttatattatagtaggtgtttagtaaatggtatttgttttatttatatttgtggagttaaatattggttgttgttttgtttaagaagtttgaagttgtgtttggagtaagttgttgttaggtattataaattaggggaatgaagattttatttagtttatttttataggttattttagagtgttttaatttaagttttttaggtgaaaatttttcgtttttttagttaattttagttttttgttttttgtatatttttttttagtagtagtggttatatttggtaggtaggtaggggggtttagttttgattgagaatattgttgtaaagattgagaaatcggaaaatattgtggtaatttgttttgttttgaggtattttgaagaattagtggtttatttttaaattttttagttgtgtgtttgaggtgagagttttattttagaatttagagtgattttagaatttagagtgatgggaaaattgttagaatatgtaagtatgttttgtttattttttttttttttttgagatagggttttattatgttgtttaggttagtttcgaatttttggttttaagtagtttttttattttaattatattggtgttgggattataggtatgagttattgtatttggttttttgtgttattttggagttgaggttagagtttttcgttaaaattaagaaatttagttatggatttattttaaagttgtattgggttgttgttgtaggtttagggagtaagtaaagttatttatttttttggttgaaagttttagttttttaattttttaattatttggttttttttatgattggtttttttttgaggttatttaagattttttatttattaatattaagttagggaaaaaggttttttataaataataaaagatatttttattagaaaatttaggaaattttggtatatttaagggtttattaaatatattttataatatattttatagtggggaagtattggtataaattaaagaagagatggaggagggcgggttaggtaatggaattagtaagaatataggtttagaggtaagtatgataagaaaataaaaaattgagttgggtacggtggtttacgtttgtaattttagttttttgtgaggtcgaggcggttagattatttgaggttaggagtttgagattagtttgattaatatggtgaaatttcgtttttattaaaaattataaaaattagtcgggcgtggtggcgtttggttgtaattttatttttttaggaggttgaggtaggagattcgtttgaattcgggaggcggaggttgtagtgagtcgagattagtttattgtattttagtttgggcgatagagcgatttcgttttaaaaaaaaaaaaattaataattaaaaaaaaaatcgtagggtaagtgggcgcgtttgtagttttagttatttcggggagtcgaggtgggaggatcgtttgagttagaaggtcgaggttgtaggaagttatgattacgttattgttttttagtttgggtgatagagtgagattttgtttcgaaaaatattaaaaaataaataaataaataaaaaattaaaattaaaaaaataagttattgatagtttttgggtatggttgagattcgagatgagatgttagtggggtgggtagtagaaagtgtagaataaaatgtatatttgaattgagttattttgtaaggtttgagaggttaaggttttattgtgagtgggagttggtaggtttagtagtagagggaaaagtagcgtcgagttttggaggttattcgatttaggtaagaatagattgattgattgttaggtattttttttttttcgtttaataaatatttgtggagtgtttattacgtgttagaagttgttttggatattgagaaatagggatgaagaagaaatagatttaagtttttttgagagtaatttttttaggttttatggatgaggaaattgaaggtcgttttgatttaggtttatggtttcgatttcggtttttgtggttggagggtagtattttatttagatttttagcgtacgtggagtagtttgtcggtcggttgtttggttgcgcgcgttattcgggtttttttagtgtttcgtttggttcggtatttatttttagttcgatttatacgtgggttttcgtacgttcgtcggtttttttcgttgacgttagtatagttgttttatttaaggtttttttcgcgtttagtttagagtgttgtagtcgttgtcgtcgatttcggattttattgttacgcgttttcgacgatcgttcgacgtgtattttcggtacggtagggttttgcgcgtacggcgttagagggatgggcgggtagagttaattgtttttggttttgttggttttcgttgttcgcgaagggatttttgttttcgggaggtgtaggagtcgttttttagaagtatagtttagagacgtttggcggcggtttatataacgtatgtgttcggagttcgtcgcgttttgtttttgttttaagcgggaattatggtttttggttacgttggggaatcgaggaggtggtcgtatttaagtaggggtcgaaagttcgggtggatgcggaataaggatatgataggttttaagggtgggggatatttttgggttcgaaatcggcgggcggtgtaaaattcgaggtttagttttcggagtttatagagttaaaaaagttttagtttgttcggggcgggtttttgaaagacggaaagcggttgagtattacgcggtttgtattttttttttgggacgttcgagaggtgggtttcgtgagggtagttgttgtttgtagattatagggagttttttgcgtatttattaagaagttattggtgtatttcggttgcgttaggtacggcgtatgtaaagatgaagtaggtagtattttagttttttcgtattttagacggttagttgagtaggattcgtcggtattaatttttttttttaataaatagggagatcgaaagttaggagatagttagggatttttaagtttttagtgagtaggaggtagaggtgaggtgtagaattgcgtttttgtatgtttttcgtttttagacgtattttttttttattttatgtttttttattttcgtttttatattataggtagtattggattcggggtcgtttagtgaagttagtaggtgttcgtagatttttttttttttgttaggttagaaattttataaggttgtttagaaatagtagtgatttgtaaggagagattcggttttagtttcggtgattttgggttgattgtttgtttagatcgtttttcggatttttgttttttggattgcgtgttaatattagacgcgatatttcggggatgtcgtttgtgataggtgttttagcgtattatcgtagggtttcgatttatacgtttgttagaattttatcggttttttcgttgcgtatttatattacggttcggcgggttaagtttttcggaggttcgttttttttttatcggttttgtttttattttttttatcgttgttttggttttttgttttttattcgtttgtttcgtttacgcgtagtcgttatttttttcgtttcgggtagttcggtttttcgcgattttcgtcgttcgtttttttcgttttatcgcggttttttttttttttttttttttttttttttttttatttttttttttttttgtttatttgttgggaggtattttttttttatttttttttttttttttttttattttatatttttatttatgttgtttattatttttatttatttgtaattatatatttttttttatttttttattttttttttattttttttttttatagtttttttcggattttttttttttggattgttgttaaaattagacgtgatattttggggatgtagtttgtgatattttttttagcgaatgtagtgtagggttggattaataaggtggaaagaattcgaggttttattaagtagttattaattttagggttgtaggtttaggttttttgtagttatttttatattttttgtattgaaattatttttttatattgggtttgataggtttttgtaataaggattacggtcgaagttatatcgtgcgtttttttttcggttggttaataggttttggtttttagtattgcgatttaaagtttggcgttggttgcgttagatttgggaggttgttagttaggttttacgttgttggcgtttgtttcggggtatttattaggtttgaagtttgaattttagtttttttttttttatttattgagttgtatagttttagattgtttttgtttacgggcggggttttttagttttttgttttttggttcgatgttcgttttttaacggtcggtcgttagattaatcggtttcgtttggcgttgtaatgtatgtatacgcgtataagtttttgggtcgtttatttttcggatttgggcggggcgtaaaagtcgggcgttcggaggatttagtaattagtttgattttcgtttattttttcgagcgggaaggagagttataaagcgcgtacggattatcgtaggtttttgtgttttgggtttgagttttgtggtagttaatggtttttttgtacgtatttttggtgtttatttgagaagtttggttgtgtttttgttgtaggagtcggagtagtttagagtgattttgtttgaggaaaggttagttttatttggggttaataaatcgcgatgggtgaatttttaggaggttatatttatatttaaacgtcgatattttttttttacgttaaggtatgggtttttattttttatagattttgttattaggttttttaatttttttttggtaattattaggtttttttttttttttttttagttatttttagtgatttatagtggtaaatatttttaaaggaagtaaaatagtttaaaaaaattttttggttaataaatattaaagaagttgtagtgatattaaatgtttttttttttataga

SEQ ID NO: 1142 - DNA, 7781 bp, Artificial Sequence
  chemically treated genomic DNA (Homo sapiens)
tttataggaggaaaaatatttagtgttattatagtttttttaatgtttattaattaagagatttttttaagttattttattttttttgggggtatttgttattataaattattagagatgattaaaaagggaggggaaaaaatttaatggttgttaaaagagagttgaaaggtttaatgatagggtttgtgaagagtgaaggtttatattttagcgtggaaaaggaatatcgacgtttgggtgtaagtatagttttttgagggtttatttatcgcggtttattaattttaagtggggttggtttttttttagataagattattttgagttatttcggtttttatagtaaggatatagttaggttttttaagtaaatattagagatacgtgtagaaaagttattaattgttataaagtttaagtttaaggtataggagtttgcggtgattcgtgcgcgttttgtggttttttttttcgttcggaaaggtgggcggaaattagattaattgttgggtttttcgaacgttcggtttttacgtttcgtttaagttcggaagatgggcggtttaggaatttgtgcgcgtatgtatgtattatagcgttaggcgaagtcgattagtttagcggtcggtcgttgggaagcgggtatcgggttagaaggtagaaggttgagaagtttcgttcgtaagtagaggtaatttggagttatgtagtttagtgggtgagagggagggagttgggatttagattttagatttaatgaatgtttcgaagtagacgttagtaacgtgaagtttagttggtagttttttaggtttggcgtagttagcgttagattttaaatcgtaatattagaaattagggtttgttaattaatcgggagggaggcgtacggtgtggtttcggtcgtgatttttgttgtaaaggtttgttaggtttagtatgaagaaatagttttagtatagggagtgtagaaatagttgtagaaggtttgagtttgtagttttagagttaatagttatttggtggaatttcgaattttttttattttgttaatttaattttgtattgtattcgttggaggaaatattataggttgtatttttaaagtattacgtttagttttgataataatttaaaaggaaaaaattcgagaagaattatagaaaaagaaaataaaaaaaaaataaaaagatgaaaaaaaatatataattataaataaataaaaataatagataatataaataaaaatataaaataaaaaaaaaaaaaagaaaaaataaaaaaaaaatattttttaataaataaataaaaaaaaaaaaaaataaaagaaaaaaaaaaaaaagagagagaaagagggtcgcggtggggcggggggggcgggcgacgggggtcgcggggggtcgggttgttcggggcggggggggtggcggttgcgcgtgagcggggtaagcgggtggggggtagggggttagggtagcggtgggaaagatggaggtagggtcggtgggggggggacgggttttcggagggtttaattcgtcgggtcgtgatgtgagtgcgtagcgggggggtcgatggggttttggtaggcgtgtaggtcggagttttgcggtagtacgttgaggtatttgttataggcggtattttcgaggtatcgcgtttggtgttaatacgtagtttaaggggtaaaaattcgagaggcggtttaggtaggtagttagtttagagttatcgaagttggagtcgggtttttttttataaattattgttatttttagatagttttgtaaggtttttagtttggtagggggaagggagtttgcggatatttgttagttttattgaacggtttcggatttaatgttatttataatgtaggggcggaggtgggagggtatgggatgagggaagggtgcgtttagaggcgagagatatgtaaaaacgtagttttatattttatttttgttttttatttattgggaatttagagatttttgattgttttttagttttcggtttttttatttgttaaaaggaggagttggtatcggcggattttatttaattgatcgtttgaggtgcggaagggttgggatgttgtttgttttatttttgtatgcgtcgtgtttagcgtagtcgagatatattagtagttttttaataaatgcgtaaagggttttttataatttgtaggtagtagttgtttttacggagtttatttttcgagcgttttaagagaaaaatgtaagtcgcgtggtatttagtcgtttttcgttttttaagaattcgtttcggataagttgaggtttttttggttttatgggtttcgagaattggatttcgagttttgtatcgttcgtcgatttcgagtttagaggtattttttatttttaaggtttattatatttttgtttcgtatttattcgggttttcgatttttgtttgggtgcggttattttttcggttttttagcgtggttagaagttatggttttcgtttagagtaaaagtagagcgcggcgagtttcgaatatatgcgttgtgtgggtcgtcgttagacgtttttgggttgtgtttttggaaagcggtttttatatttttcgggagtaggaattttttcgcgagtagcggaggttagtagaattagaggtagttggttttattcgtttatttttttggcgtcgtgcgcgtagggttttatcgtatcgggaatgtacgtcgggcggtcgtcgggggcgcgtggtaatgagattcggaatcggcggtagcggttgtagtattttgagttgggcgcgggaggggttttaagtggaatagttatgttgacgttagcggggggggtcggcggacgtgcgggaatttacgtgtgagtcgggttgggggtggatgtcgagttaggcggggtattggagaggttcgggtggcgcgcgtagttagataatcgatcggtagattgttttacgtgcgttgggagtttaagtaaggtgttgttttttaattatagaagtcggggtcggagttatgagtttgagttaggacgatttttagtttttttatttatgaaatttggggaggttatttttaggaaggtttggatttgttttttttttatttttgttttttagtgtttagaatagtttttggtacgtaataggtattttataaatatttgttgaacgaaaggaagaaaatgtttagtagttagttagtttgtttttatttaagtcgagtgatttttaaaattcgacgttgtttttttttttgttgttaagtttattagtttttatttatagtgaagttttggttttttaggttttgtagggtgatttagtttaaatgtatattttattttgtattttttattgtttattttattggtattttatttcgagttttaattatatttaagaattgttagtggtttgtttttttggttttggttttttgtttgtttatttgttttttggtatttttcgagatagggttttattttgttatttaggttggagggtagtggcgtgattatggttttttgtagtttcgattttttggtttaagcgatttttttatttcggtttttcgaagtgattgggattataagcgcgtttatttgttttgcgattttttttttaattattaatttttttttttttgaaacggagtcgttttgtcgtttaggttggagtgtagtgggttgatttcggtttattgtaattttcgtttttcgggtttaagcgaattttttgttttagttttttgagaagatgggattatagttaggcgttattacgttcggttaatttttgtaatttttagtagagacggggttttattatgttggttaggttgattttaaatttttggttttaagtgatttggtcgtttcggttttataaagagttgggattataggcgtgagttatcgtgtttagtttaattttttgtttttttattatatttatttttgggtttgtatttttgttgattttattgtttagttcgtttttttttattttttttttaatttgtattaatatttttttattgtggggtatattatgaaatatatttggtaagtttttgagtatgttaaaattttttgaattttttgataggaatgttttttgttatttataaagagtttttttttttgatttaatgttaatgaatgaggagttttagatagttttaggaaggagttagttatgggaaagattaaatgattagggaattagagggttggaatttttagttaaaggggtggatggttttatttattttttgaatttatagtagtagtttagtgtagttttgagatagatttataattgagttttttggttttgacggaaaattttaattttagttttaaaatagtataaggggttaggtgtagtgatttatgtttgtaattttagtattaatgtggttgaggtgggaggattgtttgaggttaggagttcgagattagtttgggtagtatagtgagattttgttttaaaaaaaaaaaaaaaatgagtagggtatgtttgtatgttttaatagtttttttattattttagattttaagattattttaggttttgaaatggggtttttattttaaatatatagttggaaagtttaggggtgggttattgattttttagagtattttagggtagggtagattgttatagtgtttttcggttttttagtttttgtaatagtgtttttagttagggttgggtttttttgtttgtttattaaatgtgattattgttgttgggaagaggtgtgtagaaggtagagagttgaagttggttggggagacgaagaatttttatttgaaaggtttgggttggggtattttgagatgatttgtgaagataaattaggtagagtttttatttttttaatttatgatatttagtaatagtttgttttaagtatagttttaggttttttaggtagaataatagttagtatttgattttataaatatgaataaaataaatattatttattgagtatttgttatggtgtggtagttagttaggtaatttttatatttattttttggagtaggtataattatttttattttttagatatggaaattaaggtttagaaaggtaagtgattttgttaaggtagtgtagttagtaagtgattttggttgagattttaatttagtgttgattaattttaaagtttatgattttttttttattataggatgttgttttatattattttatataaagggtaagaaattatttagggggtttaaattagttttaggtttagaagaggttgtgggtgttaatgggtgtatttgttgagattttggtattttgtttttagattgggatttagatttttggtttttttgatttttaggtttttgggttcgaattggaatttatattattagtttttttgagtttttagtttgtagatggtaagattatgggatttttttgtttgtataaatatataagtaaatttttttttataaatttttttatatatatttttttattggttttgtttttttggagaattttgattaatatagaattttgattaatataatttaaatagtagaatttttgtattaaagttagagaagaatgtggaatttttggaataggttagaaaatatttttaggggatagaatagaatttttaatttgattaagtgttttttggatgtggtttttttaaaagggaaaatttttagtatagttattatggaaaatagtatggagattttttaaaaaattaaaattgtaatttttatatgatttagtaatttgagtatatatttaaaagaaacgaaattagtatattaaatagatatttgtatttttatgattattgtagtattatttataatagttgaagtatggatgaatttaatttaagtgttattaatggatggatgataaagaaaatgtgttggttaggtgtagtggtttatgtttttaattttagtattttgggaggtcgaggtgggcggattatttgaggttaggagtttaagatcggtttgattaatatgatgaaattttatttttattaaataaaaaaattagtcgggcgtggtggtatatgtttgtaatttttagttatttgggaggttgaagtaggagaattgtttgaatttaggaagtagaggggttggatatggtggtttatgtttgtaattttagtattttggaaggttgaggtaggtagattgagtttaggagtttaagattagtttgggtaatatggtgaatttttatatttataaaaaatataaaaaaaaaaattagttgaggatggtggtaaatgtttgtagttttatttatttaggaggttgaggtgggaggattatttgatttagggaggtttaggttgtagtgaattgtgatgttattattgtaatttagagtaagattttgttttaaaaaaaaaaatttaaaaaaagaagaaaaaaatgtgttgtatatatttagtgaaatattatttagttattttagaatgaaattttgttatttgtagtaatatggatggaattggaggttattatgttaagtgaaataaattggtatagaaaggtaaatatcgtatgtttttatttatgtgggaattaaaaaatttggttttatggaggtagtgaatagaatggtggttattataagttggggaggatagtggggatgaaggatgaagagggattggttaatgggtgtaaaaatatagttagatagggcgagtatagttaataatttattgtatattttaaaatagttagaagatttagaatgtgtttaatataaagaaattataaatatttgaggtgatggatatattagttttttagatttgattattatatattttatgtttgtattaaaatgttatatgtattttatgtatatgtataattattatgtattagtaaaatttttttaaagggaaaattttataaagaggtggtttaattaagggataagttggttttagagaatagatgttgtttagtatttattgtaagatttttttaaaatggttttggttgtaggatgttgtttatttaaaatatagtgttgagttatttttttattttgtatttattatacgtttttttaagagtattcggtggttttttattgttttaagaataaagtttaaatattttggaaagatatagttaaatttttgtgatttagcgtttatattttttttttggttttatttatttttttttatgttttttatgtattagttttagggttacgtattatattttttaaatgtgttatgtatttttttattttaagttttttatttagggagtttttttattttgagtgtttttttttttgttattatttttatttatttgagttttatataattagtatttaatatattttttttttttgagatagggtttttttttgtgatttagtgtaattttagtttattgtatgtaatttttatattttaggtttaggtgatttttttattttagttttttgagtagttgtaattataagtgtgtattataatgttcggttaatttttatatttttagtagagacggggtttttttatgttgtttagtttcgttttgaatttttgggtttaagttatttgtttattttagttttttaaataaattaatttatatttgtatatgtttttgttattgaattgtaagtttttagtgtaaataaattttttttttattgggaaattttttttttattaggaaaaaatgtttttttagtatagggtaagaag

SEQ ID NO: 1143 - DNA, 15768 bp, Artificial Sequence
  chemically treated genomic DNA (Homo sapiens)
gaaatttcgtttttattaaaaatataaaaaattaggttgggcgtggtggttcgtgtttgtaattttagtattttgggaggttgaggcgggcggattacgaggttaggagatcgagatcgttttggttaatacggtaaaattttatttttattaaatatataaaaaaaaattagttaggtgtggtggcgggcgtttgtagttttagttatttaggaggttgaggtaggagagtggtgtgaattcgggaggcgtagtttgtagtgagtcgagattgcgttattgtattttagtttgggtaatagatagagatttcgttttaaaaaaaaaaaaaaaaaatataaaaaattagttaggcgtggtggtacgtgtacgtgattgtagttttagttatttgggaggttgaggtaggagaattgtttgaattcgggagacggaggttgtagtgagtcgagatcgcgttattgtattttagtttgggtgatagagttagatttcgttaaaaaataaaaaataaaaaataaaaaaataaaaaaaaaaaaatagtaggaattggtaggttttttttgaagagataaaaaaaaaaaaatgtagttgtaatataaaagtagttatagagaaaagtaaatttatatatggtatttattatgtatcgagtgtggttttaattatttttttttttttaattgagagatagtttggttttgttgattgggttggagtgtagtggcgcgatcgtagtttattgtagttttaatttttttggtttaagtaatttttttattttagttttttgagtagttgggattataggtgtgagttattacgtttggttaattgttttttttttttttgtagagatagggttttattatgtggtttaggttggtttttaatttttgggtttaagtgatttttttatttttgttttttaaagtgttggggattataggtatgagttatttcgtttggtttttagtcgttttatatattttaatttaatttttataagagttttgtgagttagttataggagtataaatggaaattaagaaatagaaaaatttattagtatgatttagtttttagagttatgtatggtcgtgttcgtgtatggtaggtaggttaggggtttggggaacgttgttttggaaattttggttaggttttggtattcgaggaatgtgttttttagagtttttgtggtttttttttagatttgttttgatttttagttttgggaattatgtaagttaagtgtttttcgggaagggagttttttttttggtaattttttttgggtaattagatgtggatttatgatatatattgagtttacgttttataattttttgtttttgtttttgagatagtttcggtttttttgtttaggttggagtgtaatggtgcgatttcggtttattgtaatttttgttttttaggtttaagcgatttttttgttttagtttttttagtagttggaattgtaggtatgcgttattacgtttggttaattttttgtatttttttttttttagtagaaacggggttttattttgttagttaggttggttattaatttttgattttaggtgattcgtttatttttgttttttaaagtgttgggattataggtgtgagatagttgtgagttattacgttcggcgtattttttttttttttttttttagagggagtgtttttttgttatttaggttgaagtgtagtggcgtgatttcggtttattgtaatttttattttttaggtttaagtgatttttttgatttagttttttaagtagttgggattataggcgtttgttattatgtttggttaatttttgtagttttagtagaaatcgggttttgttatgttggttaggttggttttaaatttttgattttaggtgatttatttgttttggttttttgaagtgttgggattatagggtatgagttattgtgattggttattttaaattttttttttttttttttttttttttgagatagggttttattttgtcgtttaggttggagtgtaaaggcgcgattttggtttattgtaagtttcgttttttgggtttatgttatttttttgtttttgttttatgagtaattgagattataggcgtttattattacgttcggttaatttttttgtatttttttagtagagatggggttttattttgttagttaggatggtttcgattttttgatttcgtgatttattcgtttcggttttttaaaatgttggtattataggcgtgagttatcgtatttagttttaaatttttttttaagggaaattaaatttagtgatattgggttagtatagtggtttatatttgtaattttattattttgggaggttgaggtaggtgaattatttgaggttaggagttcgagattagttcggtaaatatggcgaaatttcgtttttattaaaaataagaaaattagtcgggcgtagtggtatgtatttgtaattttagttattcgggaagttgaggtatgagaatcgtttgaatttgggagtaggacgttgtagtgaatcgatattatattattgtattttagtttgggtgatagagtaagattttgttttaaaaaaaaaaagaaaaaaaaatttagtgatatttattttttaaatttttatttatttattttttgttttaagttgaatttttaaatttatttttatttttgagatatagttttattttgtcgtttaggttggagtgtagtggtataattatagtttagtgtagcgttgattttttgggtttaagttattttttcgttttagtttttcgagtagttgggattataggcgtatataattatgtttagtttatttttgtattttttgtagagatagggttttattgtgttgttttggtttgttttgaatttttaggtttaagtgattttttcgttttatttttttaaagtgttgggattataggtatgagttattatatttagattttatttttttgtttaatgtcgtaaatggtataaggaatgggatttaatggggatatatttataaacgttgtagtagtttttagaatttgtttatttttgtaaatttttttaggtgattgttaattatttttttttttttttttttttttgagacggagttttattttgtcgtttaggttggagtatagtggcgtaatttcgttttattgtaaattttatttttcgggtttacgttatttttttgttttagtttttcgagtagttgggattataggtattcgttattacgttcggttaattttttgtatttttttttagtagaggtggggttttattgtgttatttaggatggttttgattttttgatttcgtgatttatttgttttagttttttaaagtgttgggattataggcgtgagttattatgtttagttcgttaattattttaatttgattttgatattgagtttgttaagtaggtttaagtattttgatggtttttttataggttgggaaagttaatttatttgtttaaggtcgaattttgaaattgagttttaattgttaaaaatttttattattaatttttttttttgggttgggtatagtggtttatgtttgtaaagttagtaatttgagaggtattatgatgtaagaggaagaggattgagtgaagttaggagtttgggattagtttgggtaatatagtgagattttatttataaaaaaaaattaaaaattagttgggtatggtggtgtatttttgtggttttagttatttaggaggttgaggtgggaggattttttgagtttagggttgacgttgtagagagttgtgattacgttattgtagtttagtttgagtgatagttggaaataatgataaataaataataaataattatttaaaaaattataataaaaataattaaaaaattattttttttgattaatttttttttttgtttttttgagagtttaatttgttttttttttgtttggttttttaggtttttttaaaattttgttgagaggttagtattgtttgttaaagttagtttgtaaaattttagagaaatttagtttatttttgggggaatcgttaagattgtttagttttgtgtggggtttaggtaagttttttatatgtgtttttttggtaagaggtttttggtaattttatgagtttttaaagagatttaattttaaaagttggtttttattagttttttgtggtttaggggtttaagtttaattgtgaaagttttgttttgttttgattttgttttgagggagaggaaatcgtttttttgtttgtttaatttttttttttaaggggagaaattaatatttacgtttagattttaggtattcgtataattgattttttagatgtttatatttagttaaaggcgggattttataaaataaaaaatatttttttggttgtatttttgtgaagattttatttaaatttttgattgattagtgtttattaggtgatttggaataataatgtaaaaataatatataacgaaaggaagttaaaaatttatatataatttttagaaaggaaaaggtaaatatagaaagtggcggaagtttttaatatttttagtgttttttttttgaggtagagaggataatggtattaggttattggaggattttgaaaggttgttgttatttttttgtggataataatagtaaaatgttaatagttaaatatcgagaaattttaggaggattttttagaagatgcgtttttaattttgagggggcgttagttttttatcggagatttaaatataataaattaagtcgtttgttttggcgatattttcgaaggattggagtgggaattagagttttacgggttaaaaagtcgatgttatatcggtcgttcgaaatttttttttttgtagtgaggtgaagatatttgaaaattattttattgtaaatttttttttttgttagaaattttatattgaaatgttgtaaatgacgtgggtttcgagtgtaatcgcgggaagttagggtttttagttaggatatagtaggtcgtgattcgggtcgggatattgtttggtagaggttgcgagtatggggttttggggttggaaattgcgttggatcgtcgttttgtttttcgtcgcggcggggattgtaggtaaggtttgttttaggcgttagaataggttgagagggagttttcggggggtttttgggaatttatttttttgggtataaataattattttatttttgggagatttgtggggtaatggtacggggttttttttaaacggttggagggggcgttggaggggggcgttgaggggagcgcgagggtcgggaggagtttgagggatttaagggaaacggggtatcgttgttttttaagtttttatagggtgagggatcgtattttttttgagacggagtttagttttgtcgtttaggatggagtgtagtggtacgattttagtttattgtaattttcgtttttcgggtttaagcgagtttttttttttagtttttcgaatagttgggattataggcgtttaattattacgttcgtttaatttttgtatttttagtagagacgggtttttattattttggttaggttggtttcgaatttcgattttaggtgatttgtttaaaagtgttgggattataggcgttagttatcgcgttcggtcgggatttttttttttaattcggagttgggtgtggggatttttagttttaaaataagggattatttttattttcgttttaagtttttttgggggcgagggcgattggagattcggatgtttagtttggaggttatcgcgggtttaggggtttcgattcgttttgcgcgattttagggcgttattgttattttgagttgggtgtagtttcgggatttcgtcgcgtgtttcgggacgggggttattttttttcgtttttgttttcgtttttttggttcgtttttcgaattttattgggtgtagtttaataggttattttcgagttattttttttgtttaatgtgaggcggtggaggcggaggcgggcgtcgggaggacggggtttgtgtacgagcggggcggggttggcgcggaagtttgagttttattttgttcggggcgaggcggatgtaggggaggtttggcgttttttcgcggtttttgttataaaggcgacgataagtttcgggttttcggagtcgttttcgcgatatatacgagtcgtttttcgttattttgggtttttttggcgaagttttcggttttcgttgtgttttgtggcgatattttcgtttttattttgttttggggggcgttttcgttttattagtttcgattaagtttatagaggggttttcggttatttttaaggtttcggttttttacgaggttgaaacgttgttttagaattttttcgtttttttttggtttgtagtcgagatttttagttacggtggggtagttatttttcgggatcgattttttggggtggtttcgtttttttagaggttgtgaatggtttcggtttagttgtttaagcggcgattttttttttgggtgaaatggattagattttagatttttataagaggttggttagtgtatgattttgagttagagttttttaggtggttttaaattagttgtagagagatagtttcgttttagataatagttatatggtttttttttttttgagaattagtttagtttagaaaaggattgggattgtttgatgaatataaggattgtaggaaattttttttttaattggtaagggggttggttttgattggatggagagttttgaattgttttgaaatttacgttgtaattaatatattagttttttttgggaggttagagagggagggagggtgtaatgaaatacggatgattgtttttttatttttatttatttatttattttttaattttttgtagagatgaggtttcgtttggttgtttaggttggttttgaatttttggttttaagcgatttttttattttagttttttaaagtgttgggattataggagtgagttatcgcgttttatcggggatgatgatgattgtaaatattttgttatttagttttataaaagaaagagaggtattggattaatgtgtattttatttattaattaattttttttttaagagaaaatgttaaggaagttttaggtaaggttttgtttgtttattattttagtttttttttttcgggatggttgagaatgtgatgttttttttgttgttaaggagattatatttttgatgtttttttttagatttttgagagttggtgtgtgtttttagtattttttagttgtattattttacgttgtagttggttttaaggtatatttaggggggagttttttgtttattttttttataaagggaagttgttggaatttgaatcgtaagtttttatttagattaaaattaggtaatagcggtgagcgtagttttaaacgtgttaatgatttatttaaatttgagtaagggagttggttgttttaacgagtcgtagggtgatttttttgttattttcggaaatatttattttttagggaatattgggaaaaaatagggagatttttgttgagatagaaaatttgtaggggaattttgttttttatttttgtttttatttgtagattttttttttgataagatttaattttagatgggtcggttgttttttgttttgatgggtgttttgatgggttttattattattattattattattattattattttgatgggttttttgatgttttttttttttttatattttgttttaattgttaagtaaatagttttttgttgttaagagattgtagatgtaatcgattagtagtaaatagtgagttaggttttttttttcggaagtaaaattaattgttgagattattttggggaaaatatttattttatttggaaagaagtattgattaattgatgtttattttttttttttttgagttggagtttcgttttgttatttaggttggagtgtaatggtataatttcgttttattgtaattttcgtttttcgggttttagtaatttttttgttttagttttttgagtagttggaattataggcgtttgttataatattcggttaatttttgtatttgtagtagagatggggttttattacgttggttaggttggtttcgaatttttgatttcgtgatttattcgttttagttttttaaagtttaaggattgtaggcgtgatttattgtgttagttaattaattgattttttatttatttttagttggttttgtttttttaagttaggggattttcgtttgtttgttttttttttaaggaaatgattttagttatagttttgatttttttgtataattgtttttagtagtatagggaaagaaaatatcgaaagtatttattattttatttgtgtgttgggggaaaaagtagaaatgtgtattttttttttttgtttcgatgattttgtttttgatttgttattcgtgatttgagagattagagggttagaggattagaatttatagaggtgttttttttgtttgtttatttttgttcgagttgtttaggttggagtgtagtggcgtaatttcggtttattgtaatttttgttttttaggtttaagcgatttttcggttttagttttttgagtagttggaattataggcgttcgttattatatttagttaatttttgtattttttagtagagatgggattttattatattggttaagttggtttcgaatttttgatttcgtgatttattcgttttagttttttaaagtgttgggagtataggcgtgagtcgtcgtgttcggtttttttgtgtttttgtgtttttgagaggagtttattgttttttaggtttttttagcgtgagaaaatttggggatttatgttttagtttattttttttttttttttttttttgagatggagtttcgtttagattgtttaattttagtttattgtaatttttgttttcggggtttaagggattttcgtgttttagttttttgggtagttaggatacgggtattcgttattatgtttggttaattttgtatttttagtagagatagggtttcgttacgttggttaggttggtttcgaatttttgattttaggtgagtcgtttgttttggttttttaaagtgttgagattataggcgtgagttatcgcgtttggtttaatttgttttttttgaaatttaaatggtttaatatgaaaaacgttaattttgtttgaaagaataagaaagaggtgcggtttcgttgggtcgttgatgtttggaataggattggttttgtttttttgttcggaaagggtagtaattgtgaggatagttttttgacgtgtttttatttagtattgtttcgtttttgagtattgtttttattagttaggttaagggagtttatttggtaggtaattgttgtttggttgcgtttgtggtagtaaaatttgtttttattttttggaggtagggttttgttttgtcgtttaggttgaagtgtgtagttatagtttattgtagtttttagtttttgtatttaattgattttttttttttagttttttgagtagttgggattatacgtacgtgttattatttttattttagtttgtttgtttatttatttatttatttatttattgagatggagttttgtttttgttgtttaggttggagtgtaatggcgcgatttcggtttatcgtaatttttattttttggtttaagcgatttttttgttttagttttttgagtagttgggattataggtatgtattattacgttcggttaattttgtatttttcgtagagatggggtttttttatattggtttaggttgttttcgaatttttaattttaggtgatttattcgttttagttttttaaagtgttgggattataggcgtgagttttcgaattcggttatttttagttaagtttaaattttttgtttgtttgttcgtttgtttttattttttgagatagagtttttcgtttaggttggagcgtagattattgtatttttgattttttaggtttaagttattttttttatttagttttttaagtagttgggattataggtgtgtgttattatgtttggttaagttgtgtattttttgtagagatggggtttaagggattttcgttttgttgtttcggttggttttaaatttttgggtttaagtagttttttttttttagttttttaaggtgttggggaaatttatttttgaaatattgtttggagagttgtttaggtggtagattatagaaataggttatcgtggggttttttttatgggtgtagttttgagttatttgtggttagtaaatatttggagaataatagttaggggagagtttgaggtttagggaaaggttttgtttttttttagggaaaggtttttattgttttttatttttttttaaaggatttttaggtgttattgatattttcggtttatttagtggtatatttagtttgtaagttgggttttcgtatagaggtagggaggtgagagtattggattagtggttattaaagttgcggttatttagtggggtgattagaggttttttttttaagattttgattgttaacgtttttggtttaatttttttttttatttatcgtaagttttttggaattttaattgttttttgtttattcggtgtgttagtataagaaatgagttatttttttttttaagtatagttgaaattgagttgtgagttagtgaggtgtgtacgatattgttaaagcggggtgtgtatagtattgatagatttgtagttgggtaagagaattattagagtttgtgattatagtagattttaaagttcgatttattttttttttttttttttttttttttttttttttttttttttttttttttgatagagtttcgttttgttgtttaggttggagtgtagtggtataatttgggtttattgtagtttttgttttttgggtttaaatgatttttatgttttagtttttcgagtagttgtaattataggtattcgggtttaagtgatttttttgttttagttatttgagtagttgggattataggcgttcgttattacgttcggttaatttttgtatttttagtagagacggggttttattatgttggttaggttggtttcgaatttttgaatttaggtgattcgtttatttcggttttttaaagtgttgagattatagacgtgagttatcgcgtttagtttgttttgttttttaatttttaaaatattttttaggaagtagagattgttatttttttttattttatagattaggaaattgagttttagaaggatttagttagttatttaagttgttttagttaaatggtttggaaagttagtgaagtttaggattgtttatttaatttttttattattttaatttttagggaatttatatgaatgtgttgggttaattattaaagttgaaatggataaagggggttggatgcggtggttgatgtttgtaattttagtattttgggaggtcgagatgggtgggtggattgtttgagtttaagagtttgagattagtttgggtaatatagtgagatatttgtttttgtaaaaaataaataaaaagttagttgagtgtgatggtgtatttttttagttatagttgttgagttaggtttaggtaggaggatcgtatgaatttgggaggtggaggcggtcgtgagttttagttatgttattgtattttaatttgggtaatagagtgaaagtcggtgttcgaaagagaaagaaaaaaagatatagatatattttttaaagttaggttgtatgttaattatttataatttagttttaattgtgtttaaaggaggaaatgatttattttttgttatatattaaattagtttaaaatgtagtggtttaaaataatatatttatgattttttagtttttgcgtgttaggaatttggaagtagtatagttagacggttttagtttagggttttttatgaagttgtaattaaaatattggtaggagagaaaaatatatttttagaagttgtaggtataggaagatttggttggggttgaaggatttatttttaagatggcgtatttagtggtttttggttggaggttttagttttttgttgcgtggagttttttttttagttgtttgagtggatttatgatatgtagttggttttttttggagtagtcgatttaataatgagtatggttatgaattaggtttagaagttattttttgtcgtttttatatttttttattagaagtaagttattaaaagtttagtgttattttaggggagacgaattaggttttgttttttgaaaggattattatagaagatgcggttttatattttttttttaaaattatttttttttttattttgtagagatggggttttggtatgttgtttaggttagtttggaatttttgggtttaaataattttgtttttgttttttaaagtgttgggattataggtatgagttattgtatttggttatgtggttatatttttttttttttttttttttttttttgagatagagtttttgtcgtttaggttggagtatggtggcgtgattttagtttattgtagttttcgtttttcgggtttaagcgatttttttgttttagttttttgagtagttgggattataggcgttcgttaatatgtttagttaatttttttagtagagatggggttttattatgttagttaggatggtttcgattttttgatttggtgattcgtttattttggttttttaaagttttaattatcgattagaatttattgatgtatttatgtagttaggtacggtggcgcgtgtttgtaattttagttatttggaagggttaaggtaggagaatcgtttgaatttgggaggtagaggttatagtgagttaagattatattattgtattttagtttgggtaatagaatgagattttgttttaaaaataaaaaataaatttttgtatgtgatttttttggatagtatttgttatatttttataaagataaaaagttagatttggttgggtatggtggtttatatttgtaattttagtattgagaggttgaggtaggtagattatttgaggttaggaatttgagattaggttgggtagtatggtgaaatttcgtttttataaaaaatataaaaattagtcgggtgtggtgttacgtatttgtatttttaagttatttaggaagttaaggtaggagaattatttgaatttagaggtggaggtttgtagtgagttgagattgtgttattgtattttagtttgggcgatagagtgagattttgtgttaaaaataaaataaaataaaattttaaaaaaggtagatttttttttttttttggtattgttattttattatagtaataataagtgtatagtgtatgttgagataagtaattataatttgttattgcggtcgggtatggtggttttagtttataattttagtattttggttaggagtttaaggttagtttggttaatatagtgaaattttatttttattaaaatataagaaattatttgggtatggtggtagttgttggtgatttttagttatttgggaggttgaggtaggagaatcgtttgaatttgggaagtagaggttgtagtgagttaagattgtattattgtattttagtttgggtgatagagtgagattttgtttgaaaataataataataataatttgttattgtttttattgttttagtttatatagggaattaaagtttatattttgatttataaaagttgttttgattttagtttatagaattagaattttttatataaaggtattagagggtttagtgtggtggtttatgtttgtaattttagtatattgggaggttgaggagggaggattattttaggagtttgaggttagtttaggtaatatagtgagattttgtttttataaaaaattttaatattagttgggtatggtggtatgtgtttgtagttttatttatttggggggttgaggtaggaggattatttgagtttacgaggtttaatttaggttgtagtaagttatgattttgttattgtattttagtttgggtaatagagcgaagttatgttttaaaaaaagaaaaaaaaagtattttaaatttaaatttaatatataaaattaaatgtaggttaagtgtggtggtatatatttataattataatattttgggaggttgaggtgggaggattgtttgagtttaagagtttaagattagtttaggtaatatagtaagattttatttttataaaaagtagaaaaattagtttggtatggtggtgagtgtttttaattttaattatttagggggttgagatgggaagattgtttgagttttagagtttgaggttgtagtgggtcgtgatcgttttattgatcgttttaaagtgagattttgttttaaaaaaaaagaaaatagaagaaaattaaatatatttaataagattttgattttttttttaaggtgtaaatatattttgggaaattttttagttattttgtttttattttaatgtaataatttaagttttggttttttaaggaaaagtttttttttattatattttttgttaatgttttttttttattttttttgatttgatttttagatatatgattatttttattgttaaatttgtgttttttggtttttatatttataattttttataattttttatttaagtattttttttttatttattgaagaaaatttaagtttttttttattttaatgattatgttgtgtttgtgagttttttttatgattttttatagtataagttttttgtttttgtttttttaatggttagatggatagaataatataggttttgtttgttttgttttaatttttaaaaaaattataatagataaagggttttattacgttgtttaggttgattttatatttttgggtttaagtaatttatttatttttgttttttaaagtgttgggattatagttatgagttaatatgtttgggtagtataggttttttttgagacggagttttgtttttgttgtcgaggttggagtgtaatggtataattttggtttattataaagtttgttttttaggtttaagtgatttttttgttttagttttttgagtagttgggattataggtatgtgttattacgtttagttaattttgtatttttagtagagacggggttttattatgttggttaggttggtttcgaattgttgattttaggtgatttgtttatttcggttttttaaagtgttgggattataggtatgagttattatgtttagttgtagtataggttttaatatgttaaatattttttttttttttattaatgtgtatggaagttttaatattttttttttatattttagagagtttatattttggaattaataatattagtttttgttgataagtgttttttttgggttttttttttgtgttttttattgaattttggggtttataaaattttatttgttgtgtttgtttaattttttgggaattagattgtttttgatcggatgatatttttggttaattttttagttggtaggaaatagatataggaaacgtggttagtttttgattttggcgttgagagattttttttttttttttttttttttagt

SEQ ID NO: 1144 - DNA, 15768 bp, Artificial Sequence
  chemically treated genomic DNA (Homo sapiens)
attgagagagaggaaaaggagaaagggttttttaacgttagaattagaaattgattacgttttttgtgtttattttttgttaattaaagaattaattagaaatgttattcgattaggaatagtttgatttttagggaattaagtaagtataataaatgaaattttatgaattttaaaatttagtggaggatataaagaaggaatttaagagagatatttgttaataaaggttagtgttgttgattttaaaatatggattttttggggtatgggaaaaaaatattagaatttttatgtatattaataaagaaaggaagagtatttagtatattaaaatttgtattatagttgggtatggtggtttatgtttgtaattttagtattttgggaggtcgaggtgggtagattatttgaggttagtagttcgaaattagtttggttaatatggtgaaatttcgtttttattaaaaatataaaattagttgggcgtggtggtatatgtttgtaattttagttatttaggaggttgaggtaggagaattatttgaatttgggaggtagattttgtggtgagttaagattgtgttattgtattttagtttcggtaataagaataaaatttcgttttaaaaaaaatttgtattgtttaggtatgttggtttatgattgtaattttagtattttgggaggtagaggtgggtggattgtttgagtttaggagtatgagattagtttggataacgtagtgagattttttatttattataatttttttaaaagttaaaataaaataaataaaatttgtgttgttttatttatttgattattaaaaaaataaaaataaaaaatttgtattgtaaagagttatgaagaaaatttatagatatagtataattattaaggtggaagaaaatttgagttttttttagtaggtagggaagaaatatttagataaagaattatgagaaattataaatgtagaggttagagaatataaatttagtagtgaagataattatgtatttgaagattagattaaaagaaatgggagagaaatattaataaaagatataataagagaaaatttttttttagaaaattaagatttagattattatattaaaatgagaataaagtaattggaaaattttttaaaatatatttatattttggaaaagagattaaagttttattgaatgtatttagtttttttttattttttttttttttgagatagggttttattttagagcgattagtggagcgattacggtttattgtagttttaaattttgaggtttaagtaatttttttattttagttttttaagtagttgggattaaaagtatttattattatgttaggttaatttttttattttttgtagagatggggttttattgtgttatttaggttggttttgaatttttgggtttaagtaatttttttattttagttttttaaagtgttgtgattataggtatatgttattatatttggtttgtatttagttttatatattaaatttggatttagaatattttttttttttttttttgagatatagtttcgttttgttatttaaattggagtgtagtggtaggattatggtttattgtaatttggattgaatttcgtgggtttaagtgatttttttgttttagttttttaaataaatgggattataggtatatgttattatgtttagttaatgttggaattttttgtagagataaggttttattatgttgtttaggttggttttaaatttttaaagtgattttttttttttagttttttaatatgttgggattataggtatgagttattatattgggttttttaatatttttatatgaaagattttggttttgtgaattagaattaaagtaatttttataaattaaagtataaattttgattttttatgtaaattaaggtaataaaagtaataataaattattattattattatttttagatagagttttattttgttatttaggttggagtgtagtggtgtaattttggtttattgtaatttttgttttttaggtttaagcgatttttttgttttagttttttaagtagttggggattattagtaattgttattatgtttaggtaattttttgtattttagtagagatggagttttattatattggttaggttggttttgaatttttgattaaagtgttgggattataggttggagttattatgttcggtcgtaataataaattatgattgtttattttagtatgtattatgtatttattattattataataaggtaataatattaagaagaaaaaaaaatttgttttttttaaaattttattttattttatttttgatatagagttttattttgtcgtttaggttggagtgtaatggtataattttaatttattgtaaatttttatttttgggtttaagtgatttttttgttttagttttttgagtagtttgggaatataggtgcgtgatattatattcggttaatttttgtattttttgtagagacggggttttattatgttgtttagtttggttttaaatttttgattttaagtgatttgtttgttttagttttttagtgttgggattataggtgtgagttattatgtttagttaagtttgattttttatttttgtgaagatgtaatagatgttatttaggaaaattatatataagggtttgttttttgtttttgagatagagttttattttgttgtttagattggagtgtaatggtatgattttgatttattgtaatttttgttttttaggtttaagcgatttttttgttttaatttttttaagtagttgggattataggtacgcgttatcgtgtttagttatataagtatattaataagttttgatcgatggttgaaattttgggaggttaaggtgggcggattattaaattaggagatcgagattattttggttaatatggtgaaattttatttttattaaaaaaattagttgggtatgttggcgggcgtttgtaattttagttatttaggaggttgaggtaggagaatcgtttgaattcgggaggcggaggttgtagtgaattgagattacgttattatattttagtttgggcgatagagattttgttttaaaaaaaaaaaaaaaagaaaaagaaaatatgattatatgattaggtgtagtggtttatgtttgtaattttaatattttgggaggtagagataggattgtttgagtttaggaattttagattggtttaggtaatatattaagattttatttttataaaataaaaaaaagaataattttaaaaaaagaatataggatcgtattttttgtgataatttttttagaaggtagagtttaattcgttttttttggagtggtattggatttttaatgatttgtttttgataggaaaatgtagagacgatagggagtggtttttgagtttagtttatggttatgtttattgttggatcgattgttttaggggaggttagttgtatgttatgagtttatttaagtagttggagggagagttttacgtagtagggaattgaggtttttagttaagagttattgagtgcgttattttggaagtggattttttaattttagttaagtttttttatgtttgtagtttttgaaaatatgttttttttttttgttaatattttgattgtaattttatgagagattttgagttggaatcgtttagttgtgttgtttttaaatttttgatacgtaaaaattgagaaattataaatgtgttgttttaagttattatattttgggttaatttgatatgtagtaagaaatgagttatttttttttttaagtatagttgaaattgagttgtaggtaattaatatataatttaattttaaaagatgtatttatgtttttttttttttttttttcggatatcggtttttattttgttgtttaggttggagtgtagtggtatgattgaggtttacggtcgtttttattttttaggtttatgcgatttttttgtttaagtttaatttaatagttgtgattagaggggtgtattattatatttagttaattttttatttattttttgtagagataggtgttttattatgttgtttaggttggttttaaatttttgggtttaagtaatttatttatttatttcggttttttaaagtgttaggattataggtattagttatcgtatttagttttttttatttattttaattttgatggttgatttagtatatttatgtggattttttgaaagttagagtagtaagggggttagatagataattttgggttttattggttttttaggttatttaattagaataatttgggtaattgattaaatttttttgggatttagttttttgatttgtaaaatgggggagaatggtagtttttattttttagagggtgttttgagaattaaagaatagaataggttgggcgcggtgatttacgtttgtaattttagtattttgggaggtcgaagtgggcggattatttgagtttaggagttcgagattagtttggttaatatggtgaaatttcgtttttattaaaaatataaaaattagtcgggcgtggtggcgggcgtttgtaattttagttgtttaggtggttgaggtaggagaattatttgaattcgaatgtttgtaattgtagttattcgggaggttgaaatatgagaattatttgaatttaggaggtaggggttgtagtgagtttagattgtgttattgtattttagtttgggtaatagagcgagattttgttaaaaaaaaaaaaaaaaagaaaagaaaaaagggaaggaagagagaagaaaatgagtcgagttttggaatttgttgtggttataaattttgataatttttttgtttaattatagatttgttaatattgtatatatttcgttttgataatatcgtatatattttattgatttatagtttaattttaattgtgtttaaaggaggaaatgatttattttttgtgttgatatatcgggtgggtaaaaagtaattgagattttaggaggtttgcgataaataaaaaggaaagttgggttagaggcgttggtaattaagattttaagggaggagtttttgattattttattaggtgatcgtagttttggtgattattaatttaatgtttttatttttttatttttgtacgagggtttagtttataaattaaatgtgttattgggtagatcgggaatgttagtaatatttgaaggttttttaaggagggataaagaataataaaaatttttttttgaagaaaaataaaatttttttttggattttaagtttttttttgattattattttttaaatatttgttggttataggtggtttaagattgtatttatgggaaggattttacgatgatttatttttgtgatttattatttgggtaattttttagataatgttttaaaagtggatttttttagtattttgggaggttgaggagggaggattgtttgagtttaggagtttgagattaatcgaggtaataaagcgagaattttttgaattttatttttataaaaaatatataatttagttaagtatagtggtatatatttgtaattttagttatttgggaggttgagtggggaggatggtttaagtttgggaggttaaggatgtagtgatttgcgttttagtttgggcgggagattttgttttaaaaaataaaaataaacgaataaataaataaaaaatttaaatttagttgggagtggtcgggttcgggggtttacgtttataattttagtattttgggaggttgaggcgggtggattatttgaggttgggagttcgagaatagtttgaattaatgtggagaaattttatttttacgaaaaatataaaattagtcgggcgtggtggtgtatgtttgtaattttagttatttaggaggttgaggtaggagaatcgtttgaattaggaggtggaggttgcggtgagtcgagatcgcgttattgtattttagtttgggtagtaagagtaaaattttattttaataaataaataaataaataaataaataaataaattgaggtgggagtggtaatacgtgcgtatagttttagttatttaggaggttgagagaggaggattagttgagtatagaagttggaggttgtagtgagttataattgtatattttagtttgagcgatagggtaagattttgtttttaaaaaataaaggtagattttattgttataggcgtagttagatagtagttgtttgttaaatgagtttttttggtttagttagtggggatagtgtttaggaacggaatagtgttgagtgagagtacgttagggagttgtttttatagttgttgtttttttcgagtaaggggataaaattagttttgttttaaatattaacggtttaacgaaatcgtattttttttttatttttttaagtaaggttggcgttttttatattagattatttgaattttaggaaaagtaaattaggttaagcgcggtggtttacgtttgtaattttagtattttgggaggttaaggtaggcggtttatttgaggttaggagttcgagattagtttggttaacgtggcgaaattttgtttttattaaaagtataaaattagttaggtatggtagcgggtgttcgtattttagttatttaggaggttgagatacgagaattttttgaatttcggaggtagaagttgtaatgagttgagattaggtaatttaagcgagattttattttaaaaaaaaaaaaaaaaaggaagtaaattagagtatggatttttagatttttttacgttagggaagtttaaaaagtaatgagttttttttaaaaatataaaaatataaaaaggtcgggtacggcggtttacgtttgtatttttagtattttgggaaattgaggcgggtggattacgaggttaggagttcgaggttagtttgattaatatggtgaaattttatttttattgaaaaatataaaaattagttgggtgtggtggcgggcgtttgtagttttagttatttaggaggttgaggtcgaagaatcgtttgaatttgggaggtagaggttgtagtgagtcgagattgcgttattgtattttagtttgggtaattcgaataaaaataaataaataaaaaaaatatttttataaattttagttttttagttttttgattttttaagttacgagtaataagttaggaataaggttatcgaaataaaaaaagagaatatatatttttgtttttttttttagtatataaatgaggtggtgaatgttttcgatgttttttttttttgtgttattgaaaatagttgtataaggaaattaaaattgtagttagaattatttttttgaaggggaaataaataaacgaaaattttttggtttaagggaatagagttagttgaaaatgaatgagaaattaattgattggttggtatagtgggttacgtttgtaatttttggattttgggaggttgaggcgggtggattacgaggttaggagttcgagattagtttggttaacgtggtgaaattttatttttattataaatataaaaattagtcgggtgttgtggtaggcgtttataattttagttatttaggaggttgaggtaggagaattgttggaattcgggaggcggggattgtagtgaggcgagattatgttattgtattttagtttgggtgatagggcgagattttaatttaaaaaaaaaaaaaatagatattaattgattagtgtttttttttaaataaggtgggtattttttttagagtgattttagtaattgattttgttttcggaagagagagtttgatttattgtttgttgttggtcggttatatttgtagttttttagtaataaaaggttatttgtttgatagttgggatagagtgtggaaggaaaagggatattaaaaagtttattaaaataataataataataataataataataataaagtttattaaagtatttattaaagtaaggagtaatcgatttatttagaattggattttattagggaggaagtttatagataagagtaggaatgaggaatagaatttttttataggttttttgttttaataaaggtttttttgtttttttttagtgttttttggaagataggtattttcggaaatgataagggaattattttgcggttcgttaaagtagttaatttttttatttaaatttgggtgagttattgatacgtttggagttgcgtttatcgttgttgtttgattttggtttaagtgaaggtttgcggtttagattttaataatttttttttgtaaaggaaatggataagaaatttttttttggatatgttttgaagttagttatagcgtgaggtggtgtagttagaaagtgttagaaatatatattagtttttagaagtttggaggaaaatattaggggtgtagtttttttgataatagaggaaatattatatttttagttatttcgggagagagaaattaaagtgatgaataaataaggttttgtttaagatttttttaatatttttttttaaggaagaggttgattggtgagtgagatatatattaatttagtgttttttttttttttgtaaaattgagtggtagaatgtttgtaattattattattttcggtggggcgcggtggtttatttttgtaattttaatattttgggaggttgaggtaggaggatcgtttgaggttaggagtttaagattagtttgagtaattaagcgagattttatttttataaaaagttaaaaaataaataagtaaataaaaataaaagaataattattcgtattttattatattttttttttttttttggttttttagaggaaattggtgtgttagttatagcgtgaattttaaggtagtttaaagttttttatttagttaaagttaatttttttgttaattaaaaaaaaagttttttgtaatttttgtgtttattaggtaattttaatttttttttaggttaggttggtttttaggagggaaagggttatgtagttgttgtttagggcgaggttgtttttttgtaattaatttaaagttatttaaaaagttttaatttaggattatgtattaattagttttttgtggaaatttaaaatttaatttattttatttagaggaaaaatcgtcgtttggatagttgaatcgaagttatttatagtttttgaagaagcgaggttattttagggggtcggtttcgggggatagttgttttatcgtggttgaagatttcggttgtagattaaggaggggcggggagattttgaggtaacgttttaatttcgtaaggaatcgaggttttgagggtggtcgggggtttttttgtgaatttgatcggggttggtggggcgagggcgttttttaggataaggtggggacggaggtgtcgttatagagtatagcggaaatcggggatttcgttaggagggtttaggataacggagggcgattcgtgtatgtcgcggaggcggtttcggggattcgggatttgtcgtcgtttttgtgataggaatcgcggaggaacgttaggttttttttgtattcgtttcgtttcggataaggtgaggtttagattttcgcgttagtttcgtttcgttcgtatataagtttcgttttttcgacgttcgttttcgtttttatcgttttatattggataaggggagtggttcgagggtggtttgttggattatatttaatggaattcggggggcgggttaaaggggcgggggtaggggcgggagggggtggttttcgtttcggagtacgcggcggaatttcgggattgtatttaatttaggatggtagtggcgttttggggtcgcgtaaagcggatcgggatttttgagttcgcggtgatttttaggttggatattcgggtttttagtcgttttcgtttttagaaggatttaaggcgggggtgggagtgattttttgttttaggattggaggtttttatatttagtttcgagttagaagagagggtttcggtcgggcgcggtggttgacgtttgtaattttagtatttttgggtagattatttgaggtcggggttcgagattagtttggttaaaatggtgaaaattcgtttttattaaaaatataaaaattaggcgggcgtggtggttgggcgtttgtaattttagttattcgggaggttgagagaggagattcgtttaaattcgggaggcggaggttgtagtgagttgagatcgtgttattgtattttattttgggcgatagagttagatttcgttttaaagaagatgcggttttttattttgtggagatttgggggatagcggtgtttcgttttttttaaattttttagatttttttcgattttcgcgttttttttagcgtttttttttagcgttttttttagtcgtttgggaaggatttcgtgttattattttataagttttttagggatggagtgattatttgtatttaaaaaaataaatttttaagggtttttcgggggtttttttttaatttattttggcgtttggagtaagttttatttgtagttttcgtcgcggcgaggagtaaggcgacggtttagcgtaatttttagttttagggttttatgttcgtagtttttgttaggtagtgtttcgattcggattacgatttgttgtgttttagttggaaattttggtttttcgcgattgtattcggggtttacgttatttatagtattttaatgtgaggtttttagtagggggaggagtttgtagtggggtgatttttaaatgtttttattttattgtaagaggaggagtttcgaacggtcgatgtgatatcggttttttaattcgtgaagttttgatttttattttagtttttcgaaagtgtcgttagggtaggcgatttgatttgttgtatttgggttttcggtgaagagttgacgtttttttaaaattggaaacgtattttttgaaagatttttttgaaatttttcgatgtttaattgttaatattttgttgttgttgtttatagaaggataataatagttttttaagattttttaatagtttaatgttattgttttttttgttttaaaaggaaaatattaaaaatgttgggaattttcgttattttttatatttgtttttttttttttaggaattgtgtatagatttttagttttttttcgttgtatattgtttttatattgttattttaaattatttaatagatattgattaattaggaatttaaataaaatttttataaaagtatagttaaaaaaatattttttgttttgtgggatttcgtttttggttgagtataaatatttgaaaaattaattgtacggatatttggagtttggacgtaaatattgatttttttttttaggagaaggagttgaataaatagaagggcggtttttttttttttaaagtaaaattaaaataaaatagggtttttatagttgaatttgaatttttaagttatagagagttggtggagattaatttttagaattgagtttttttggggatttatggggttgttagaggttttttgttaaaaaggtatatgtgagaaatttgtttgaattttatatagggttgggtagttttggcggtttttttaggaataagttggatttttttgggattttgtaaattgattttggtaggtagtgttaattttttagtaggattttagggaaatttaggagattaggtagaaaagggataaattgaatttttagaaggataaaaaaaaagattaattagggaaaataattttttaattatttttattataattttttaaataattatttattatttatttattattatttttagttgttatttaggttggattgtagtggcgtgattatagttttttgtagcgttaattttgggtttaaggaatttttttattttagttttttgaatagttaggattataggagtgtattattatgtttaattaatttttaatttttttttatagatggggttttattatgttgtttaggttggttttaaatttttagttttatttaatttttttttttttgtattatgatgttttttaaattgttggttttataggtatgagttattgtgtttaatttagaagaagaaattgatgataagaatttttggtagttaagatttagttttagaattcggttttggatagataaattagtttttttaatttgtaaaggggttattaaaatgtttgaatttatttggtaggtttagtgttaaggttaaattgaaataattagcgggttgggtatggtggtttacgtttgtaattttagtattttgggaggttgaggtaggtggattacgaggttaggagattaagattattttggataatatagtgaaattttatttttattaaaaaaaaatataaaaaattagtcgggcgtggtggcgggtgtttgtagttttagttattcgggaggttgaggtaggagaatggcgtgaattcgggaggtggagtttgtagtgagacgagattgcgttattgtattttagtttgggcgatagagtgagatttcgttttaaaaaaaaaaaaaaaaaaagaagtaattagtaattatttagagaagtttataaggataggtaagttttaggagttgttgtaacgtttataaatgtgtttttattgaattttattttttatgttatttgcgatattaaataaaaaagtgaagtttggatgtggtggtttatgtttgtaattttagtattttgggagggtgaggcggggggattatttgagtttaggagtttagaataagttagggtaatatagtgggattttgtttttataaaaaatataaaaataagttggatatggttgtgtgcgtttgtagttttagttattcgggaggttgaggcgggaggatggtttgagtttaggaggttaacgttgtattgagttgtggttgtattattgtattttagtttgggcgatagagtgagattgtgttttaaaaataaagataagtttaaagatttaatttaaagtaaaaaataagtaaataaaaatttaaaaagtaagtattattggatttttttttttttttttttttgagatagagttttgttttgttatttaggttggagtgtagtggtgtgatatcggtttattgtaacgttttgtttttaggtttaagcgatttttatgttttagtttttcgagtagttgagattataggtgtatgttattacgttcggttaatttttttatttttagtagagacggggtttcgttatgtttgtcgggttggtttcgaatttttgattttaggtgatttatttgttttagttttttaaagtggtggaattataggtgtgagttattgtattggtttaatattattgggtttgattttttttaaaaaaaaatttaaggttgggtgcggtggtttacgtttgtaatgttagtattttgggaggtcgagacgggtggattacgaggttaggagatcgagattattttggttaataaggtgaaattttatttttattaaaaaaatataaaaaaattagtcgggcgtggtggtgggcgtttgtagttttagttatttatgaggtagaggtaggagaatggtatgaatttaggaggcggagtttgtagtgaattaagatcgcgtttttgtattttagtttgggcgatagagtgaaattttgttttaaaaaaaaaaaaaaaaaaaaaaaaaatttaagatggttagttatagtggtttatgttttataattttagtattttagaaggttaaggtaggtggattatttgaagttaagagtttgagattagtttggttaatatggtaaaattcggtttttattaaaattataaaaattagttaggtatggtagtaggcgtttgtagttttagttatttgggaggttgagttaggagaattatttgaatttgggagatagaggttatagtgggtcgagattacgttattatattttagtttgggtgatagagggatattttttttgaaaaaaaagaaaaaaaaaatgcgtcgggcgtggtggtttatagttgttttatatttgtaattttagtattttgggaggtagaggtgggcggattatttgaggttaggagttggtgattagtttggttaataaggtgaaatttcgtttttattaaaaaaaaaaaaatataaaaaattagttaggcgtggtggcgtatgtttgtaattttagttattagggaggttgaggtaggagaatcgtttgaatttgggaggtagaggttgtagtgagtcgagatcgtattattgtattttagtttgggtaagaagatcgaaattgttttaaaaataaaaataaaaaattataagacgtaggtttagtgtgtgttatgagtttatatttggttatttagaaagagttattaggagagggatttttttttcggaaggtatttggtttatatagtttttagagttagaggttagggtaggtttggaaaagagttataaaaattttgaaaagtatatttttcgggtgttaaggtttggttaaggtttttagaatagcgttttttaggtttttgatttgtttgttatgtacggatacggttatatatggttttgaggattgagttatgttgataaatttttttgttttttggtttttatttgtgtttttgtaattagtttatagggtttttgtaaggattaagttaaaatatataaagcgattagaggttaggcgaggtggtttatgtttgtaatttttagtattttgggaggtagaggtgggaggattatttgagtttaggagttggaaattagtttgggttatatagtgagattttgtttttataaaaaaaaaaaaaataattagttaggcgtggtggtttatatttgtggttttagttatttaggaggttgaggtaggaggattgtttgagttaaggaggttgaggttgtaatgagttacggtcgcgttattgtattttagtttaattaatagagttaggttgttttttaattaaaaaaaaaaaagtgattagagttatattcggtgtataataaatattatatatgggtttgtttttttttgtggttgtttttgtgttgtaattgtatttttttttttttatttttttagggaagatttgttagtttttgttgtttttttttttttgtttttttgttttttgttttttgttttttgacggagtttagttttgttatttaggttggagtgtagtggcgcgatttcggtttattgtaattttcgtttttcgggtttaaataatttttttgttttagttttttaagtagttgggattatagttacgtgtacgtgttattacgtttggttaattttttgtattttttttttttttttttgagacggagtttttgtttgttgtttaggttggagtgtagtggcgtagtttcggtttattgtaagttgcgtttttcgagtttatattatttttttgttttagttttttgagtagttgggattataggcgttcgttattatatttggttaatttttttttgtatgtttagtagagatggggttttatcgtgttagttaggacggtttcgattttttgatttcgtgattcgttcgttttagttttttaaagtgttgggattataggtacgagttattacgtttagtttaattttttgtatttttagtagagacggggtttt

SEQ ID NO: 1145 - DNA, 15714 bp, Artificial Sequence
  chemically treated genomic DNA (Homo sapiens)
attgttgaatattagtagttgggtgtttttagtaattatgtttatatgaagtattttagttttatttattttttttgtgtttttacgagtagtattgagttgtagatgggaaagtgtatggaaatatgattattttttttttagggtaaagagggttggtgtttttttttttaaaatttattttgaatttgttttttttgtttttttattattttttatttatgtttttgagttattgttgagttttagggttgtattttttttattttggaatttttaggatttagtatagtatttagtgtatagtatgtttttaatgtatgttttttggtttaatgaatgaatgtatgaaaaaatgggtaaataagtaagttttaataatttgttattttgatttttattttttgtaattttttttgtattttttgtaatttttgttttattttttgtaattttttttatatgtttttgttagttgaattttttaaagtggtgattcgattacgtgaattttttttggtgattttaatggtttttattgtttgcgaaggttttttaaaatttagttgtttgttatttttttttgtaaggatttttttttttattttttaaagttttattttggttgatttggtttttttgtatttttttttgtttttgttgagttgtttttttttttgtgtagttatttagttgtttgtgttgatatttgttgttggttaagtttgttataagtttagtgtgatattttttttcgtgatgggttgattatagtaaggttttaatttagtggtgtttttttttattgttgggttgggtaattttttagttattttgggtttgattatgtgatttgttttggttaataggaaataggatgttagtagagatttgaaaagtgtttgtttattggggtttgttattttttgttgttttagggaatttagtagttgttattatgtaaataagtttaggttagattagttatttttattattttagttgatagttagttagttattataggtatgagttaggttatattgttggatttatagaattatgagttaaataaatagttttgggttaagttattaagttttaggtatagtgtgttatgtattttataaatatataagattgtgtgtttgttgattggaggaagagatgttataaagattattttttaaaattttttaaatattgttattgatgttttgatggaggtatgaaaatatttattaaaatttgtggtttatttattttttattattttgtttaaggaggtttatagtggaagagggagatatttggggaaattttgtatagattagtttttacgatgttagggaattattattgtgtgataatggttttgtagttatatagaaatttttttttattttttgggaagtattaaagtagggataaaatgttatgatgtgtgtaatatattttaaaatgtttttgttaaaataattaatgaagtaaatatggaaaataataattattaaatttaggtgatgggtatattgtagtttattatagtattgtatatttttttgtatgtttaaattttttatttaaaaaattttgagttagatattaggttatgagttaggagtatagtaatgattaaatagatttttattaatttaaagaatgtatattttttgggaaatatgtttttattaggaagtttcgaatgtaatgtgattgtggtttttaggatttgtgtgattttggttttttttgtttttttcgtattattattgtaggtgtgtttttttaagttttaaatatttatttttttagtggttttgcgtttagaggaatttttgtatagtggtatatgaatataatatataataaaaattatttttatggtgtgtgttgtttttggggtttaatttagtaaattttttttgggtatttatgtgtttttggtattggaaaagtatcgggattgaaatagttgatggtttaatttttgtttttttaaaatttaagggaggagatggaaaggggtatttaatttagattgagagataggaattagttgtaaggggaattaggaaaagtttttttaaggatggagaggttttagtggaatggggagattttttcgggagaagcgatggatgtatagttgggtatttttatagacggattggaaagaaaaaaggtttggaggaattaatgtgtaatgtatgtgtgttttttggtttaagggttgggaattttttttaaagggttaggtagaaaatattttaggttttttaagttaaggtaaaattgaggatattatatgggtatttatataataagaataaataatttatataattttttgttgatagaatttaaaattttatagatatagaaatgtaaattttttgtaatttttttatgagaattattttttttttgttttgttttgcgatagggttgcgttgattttttcgttttagtttttttaagtgttgagatgttgtaggaagttagggatttcgaatagagagatcggttggagtcgtggtagaggaatataaattttgaagattttattttaatatggatatttattagtttttaaataatatttttataattttttatgtttgtttttgttttaattttttaattttgttatttttataagttaaggatgtacgttattttaggattattgtgataattgtgttaattgtatagattgattgtaaaatatgtgtgtttgaataatatgaaattagtgtattttgaaaaagagtagaataatagtaatttttagggaataagggaagataattataaggtttgattgtttgcggggtcgggtaaagggagttatatttttttttttgtagagagtttataaatagatttgtaagtaggagagatattgttaattttttttgttagtatggaatattaatattaatattttgggaaaggaatgtatttttggggggaggtttataaatggtcgttttgggaatgtttattttacgtaatggagataaggattgagatacgttttggttttttgtagtatttttaggtttattagggtggtgaaaaatttcgttttggtaaatttgtggttagattagttttttgttttcgaatattgttttttgttgtttaagatgtttattaagataatacgtgtatcgttgaatatagatttttattagtagtttttttttttgttttttgaagtatgtgatttattttttgttttatatttttttattttttgaaatttttaataaaaaatttgttggtttgaggtttaggtgggtattatagtattatcgatatgtgatgttattttcggcggtttagttgtaaaatttttttttttgtattttttttttttattttttagttagttgatatttatggaaaatagaaagaatttacgttgaaatattgggggtaggtttttttaatatttggtgtttaacgtgggatattgagattataagtatgagttattgtatttggtttttttttttgattttttttttttaaatttttataaatgtagaaattatttttagtttttgggtattattaaattcggtagtggtaggttcggtttattaacgttatttgtagtttttcgttttatgttatgggttttgttttgttttgttttttttattgagatagagttttatttttgttgtttaggttgtagtgtaatggtttgattttggtttattgtaatttttattttttaggtttaagttatttttttgttttagttttttaagtagttgggattatagatatttattattatatttggttaattttgtatttttagtagagatgaggttttattatgttggttaggttggtttcgaaattttgattttaggtgatttatttattttggttttttaaagtgttgggattataggtttgagttattacgtttggttgggttggtttttaatggagtggtttgtttttggagttgttttgcgtagtggggattagaataggtttgggtttttagtttattgttattttttattagttgtggattttaaggaaagttatttaatttcgttggattttagattttttatttttgaagtttaagggtaaaataaaataaaataaaataaaataaattaatttattatgtaaagcggggaattataaacgatataggtgaaatatgtttattatattatttataggttatgatgataaaaacgtggttatatttgggattattttttaatttttattttgtacgtaggaaatacggagttgaggatggagatttatagtatgtttagagtgtttttaaaggttatagtgttcgtttggagttttttagagagcgtgtattttttggggtgttagttagagataatttgttttgaggtttggaattcgatttttcgcgtgttagagaaggggtgggattttagaatttttaatttcgtaatttgggtcggggagtttggcgtattgcgggtcgttttttttaattttgggtttttttggcgtttagggtcgtcggggtcgagtttcgattcgtttttatttcgaagtcgcgttaggattaacgagggcgtagtcgtatgttttagttcgtttcgcggagttttttatagttattttcgtttcgatcgcgtttcgcgcggttcgaagtatttttttaaggggttggtttttgcgttatagtcgcgtcggagtttttggagggatattaaggatttttcgtttttattagttatttttaaatttttgggaggtatttaagggtgcgcgcgtggtttttggcgcgtcgaggttttttttcgaggtttcgcgaggtgtatattgcgggtttagggttagtagtcgttcggtacgtcgttattttgaggggcggggcgggagttggcgttagaaatgcgtcggggtttgcggggtagttgcgtaagttgtgatcgggtcgttataagaggggcgggtaggtatggagtttcgtaggaatcgtagcgttagcggttgtaaggtaaggtttcggcgcgtttttttttttttttttgttggttttttttggtaggttatagggttttatataattttggatttcggggaaattgagttaggagggatgtagggcggatggtttagttttggattatgatagttttgtatcgagttttagttagatagaaggttatcgggagttggggagcgttggatttgttgttgggttgtgtcggtgtttagaaggtaggattttgtagaattagttaggtttttgggagattgttagatttattaatttggtggtattcgtagagttgagatgtattggaaattgttttgggtatatttttaaagattaggatgttttattttagtttgaaggagataaagttgggggtaggagagacgtagatgtaagtgattagttttagttttagatattgttttgttttgcgggtaggaatttaggatttattttttagggaagtttttgatttttgaatgagaggggttgtgtaaggttaatgtttgggaggaaggtaaggatgagtagaggtggggggaaataagtgttaggaagatttaaaattttttagagaaattgtgtagggttttattagatttgtttttaaagttatgtaaattgttttttttgtaatgtatataatgaggtgtttttgggggttagaattggttattagggaatttttagttaggattgttaaatacgcgttgttggtttattaggtttatttatagtttttttttagtttgggtttggtttggattttattgtgggtgttatcgtttttatatttttgtttttatagtttaaagatagtggtgttttgggaaagtgattttttaaatatagttaggtttaagtgagataagtggtttggttgttattttagaatagtagtttttaagaggtgattaatttttgttggaagggtgatttttggggaggtgggtgaagagtagagatttggtggtatcgttttaggagtataggttttttttttttgtagtgtagaatgatttttggtagtcggagttgtgtttgttttgtaggattttgaggtgggttatgggtagttggaattggggaattttgttaattttttttatattaggattgtttgtagaattagatatggaggtttttagtaacgtgagtgtttttgttttaatgtttttagaaataagaaggttatattgattattttttttatttaggtagggagataaggtaagagagaaatagtggatgtttttaggttttttttttttttaagtagttgtggatattgggttgaggggaatatttttatattggttaaaggagcgttttttttatattttgtatattttatatttaaaataattttttttggtatttggggaaatattttttttttcgtttattttaggaaatggttttaagtgttaaggatagagttagggaagttgtaatgaatttttgttcgttagttttaggtagatgttttgtacgtttgagtggtttatgtagagcgtggaggtggtcgttacggaatttgggttaatgttttattttcgtttagatgttattaggggcgtgggagttaaggagagaagaggggttttaggaaggtagagtttttgtgttttgtgtatttgtgaatagtattggtatgatttaaaggaaaattgagttaaatttttcggtagttagttattttatttttatcggggtaggagtttggtagtcgtagttttattttggttagtcggtagagagttttgaaatttttttttgtttatatagttgttttagagaaatagagaggttgtttttgtttaaaaataatatatttggtgtttgggtttatagatttttttgtatttattttacgtgtgatagttaatgtgtttcgttgtttagtagatagtatgttatcgttttttttgtttagtttgttagttttatggaatggaatttataattaatgtttatattaatattttattaatattataggagatttagtttttatttgggtgtatattatatttgttttggggtgttttaggttggggggttgttaaggaagagaagagaaatcgtagagaagacgggagggtagggtaggggtttttgagaaggggaggggttttagagtgtaggagtaggagttaggtttatgaaaggggttacgggcgggagtatttagggacggtagttaagatggagtatagtttaggaagttgaagggaattttggtttatttgggtgttagagggtatataggaagtgtaggaagtagattaaggtttttaagagagggagatttggacgttgaagtattttttgtttttattaagataatttcgtaagaatttttgttgggttaaagtgaattttaggatgcgattttaagatgggagtaagcgaattattgaggaggtaggttattttagttagttaatgtagatcgagaatgggaaattttttatttatttatgtaatagatatttaacgaagttttgtcgtgttttaggtttgtgatagatgttggaataggtatagagatataggtgttattaattgattagggtaatttttttttttgagttttgttggagttttagatgttttttatatagagttcgagggagttttaataattgattagaagttaggtattatggtttacgtatataattttagtattttgggaggttaaggtaggtggattattggagtttaggagttttagattagttggggtaatatggtaaaattttatttttattaaaaaaaaaaaaagtaattggatgtgatggtatatatttgtagttttagttatttgggaggttgagaggtgggagaattgtttgagttcgggaagtcgggggtttagtgagttttgattatattattgtattttagtttgagtgatagagtaagattttgatatatatatatatatatatatatatatatatatagattagagttgaaataggagtagaaatttatttgtatttttgatgagattagatttttttgatgaatagaaagaatgtaatttttgtatttatattttttttgttggttatatatgttaatacgattttttaaatgaggtttttggttgtaaataagagaaaattatttacgttggttttgtgttttttaaattgtttattgtgattaatatttgaaaaaagagtcgagatttttaagagtgtattatttacggtaagggtgaattttattttttgatatttattttttttatatgtatttatttgttttaaatgaaaaatatatttagaaagttgaaagttatttaagtgagtataagaaaagagtattttattttgaaggttaaggatagggagggttattaggttttacgaggatttaggaattataaagaaggttaggaaggagtataggcggtgattatattttggtttagtggttatgtgggttttggttttttttagttgttttatgtatatgaggttaaatgtggttattttagagtttttgagtttttaatagagatgaattggattttttgtagttttattttaaatttttaagagagaagttgattgatttaattagggttaggagaaggaagggaggaggaaagggaggagagaagagttttttcgttttttgtttattattggttaggtaattgtagttaagggggttggagtgtaaatgtaaatatagttattaagggttgtgtatgtgtgtgtgtgtgtttgtgtgtgtgtatgtgtgttttttgggtaggttagattttttaggaggtttttattaaatagatttaagttcgtaaaattttagttttttagttttatatattttatttttttattatattgaatttttttaaattaattatggttttttttaatttcggagtttggtttggaatgttttgtttttttttttttttttggggaacgtttgttttttaggttttagtttatatattgttttttttgtaaagttttttttttattttcggagtttttttttttttttgttttttgggttttatgtttttttttttataatttttattaggttgtgttaaaatgagttgtttaaggttttgtttgttttattagattttgagtaatttggagaacgaagatttaaatttcgttgtttttatttttttttttgttttttttttatttttaagttttttttaatttggagttatgaagaaaggaaggaaggaagggtgggagggaagaataggaggggattttataggagaatgtgtatagggagaggatttagattagttaaagttttttttttataattaatagtaaatattatgttatttgaatttaatttatagtagtatataaaagattcgttttgttttttttattgatgttattagagggttgtgggtaggtttaattttggtttaggaggttttttagtttggatttaaagagtagtagatgggttaggttcggtggtttatgtttgtaattttagtattttgggaggtcgaggcgggtggattacgaggttaggagtttgagattagtttggttaagatggtgaagtttcgtttttattaaaaatataaaaattagttaggtgcggtggtgggcgtttgtatttttagttattcgggaggttgaggaggttgaggtaggagaatcgtttgaattcgggaggcggaggttgtagtgagtcgaggttacgttattgtattttagtttgggtaatagagtaagatttcgttaaaaaaaaaataaaaaaataaaaaaataaaaaaaataaagaggagtatatatttttgtttattttaatttttattttgatattgaggtttttaggatggagggtttgtttttatttgttttgttttttgtaatggtgggaaggtgatggagtttaagtttagaggttattagttttttagggaggtaggaggtggagggtggggtgcgggttttgtatataattgttaagtgaggatgggggtggggtttatttgaggataagtaatagtgaggttggtgtagaggatttaggtggaggtagatagtagaatttgtggtggggtggatggtatattatataagttttttttgttgttttgtttattgagattgttttattattttttttggtttttgtttttaagagatggggttttgttgtgttatataggttggagtgtattgtgtgattatattttattgtagtttcgatattttgggtttaggtaaattttttattttggttttttaagtagttgggattataagcgtttgttattatatttagttatttttatttttatttttattttttttagagatggggttttgttgtgtcgtttaggttggttttgaatttttgggtttaagcgatttttttgttttggttttttaaagttttgggattataggttgagttattatatttagttatattttatttgtgtagttttaggggttttatattttattttttttattttttttttagggtatttatggtaagggatgagggtagaagatggggtagttaggttttgattaaaggagaaggaaggtagtttgtggagagggtagtttagggagtgtagagagaagtgggttatgagggagatagtagagtgtaggttgcgttttaaatgagtatatagtttattgtgagtttattatttttttagagattttttttttttttaggagttgttttagtagtatttagaggaaagaatgatgttgtattaatattttagtagtttattttttaattttaagaaaatggtagtttttaaatgtttaaaattgttttggaaatttttggagagaggttttgtagtttaggtagatagttgatcgcggttttttttttattttaatttatgttttttttatgtttttttgttatagttgtagcgggtttttgggttttatatttgtagttttttgtttttgagtttagatttttaattttaagcggtagttgggtaggtttattagtatgtttagttagtattaggatattagtaggagtttaattatttttttttaaaatttttttttatgttttttttagtttttatttttatttttttagttagttaggttgaaaatatttgttttttagggtgtagaagggaaagttttgtttttttttttggtgtttattgtttttgcgattttagtttaagtttttttcggttttttattttggtgttagttggaagttattattttttaaatttatttgtgtttttttatttttgttagggttgtttttttttttatttttataaatttaatttttatttatttttaggttttttattaaatgttattttttttatgatgtttttttgatttttttgttggaaataatggtgataatagttaaggtattggggttggttacgtgttaggtaaggagttggtattttatatgttttattttattttagttatataatatcgataggtggtattatgatttatattatttttatttgatagttaggaaaattgagttttagagaggttagttatttttttagggttttgtgttttgatttaagtatagttttgaggaattttagtatttattagtttaagtattatgattttttttgttgagttatttaaggtatttttttatttaaatgtttttttttggttaggcgtagtggtttaggtttaatgcggtggtttacgtttgtaattttaatattttgggaggtcgaggtgggtagataatttgaggttaggagtttaagattagtttggttaatatggtgaaattttatttttattaaaaatataaaaaaatgaggttgggcgtgatgatttatatttgtaattttagtattttgggaggttaaggtaggtggattatatgaggttaggagttcgagattagtttggttaatatggtgaaattttatttttattaaaaatataaaaaattagttaggtatggtggtaggtatttgtaattttagttatttgggaggttgaggtaggaaaatggtttgaattcgggaggtggaggttgtagtgagttaaggttgtattattgtattttagtttgggtaaaaagagggaaatatcgtttaaaaaagaaaaaaaaaaaattagttaggttgggtggtgtatgttcgtaattttagttatttaggaggatgaagtaagagaattgtttgaatttaggaggtagagattatagtgagttgagattataatattgtattttagtttaggtaaagaataagattttattttaaaaataaataaataaaaataaatgtttttttttgtaatgaagttaaatatgtaaatttttaaattagttgtttaagggtatagttttgttttttatttatatttttaataaatattttatgtaagtagttgataaaattaaatattgtgtatattatcgaggtttttttgggaaagttattagtttttgttttatttttttttatttttgattttatttttttgtgtttttatattttttttatgtttgtttttggtttatagtgggcgattaatatatgttagttattaattattaaatttatattgagtaattatggtatgttaggtattatgtttaatgaaattgtattaggtttgtataaaagtaattgtggtttttaagagtaatggtaaaaacggtagttattttcgtattaattatttgttgttttgaattattttttttttttttatttttaaattttgttttttttagttatttttttttttttttttgggttatggttaggttttatttaggtattaagatttaggtgaattaaggaagatttaatgtttatttttttttgatgtttatgttggtatgtgttaagtcggttagtattaagtttggttgtatttagtagagatttaaaagaatagtgttttttaaaaggtagaggttatgttttttatatatatttagtataagtttaagattagtatggtattttagttttattaattttaggaatcgagtttttgtagttttttgttttgtagttgataaggtgaggtttttgtttttttggtttaagatggtgttagaatgttggttattatatttatagtttaggtattagaatggagtaagggatgaaaaaggaagagatgaaggtatacgataggtttttgagagttggtataggatatttttgtttatattttattggttagaatttagttatatggttatatttagttgggagattttgagaagtaaagtatttattttagatggttatatttttatttaagatttggagttttttatgattggggaagaacggaagataagatattgggaaagattagtagtttttattaaaagggtgatttgtgttgatgtgcgtgtgtgtgtgatgtttgtatgagtatgtgtgttatgtgttgtgtgttggtggggtagatttttgcgagtattttggttttagatggatttgttattagttttttttgtagatttttataggttttttttaaatttggttttttttattaggtagttttatttagcggtagttttttagttttatgtttttaaggaattataatttatttttagtatttattgaagtatattattagtggtgatagagggggtttgtaaaattgtttttttatttaggtattagagggtggttattatttgagagtgattatgattatagttaatttggtaataaatttttttgggtaggaggaaaggaaaggatgttttaaggaagtattttgttaggagatataaagttaataagagtggagtttgtagttggagtcgtagagtttaattattatattcgtttatttttgttagggttttatgatttcgtatcggggattagtagtatttaattttgttgtataaatatttggtgtattatttaggtaataagtagttaatagaggaagttttatttttttaagatataaatttgtttttttttaaattatttggtatatagtattttttatgtttgaagttgagatgtgggtataatattatagttttattttagagtagggtatttgtttttaaatgttatgtttttagtagttgtttttgattgggaattggggtgtgatttgggtttttttttaaatttttgaggagttggaggggtgggtggttcgtatttttgttttttggatttgaattttgattttgttatggatttgtttgattttgggtaagttgatttttatttttgagttttatattttttttttttgtgaaatttagattaaaaaaatatggttttgattaaatattataaataatatatagatagattgtttgtttttattgtattgttagaaatgaattttattaatattgttatttatggatagaaaatgtattatttgtttttattaagatttagacgaggaagaatacgaaaagcggagattaattttattgttatttttagaatcgttattttaatatttatttatattttattattattttaggtttatgtatatatatttagtatggattattggttatagattcgtatatatttaattttattattttttgttttatgtattttattaaaattttgttgtttaattaaggatttgtatattattttaattttagaatttatagttttaagattttgaaagttttaagcgttttgggtgaatgtgttatgttttttttcgttattatgtttttatattttttgattttttagttattatggtaattattttttatttttagtagtttatatttagtttaatttttagtttaggagatattttttttagggagttttttgtgttttttagtagtattttgtatttgttttttttgtaaagttttttttttttggtttagaatggtttattgatttgtttgttttttttattaaattgtaagttattcgagggtagagagtatttgttgtttattattgtattttcggtgttgagtattgcgtttgatatattatttagaaggttagtaagtgttagtgggatttaggtttttagtgggtgggagagaaaggacgtaaggaagtaagtggtaaaggtttttatagagtattagtaggttggtgtgagggagaaatgtagaggatgggtgagtagtataatcgttaatgatagggtaatgatagagtatattttataatatttttaagtttttttacgtgtattagataatttgatttttataaaagtttagagatagatatattatagggatgaaggtggagtattttgtggttatgtgatatgtttaaaattatgtagtgagtaaatgattgggtttaaattagattttaaaagtttgttatttttttttcgagtatgtaatgaagtttatattatttttattatgtttatttgattatattttggttttatagttttgtggtttataggatattttatggtggttttattgattagataataattttttttttaaggggatgtattttattaatatatatgtagattatgaattgtttttgattttgaggggatggtagttagagtagaaagtaaagttgatttttattttcgtttggtaatgtggttggtaatgtgaagatgggtgtattttgagatatcggttttttgtagtgtgtggttttttttgtttttagg

SEQ ID NO: 1146 - DNA, 15714 bp, Artificial Sequence
  chemically treated genomic DNA (Homo sapiens)
tttgaaaatagaaggaattatatattgtaaggagtcggtattttagaatatatttatttttatattattaattatattattagacggggatgaaaattagttttgttttttgttttggttattatttttttaaagttaaagataatttatgatttatatatgtattaatgaaatgtatttttttagaaagaggattattgtttggttaataaaattattatgaggtattttgtagattatagagttgtgaggttagggtgtgattaaatggatatggtagggatgatgtagattttattgtatgttcgagggaaagataatagatttttaaggtttggtttgaatttagttatttatttattgtataattttaaatatattatataattataaaatattttatttttatttttgtaatatatttatttttaggtttttatgaggattaaattatttgatgtacgtgaaagggtttaaaggtgttgtgaaatgtgttttattattattttattattagcgattatgttatttatttattttttgtattttttttttatattagtttgttgatattttgtgagggtttttattatttgtttttttacgtttttttttttttatttattgggagtttgaattttattagtatttattgattttttaaataatatgttagacgtagtgtttagtatcgaggatgtaatggtgaataatagatgttttttattttcgagtggtttatagtttaataggagaaataaataggttaatgggttattttaagttaggaggaaagagttttgtaaaaagggtaggtataagatattattggaaggtatagggggttttttggaagaagtgttttttgagttggggattggattaaatatgggttattaagagtagaaagtggttgttatagtggttgagaaattagggggtataaagatatggtggcgggagagagtataatatatttatttagaacgtttgaaatttttaaagttttggaattgtgaattttaaaattaaaataatatgtagatttttgattaagtagtaaaattttaatgagatatatgaggtaaaaggtaataaagttaaatgtatgcgagtttgtggttaatgatttatgttaagtatatgtgtatgagtttgaaataataataaaatgtaagtaaatattaggatgacggttttggagatggtagtaaaattaattttcgtttttcgtgttttttttcgtttgggttttgatgaagataggtaatatattttttgtttatagatggtaatattagtaggatttatttttggtaatataataaaaataagtagtttgtttatatattatttataatgtttgattaaagttatgtttttttaatttgaattttatagaagagaaaaatatggggtttaggaataggagttaatttgtttaaagttaaataggtttatgatagagttaggatttagatttagaaagtaggagtgcgagttatttatttttttagttttttaaggatttaaggaaaagtttaaattatattttaatttttagttaagggtagttgttgggaatatggtatttggaaataaatattttgttttggaataaagttatggtattgtatttatattttaattttaaatatgaaaagtattatgtattaagtaatttgggaaaaggtaaatttatgttttaaaaaagtaaaattttttttattagttatttgttatttgaataatatattaaatgtttgtgtaatagagttaaatattgttaattttcgatacgaagttatgaaattttagtagagatgggcgggtgtagtgattaggttttgcggttttagttgtaggttttatttttgttagttttgtgttttttggtaagatgtttttttaaagtatttttttttttttttttatttaagagaatttattattagattaattgtggttatagttatttttaaataatggttattttttaatatttaagtggaaaaatagttttataagttttttttattattattgataatatgttttagtggatgttggaaataaattgtggttttttgaaaatatggagttgagaagttgtcgttgagtaaggttgtttaataggagaggttaggtttaggagaaatttatgggggtttgtagagagaattggtagtaggtttatttgagattaaagtgttcgtaagaatttgttttattaatatataatatataatatatatgtttatataaatattatatatatacgtatattaatatagattatttttttagtagaggttgttagttttttttaatattttgtttttcgtttttttttagttatagaaaattttaagttttaggtagggatatggttatttagaataaatattttattttttagagttttttaattaggtgtgattatgtgattaagttttggttagtgaaatataagtagaagtgttttgtgttagtttttaggaatttgtcgtgtgtttttattttttttttttttattttttgttttattttgatgtttggattatagatatggtagttaatattttagtattattttgaattaggaggataaagattttattttattaattgtagggtagggagttgtaggagttcggtttttgaggttgatggagttgagatgttatgttggttttggatttgtgttgggtgtgtgtgagagatataatttttgttttttaaaaggtattgtttttttgggtttttgttaaatgtagttaaatttaatgttaatcgatttaatatatgttaatatgggtattagaaaagagtgggtattaagttttttttggtttatttgagttttagtatttgggtggggtttggttatggtttaagaaggggaggaagaatggttgggaggagtagggtttagggatgaggagaggaggaataatttaaggtagtaaatagttggtgcgaaagtaattgtcgtttttgttattatttttaaaaattataattatttttgtataagtttaatataattttattgagtatagtgtttgatatattataattatttaatataggtttgatggttggtggttaatatgtattgatcgtttattgtgggttagaaatagatatgaaaaagatatggaaatataggaaagtggaattaggagtgggaagggatggggtagaggttgatggtttttttagggaagtttcggtagtgtatatagtatttgattttgttaattatttatataaaatatttgttaaaaatataggtaaagaataaaattgtgtttttaagtaattggtttgagaatttatatatttaattttattgtaaggaagaatatttatttttatttatttatttttgagatggagttttgttttttatttaggttggagtgtagtgttgtgattttagtttattgtaatttttgttttttgggtttaagtaatttttttgttttatttttttgagtagttggaattacgggtatgtattatttagtttggttaatttttttttttttttttttagacgatgtttttttttttttgtttaggttggagtgtaatggtgtaattttggtttattgtaatttttatttttcgggtttaagttatttttttgttttagttttttaagtagttgggattataggtgtttgttattatgtttggttaattttttgtatttttaatagagataggattttattatgttggttaggttggtttcgaatttttgattttatgtaatttatttgttttggttttttaaagtgttgggattataggtgtgagttattacgtttagttttatttttttgtatttttagtagagatggggttttattatgttggttaggttggttttgaatttttgattttagattatttgtttatttcggttttttaaagtgttgagattataggcgtgagttatcgtattgggtttgagttattgcgtttggttaaggaagaatatttaaatgaagaaatgttttgggtgatttagtaaagaaagttatggtgtttaaattgatgaatgttagagttttttagagttatgtttgagttagagtatagggttttaggaaagtggttaatttttttgggatttagtttttttggttattagatggggatgatatgaattataatgttatttgtcgatgttatgtggttgaaatgagataaagtatgtaaagtgttaattttttgtttggtacgtagttaattttaatgttttagttgttattattattatttttagtaggggaattagggaggtattatggaggagatggtatttgataagggatttgagaatgggtaggaattgagtttgtgaaggtggaggagagggtagttttggtagaggtggaagaatataggtgggtttaggagatggtggtttttagttgatattagggtgaggagtcggggagggtttgggttggaatcgtaggggtagtgagtattaggaagggaggtaaagtttttttttttgtattttgaggagtaaatgtttttagtttggttgattagaaggatggagatggaaattaggagagatatgaggagagattttggaaagaggtggttgggtttttgttgatgttttagtattggttggatatgttggtgagtttgtttagttgtcgtttggaattggaagtttgagtttagagataaagggttgtaaatgtaggatttaggggttcgttgtagttgtggtaggagagtatggggagagtatgggttggggtggaagaaaggtcgcgattagttgtttgtttgagttgtaaaatttttttttagaagtttttaaagtagttttgaatatttaggagttgttatttttttagagttaaaagatgagttgttgaaatgttgatatagtattatttttttttttgagtgttattgaagtagtttttggagaggagaggggtttttaggaagatggtgggtttatagtgggttgtatgtttatttgggacgtagtttgtattttgttgttttttttatggtttatttttttttgtattttttgggttgttttttttataggttgtttttttttttttttaattaaggtttggttgttttattttttatttttattttttgttatgggtattttggagaagaaatgagaagagtagaatgtggagtttttggagttgtatagatgaaatgtggttgggtgtggtggtttagtttataattttagggttttgggaggttaaggtaggaggatcgtttgagtttaggagtttaagattagtttgggcgatatagtaagattttatttttaaaaaaaataaaaataaaaataaaaatagttgagtgtggtggtaaacgtttgtggttttagttatttgggaggttaaggtgggaggtttgtttgagtttaggatgtcgaggttgtagtgaggtatgattatatagtgtattttagtttgtgtgatatagtaagattttattttttaaaaataaaagttaaaaaagataatgaaataattttagtaaatagggtagtaagagaggtttatataatgtgttatttattttattataaattttgttgtttatttttatttgggttttttgtattagttttattgttatttatttttaggtggattttatttttatttttatttggtagttgtgtgtagggttcgtattttattttttattttttatttttttaagaagttggtggtttttagatttgagttttattatttttttattattgtaggggataaggtagatggaggtagattttttattttggggattttaatgttaaagtgggagttaggatgggtagagatgtgtgtttttttttattttttttatttttttatttttttattttttttttgacggagttttgttttgttgtttaggttagagtgtagtggcgtgatttcggtttattgtaattttcgtttttcgggtttaagcgatttttttgttttagtttttttagtttttcgggtagttggaaatataggcgtttattatcgtatttggttaatttttgtatttttagtagagacgaggttttattattttggttaggttggttttaaatttttgatttcgtgatttattcgtttcggttttttaaaatgttgggattataggtatgagttatcgagtttggtttatttgttgttttttagatttaggttggagggttttttgagttaagattaggtttgtttatagttttttgatgatattaatggggagaataaagcgagttttttgtatgttattgtgaattaaatttaggtaatatggtatttgttattaattatgagggaaaagttttagttagtttgagttttttttttatatatatttttttgtgggatttttttttgttttttttttttattttttttttttttttttttttataattttaagttggaagggatttggggatgagaaaagaataaaggaggaaataaaggtagcgaagtttggattttcgttttttaagttgtttagaatttagtggaatagataggattttgaataatttattttaatataatttggtgggagttatgagggaagaagtatagaatttaaagaataaaggggaagagggatttcggggatgggaggagagttttgtaagggaggtagtgtgtgaattgaggtttgaaggataggcgttttttaggggaaagaggggaagtagggtattttaggttaagtttcggagttagggaaagttatagttggtttgggaagatttaatatggtagaggggtggagtgtgtgaggttggagagttaaaattttgcgggtttaagtttgtttagtagggattttttgggagatttaatttatttaagagatatatatatatatatatagatatatatatatatatatataatttttgatggttatgtttgtatttatattttagtttttttggttataattgtttggttagtggtaggtaagagacgaagaggttttttttttttttttttttttttttttttttttttttgattttgattgggttaattaattttttttttaggaatttagagtggggttgtagagagtttagtttatttttgttgagggtttagaagttttagggtagttatatttggttttatatgtatggaatagttgagagagattagagtttatatagttattgagttagagtatggttatcgtttgtgtttttttttagttttttttgtggtttttgggttttcgtgaggtttggtggttttttttgtttttagtttttagggtgagatattttttttttatatttatttggatagtttttaattttttaaatatattttttatttgagatagatagatatatgtaagagaaataagtgttaagaagtaaaatttatttttatcgtgggtaatgtatttttgagagtttcggttttttttttaaatgttgattataataaataatttgaaaaatatagggttagcgtgagtgatttttttttatttgtaattaaaagttttatttgagaaatcgtgttaatatatgtaattagtagagagggtgtgagtataggggttatattttttttgtttattagaaagatttgattttattagagatatagataggtttttatttttgttttagttttaatttgtgtgtgtgtgtgtgtgtgtgtgtgtgtgtgtgttagggttttgttttgttatttaggttggagtgtagtggtgtgattaaggtttattggattttcgatttttcgggtttaagtaatttttttattttttagttttttaagtagttgggattataggtgtgtattattatatttagttattttttttttttttaatagagatggggttttgttatgttgttttagttgatttggaatttttgggttttagtgatttatttgttttggttttttaaagtgttgggattatatgcgtgagttatggtgtttgatttttgattaattgttgaggttttttcgagttttgtgtgaggggtatttgaagttttagtaagatttagaaggagaggttgttttgattaattaatgatatttgtatttttgtatttgttttagtatttattataggtttggaatacggtagggtttcgttaaatatttgttgtatgaataaatgaaagattttttattttcgatttgtattggttaattagggtaatttgtttttttaatggttcgtttgtttttattttaaagtcgtattttagaatttattttggtttagtaggaatttttacggagttgttttaataaagatagaaaatgttttagcgtttaggttttttttttttggggattttggtttgttttttgtattttttatgtgttttttagtatttaggtgggttaggattttttttagttttttaagttgtgttttattttgattgtcgtttttggatattttcgttcgtggttttttttatgagtttggtttttgtttttgtattttgggattttttttttttttagagatttttgttttgttttttcgttttttttgcggtttttttttttttttttggtaattttttagtttggagtattttagagtaaatgtaatgtatatttagatggagattaaattttttatgatattagtgaaatgttggtatgggtattgattataaattttattttatagagttaataaattgagtaggaaagacggtaatatgttgtttgttaagtaacgaggtatattggttgttatacgtggaataagtgtaaaggagtttgtgggtttagatattaagtgtgttgtttttaagtagaaataatttttttgtttttttgagataattgtgtggataaagaagaattttaaggttttttgtcgattggttagaatggagttgcggttgttagatttttatttcggtggggatggggtaattgattgtcggaaaatttggtttaatttttttttaaattatattagtgttgtttatagatgtataagatataaggattttatttttttggagttttttttttttttttggtttttacgtttttggtggtatttaagcgggggtgggatattgatttaggtttcgtggcggttatttttacgttttgtatgggttatttagacgtgtaaggtatttgtttggggttgacgggtaggaatttattgtaatttttttggttttgtttttggtatttggagttattttttggaatggacggggaggaaaatatttttttaaatattaagaagagttattttgggtataaaatgtataaaatatgaggaggacgtttttttagttaatgtggaaatgttttttttagtttaatgtttataattgtttgggaagggaaagaatttaaaagtatttattgttttttttttgttttgtttttttgtttaagtgagagaaatgattagtgtggtttttttgtttttaagggtattagaataggagtatttacgttgttagaagtttttatatttggttttgtagataattttaatatgaaagagattggtaaaattttttagttttagttgtttatggtttattttagaattttatagaataaatataatttcggttgttagaggttattttgtattgtaaaggaagagagtttgtgtttttggaacggtattattaagtttttgttttttatttatttttttaaagattatttttttaatagaaattaattattttttggaagttgttattttgaaatgatagttaggttatttgttttatttggatttaattgtatttaaggagttatttttttaaagtattattatttttaaattatagaaataggagtgtaaaggcgatggtatttatagtgaaatttaaattaagtttagattgaaggaaggttataggtgagtttggtgggttaatagcgcgtatttagtagttttggttagaagttttttaataattagttttgatttttagagatattttattgtatgtattgtaaagaaggtaatttgtatggttttgaggatagatttggtaagattttgtataatttttttggaagattttgagtttttttgatatttgtttttttttatttttatttatttttgttttttttttaggtattggttttatatagttttttttatttagaggttaggaatttttttggaaaatgaattttgaatttttattcgtagagtaaggtaatgtttgggattgagattgattatttgtatttgcgttttttttatttttaattttattttttttagattggggtgggatattttgatttttggggatgtgtttaaggtaatttttaatgtattttagttttgcgaatgttattaggttggtgggtttgatagttttttagggatttggttggttttgtaaggttttgttttttgggtatcggtatagtttagtagtaaatttaacgttttttagttttcggtaattttttatttggttagaattcggtataaagttattatagtttagaattaagttattcgttttgtattttttttgatttagttttttcgggatttagagttgtgtggggttttgtggtttgttaagaaagattagtagagaaggaggaaggagcgcgtcggggttttattttgtaatcgttggcgttgcgatttttacggggttttatgtttgttcgttttttttatagcggttcgattataatttgcgtaattgtttcgtaggtttcggcgtatttttagcgttagttttcgtttcgttttttagggtagcgacgtgtcgggcggttgttagttttgggttcgtagtgtgtatttcgcggggtttcgagggagggtttcggcgcgttaggagttacgcgcgtatttttgggtattttttaaaaatttgggggtggttggtaggagcgagaaatttttgatgtttttttagaggtttcggcgcgattatggcgtaaggattagttttttgggaaggtgtttcgagtcgcgcggggcgcggtcggggcgggggtggttgtgaggggtttcgcggagcgggttggggtatacggttgcgttttcgttggttttggcgcggtttcggggtgggagcgaatcgggattcggtttcgacggttttggacgttagggaagtttagggttagagggagcggttcgtagtgcgttaggtttttcgatttagattgcggggttgggggttttgaagttttattttttttttggtacgcggagaatcgagttttaagttttagggtaagttgtttttggttggtattttagggagtgtacgttttttggagggttttaggcgggtattgtggtttttggggatattttggatatattgtgggtttttatttttaatttcgtattttttacgtataaagtgggggttggggggtggttttagatgtagttacgtttttgttattatagtttgtgagtggtgtggtaggtatgttttatttgtatcgtttgtagtttttcgttttatatgatgggttggtttgttttgttttgttttgttttgttttatttttgggttttagggatgaggaatttaaggtttagcgaggttaaatgattttttttagaatttatagttggtaaggaatagtaatgggttaggaatttaggtttattttggtttttattgcgtagagtagttttaaaaataaattattttattgagaattaatttagttaggcgtggtagtttaagtttgtaattttagtattttgggaggttaaggtgggtggattatttgaggttaggatttcgagattagtttggttaatatggtgaaattttatttttattaaaaatataaaattagttaggtgtggtggtgagtgtttgtaattttagttatttgagaggttgaggtaggagaatggtttgaatttgggaagtggaggttgtagtgagttaagattagattattgtattatagtttgggtaataagagtgaaattttgttttaataaaaaaaataaaataaaataaaatttataatataaagcggggaattgtaaatgacgttggtgaatcgagtttgttattgtcgggtttggtaatgtttaaaagttaagaatggtttttatatttgtaaaagtttgaaaaaaaaaaattaaaagaagaggttagatgtagtggtttatgtttgtaattttagtattttacgttgggtattagatattgggggaatttgtttttaatattttaacgtaggttttttttattttttataagtgttagttggttgagaaataaagagagagagtataaagagaggaattttatagttgggtcgtcgggggtgatattatatatcggtagtattgtgatgtttatttgagttttaaattagtaagttttttattaagggttttaaaaggtgagggggtgtaaaatagggagtagattatatgttttaaagggtaaaaaggagaattattgataagggtttgtgtttagcggtgtacgtattgttttgataaatattttaaataatagaaaatagtgttcgagagtagaaaattggtttgattataaatttattagggcggagttttttattattttagtaagtttgagggtattgtaggagattagggcgtattttagtttttatttttattgcgtaggatagatatttttagagcggttatttatagatttttttttaggaatgtattttttttttagggtgttaatattaatattttatgttagtaaaagaaattagtaatattttttttatttgtaggtttatttataggttttttgtaagaagaaaaatatggttttttttgttcgatttcgtaggtagttagattttatagttgtttttttttgttttttaaaaattgttgttattttgtttttttttaaggtgtattgattttatattgtttaaatatatatgttttgtaattaatttgtatagttaatataattattatagtggttttgaggtgacgtatatttttagtttatgaagataataggattaagagattaaagtaaagataggtataaaaaattataaaagtattatttgggaattgataagtgtttatattaaaatgaaatttttaaaatttatgtttttttgttacggttttagtcgatttttttgttcggggtttttgattttttgtaatattttagtatttagggagattgaggcgggaggattagcgtaattttgtcgtaaaataaaataaaagaagaatagtttttatgggaaaattataggaaatttgtatttttgtgtttataaagttttgaattttgttaataaaaaattgtgtaaattgtttatttttgttgtataagtatttatgtaatatttttaattttgttttggtttagaaagtttaaaatgttttttatttggttttttagagaaagtttttagtttttgaattagggaatatatatatattgtatattgatttttttaggttttttttttttttagttcgtttgtggggatgtttaattgtgtatttatcgtttttttcggaagaatttttttattttattagggtttttttatttttaaagaagttttttttagttttttttgtagttaatttttgttttttagtttgggttgggtgtttttttttatttttttttttaggttttaagaggatagggattgggttattaattgttttagtttcggtatttttttagtgttaagaatatatgggtgtttagggaaaatttgttgaattgaattttaggaataatatatattatagagatgatttttgttatgtgttatatttatgtattattatatagggatttttttagacgtaaggttattgggaaggtaaatgtttaaaatttgggaaaatatatttgtagtgatgatgcggagggaataggaaaagttaggattatataggttttggagattatagttatattgtattcgaggttttttaatggaaatatgttttttagagaatgtgtattttttgagttggtaggagtttatttggttattgttatgtttttagtttatagtttggtgtttagtttaaagttttttaaatgaaaaatttaaatatatagaaaagtgtgtaatattatagtgaattataatatatttattatttagatttaataattattattttttatatttgttttattaattattttggtaaaaatattttaaagtgtattgtatatattatgatattttatttttattttggtgttttttaaaaaataaggaagaatttttgtgtaattgtaagattattattatataataataattttttaatatcgtgaaagttagtttatataaaatttttttaaatattttttttttttattatagatttttttaaataaaataatgaaaaatgaataaattataaattttagtggatgtttttatatttttattaggatattagtggtagtatttgggaagttttaaaaggtggtttttatagtatttttttttttagttaataaatatatagttttatatgtttgtgagatatataatatattatgtttaaaatttagtggtttaatttaagattatttatttagtttataattttgtgggtttagtaatatggtttgatttatgtttgtggtggttggttggttattagttaagatgatgagggtaattggtttagtttgggtttgtttatatggtgatagttgttggattttttagagtagtaaaagatggtaaattttaatgagtaagtattttttaagtttttgttaatattttgttttttgttgattaaagtaagttatatggttaaatttagagtaattgggagattatttaatttagtaatagagggaggtattattagattgggattttattgtaattagtttattacgggaaagggtgttatattgaatttatgataagtttagttagtagtaagtattagtataggtagttaagtggttatatagagaaaagggtaatttaataagggtaggaaaggatatagagaggttaagttagttagaatggagttttgaggagtgagagagaaaatttttgtaaagaaaggtaataagtagttgggttttgaaaggttttcgtagatagtgggagttattaaagttattagaggagatttacgtggtcgagttattattttggaagatttaattggtagagatatataggaaggattgtaaggaataaaataaggattgtaagaaatataggaaggattgtaagaaataaaaattaaggtgataaattattaaaatttatttatttgtttatttttttatgtatttatttattgaattaagaggtatatattgaaggtatattgtgtattgggtattatgttagattttagagattttaaaatgagaaaggtatagttttggagtttagtagtgatttaggagtatgagtgaggggtagtggggagatagaaaagatagatttaaaataaattttgaagaaaagaatattaattttttttgttttagggaaaaagtgattatatttttatatatttttttatttatagtttaatgttgttcgtagagatatagaaggagtgggtgagattaagatgttttatgtggatatggttgttgaggatatttagttgttggtatttagtagt

SEQ ID NO: 1147 - DNA, 6351 bp, Artificial Sequence
  chemically treated genomic DNA (Homo sapiens)
tttgtaattttagtattttaggaagcgaagatgggaggatcgttcgaggttaggagttagagagtagtttgggtaatataacgagattttgtgtttttaaaaataaaaataaattatttaagtttagtggtgtgtatttgtagttagtttaagttttttaggaggttgagttaggaggattggttgattttagaagtttgaggttatagtgagttataatttattttagtttgggtgatagagtgagattttgttttaaaagtaaaataataaaatataaaataaaataatataaaataaaatgttaaaagtattgtaaaggtttaggtttgagtttgggagggttgtgaatgaaaggatttggtttttatttagattttatttgagaggagcggcggggttttaatcgagggttgaggtttgtagttagaagagatatagataagaagtgggaaggttaatggtaggtgtggagggggttgtttggataaaggttgggaggtgagaatggatgagtagggttgaaggggcgggttgaggtgttatttggttggaaaagggtttaggttgttaggggtattttttatttttatagagtaggagggaaaagatagttttttaagtttaggtatttttagtttagtagatgaaagcgggtcggttttagttatttgtgtgattttggttaagtggttattttttttgggtggttttttcgattttaaattgtattattaaatgggggagtaggttaggtacggtgttttagggtttttttttgttttgatttttaggatttagaagttggttttgattttttttattttttttggttggagtatttaggttggttgcgggtgtggatggcgtttttgtgggtcgtttttttttagtatcgttagttgaaggaggtatagttttttttttttcgtttttgttttttgtttttggtagggcgggaatgatcgagttggtttggatgatttgtttagattaagttgagtttattttttatggtagtagttaagatttagtttaggataaaggaattttagagagtttattgtttttattttaggatagttataacgtggggaggagaatttttggggtggtggttttagtttgggggatgtaggagggagtattaatatcgagtttttttttagatattatttttattattttttaagtagtggttttatttttattttttaggtttggaaacgggtttagagaagttaaggattttagttatagttgtagttatttagtttttaaattagaatttattattcgttttattttttgattttttttttttttttttgtgatggagttttgttttgttatttaggttggagtatagtggtattatttcggtttattgtaatttttattttttgtatttaagtaattttttttgttttagttttttgagtagttggggttgtaggtattcgttattatatttagttaatttttgtatttttagtagagatggggttttgttatgttagttaggttggtttcgaatttttgtttttaggtgatttatttattttagttttttaaagtgttgggattataggtatgagttatcgtgttcggttttttttgattttaattgtagttttatttttttgtgtagaaatttaattaagttggtagatataaagtaggggcgaggggaagatgagaggggagataatgaaagtaaggcgtcgggtatagggtttggtaagataagtgggcgttgttattaggaggttttgaggattagggggaggaggtttacgatgtatttgtgtttttgtttttttttttcgttaggaaaatcgtagtttttgttataggggatattggaatttggagagattttttgttttaatttcggtaagaggagattgttggggatttgttgggtatgatatgtagattttttagaggtgttgtaaagatttagggaaggtaatagtttgggaagagataagaaggaagtgaaaattttttgagtttttatgaaaatacgaattatttgtttagtataatagattttagttttattttgtatttatttcgtgtaaggaaagtaggattttatttttttaatttatagatagggagattgaggtaagtgggagaagtagtttgttaggaggttttgaggggatatagtaagtagggttagtattcgcgtgtttagatttttaaataggtttttttagggatttttttattatgttattttgtttttttgttagttttatttatgttagacgttgtagaggagtaaattgtttttttatttaatagtaaatagtttttgatgtcgggtttattttttagggtggaggaggatgtaggagtagtttttgaggttataagaatttaattattgggttgggttgggaaagtggttatatttattcgttcgtagttcggcgaggattatatttgaagcgtttttgattttcggtttaggatttcgtttgagatgttttattttttgatttggtagagaggggaggtatgggggaggggtagtggaattaggttgggttttatttagttttttttatggttgaggttttggggaggttcggaggaaaaagtgaagttgttgtggttggtttttaagtagttatttggtttggaaggaggggtaaggtatttataggggtgtaattttattttttttttgggttcgttttgcggttttatatattttttttttattttgtattagagtgggttttgggtatttggaggaaggtgtttttgagaggtagggtgggtgtgttggtttggtttttagatgtgagttatttttggttcgtattttcgtttttttttggtgttagtagttttagaagggggacggttaggtggagaaggaggttttcgtgataattttttagtatgttttttattttgtttagtgttttttacgtttttttttttattaggtttttgagtgtaaggtgagtattttttttatttatttttaattttttgttatagtgattttttttagagtttaaatttggttttagtatttattttttttttagttttggttttttagtttttttttatataataatgtttaagttttgtgtttagtttatgaggttttttatggtttaggttttgttggttttttagttttattttcgttttttttttatatgttcggaatattgttttttagttttggtttttttattttggagtttttgtttatggtggaaagttaggtattttttcgtttattttttacgatttattttttttatttatgtagtcgttagtttattatagtatttttttatggttttttttatagttattattatttatttttttttatttttatttttattttttattttttttaattgagattgagttttatttttattgtttaggttggagtgtaatagattgatttcggattattgtaatttttgttttttgggtttaagcgatttttttgttttagttttaggagtagtagggattataggtatatgttattatgtttagttaattttgtatttttagtagagatggggttttttcgtgttggttaggttagtttcgaatttttaattttaggtgattcgttcgtttcggttttttaaagagttgggattatcggcgtgagttattgcgtttagtttattatttattttttaacgtggttgtggttagattttattttaattatgcgttttttgagagtggggattgggaggggtttagttttgaatttttagagtttagggttaggtatatagtaggtgtttagtaaaatatttgttgaatatttagggaagggagggttgtgtcgggttttagaggagatgttaagagagtagatagggtggttaggtatggtggtttatatttgtaattttattattttgggaggttgaggcgggtggattaattgaggttaggagtttgagattagtttggttaacgtggtgaaatttcgtttttattaaaagtatataaattagtcgggtgtggtggtgggggtttgtagttttagttattcgggaggttgaggtaggagaattagttgaatttgggaggtagaggttgtagtgagttgagattacgttattgtattttagtttgggcgatagagcgagattttattttaaaaataaatatataaataaataaaaataaaaaagagaaaggatagggtgtatagagttaggattttatttttttttggtttggattattttgggttattttttaagtttgatatttttaggtttgaggttgttaggttagggcgttttgattattttttgtttgtttttgaacgcggttaagttcgaggttttagttaagttttgtagttttaggtttggcgttcggtttagtttttttttagttttttcgaggagttagcgagagagcgttgtagtagtcgtagtttttgttttcggggaaggttcgggtggggttagggtttgtggttaagttagtggttttttgtagacgcgtacgtagtaggagttacgttttggtttttgttcgggagtggtttggttttttttagttttgattttttgaaggattttgtatttttttagttattttttttgggtattttttgagtttagtttgttggttataggttttttttcgttaatttgtgggtttagtttattattaaattattttttattggttttttttaatttttgttatagtataattttggtggggaggtggagagggatgaaggagaataggaggtggagtttggattttggtcgggggcggcggggtgagggggggtagtagttcgttattttgattggttatttttgttttaaaattggttttaaaattttacggatttcgtttttagtggtttttagttttattttgatttgtaattggttgaatttttagggggcggggtttattcggttcggtttagttaaaagggtgggagcgttcgggggtttatttttttcgggtggagttttttgatagttggtgcgtttgttcgggaatatttttttggatttaattatggtttgtgtgagtgtggggatttttttttaaggtttaggggatagggtaggaattgatggttagaggagagttgggtagatcgggagtagattttagttttagttgtgtggtttggaattagtgtttttttttttttggattttagtggttatatttgtaaaatgggggtgggcgttatggttttttaaggttttttttgtattgataattgtttggatttttttagggtttgaaagtatagttatttttgtttagggttgatattttgtagttttttgagaagtgagcgtgggaagggtgtggttaattgggggatatttaggttattattttttttttttttttttattttaaagagttttttgtttttttttttttgtagttgtttcggttattaggttagggtagagttattttttgttttagagaacgttgaaaagttgttaggattcgagataagttgtttaggatgggtttttttaggtcgggggtggagggtggttgtgtttaggttggtggcggggggggcgggggaaatttttttttattatttttaagttgggaggttggggtggtagggaggtgagaatttttttcgggttttagggaaagggtttaagtttttggtagaagaaattatttaaattagttaatttttgtttatttattcggggtgttagggaatagtagtgtttagtagtttgtttaattttgttaattttgagttagtttagttatagttcgattgtagggttattttttttaatgtagagaggtcgtgttttttagggttttttttttagtttttgggtttttttgtagagaggggtttgaaggagaatagtggggtcgttcgtttttagttattttttttttagtagaggggtcggtttttttatttagtgtgacggtgggttaagtgtcggtttttttttagtttgattttttttatttgcgatgggatagagtattttattttttaagttatttttgagtttaaaatttttaagttaatttgtaaaattttttagagtttgttttttagaatttttacgttatagattgaagttaatttcggtgggaatagggatttttttaggattatatagataatcggaggttggaaattatagtttaattttttttttaggtttttttttggtttggttagaggatgtcgggcgggaataattttatttttatttttagttattttcggatatttcgagtagtggaggttttgttttttaattcggttgggtcggggtttgtttgtgtagg

SEQ ID NO: 1148 - DNA, 6351 bp, Artificial Sequence
  chemically treated genomic DNA (Homo sapiens)
tttgtatagataagtttcggtttagtcgggttagaggataaggtttttattgttcgaagtgttcgggggtggttgggggtgggagtggggttgttttcgttcggtattttttgattaagttaaggggaagtttggggaaaggattgagttgtaatttttagttttcgattgtttatgtggttttgggaaagtttttatttttatcggggttggttttagtttgtaacgtgaaggttttagaagataggttttagaagattttgtagattggtttgggaattttggatttaagagtgatttgggagatggggtgttttgttttatcgtagatggagaggattaggttggggaggggtcgatatttggtttatcgttatattgaatggaggggtcggtttttttgttggagaggaagtggttaggggcgggcgattttattatttttttttaagtttttttttgtaaagaggtttaggggttagagaggagattttgaaaaatacggtttttttgtattagggagaatagttttgtagtcgggttgtggttgggttggtttagggttaataagattgagtaaattgttgggtattgttgttttttggtatttcgagtgggtgggtaagagttaattggtttgagtggttttttttgttagaaatttgaattttttttttggggttcgaggaagatttttatttttttgttattttaattttttagtttgggggtggtggaagggaatttttttcgtttttttcgttattagtttggatataattattttttattttcgatttagaagggtttattttgggtagtttgtttcgggttttggtaattttttagcgttttttggagtagagggtaattttgttttggtttggtgatcgggatagttgtaggggggaggggataggaggttttttggggtggaggagggggaaagggatagtggtttgggtgttttttagttggttatattttttttacgtttattttttagagagttgtagaatgttaattttgggtagaaataattgtgtttttagattttggaggaatttagataattattaatgtagagaaggttttgagggattatggcgtttatttttattttatagatgtggttattgaggtttagaaaagagaaggtattggttttaggttatatagttggggttagaatttgttttcgatttgtttagtttttttttggttattagtttttgttttattttttggattttgggggggggtttttatatttatataagttatgattgagtttaggaggatgttttcgggtaggcgtattagttgttagaagattttattcgagagagatgggttttcggacgtttttatttttttaattggatcggatcgggtgagtttcgttttttgaaagtttagttaattgtaagttaggatagggttgggggttattgggggcggagttcgtggaattttgaagttagttttggagtagaggtgattaattagagtggcgagttgttgtttttttttatttcgtcgttttcggttagagtttaagttttattttttatttttttttatttttttttatttttttattaaaattgtgttgtggtagagattgggggaagttagtggaaaatagtttgatgatgagttaggtttataagttggcgggaaggggtttgtggttagtaggttgggtttagggggtgtttagagaagatggttgaggaggtgtagggttttttagggaattagagttgggggagattaggttattttcgggtagggattagggcgtggtttttgttgcgtgcgcgtttgtagagggttattgatttaattataggttttggttttattcgggtttttttcggaagtaaggattgcggttgttgtagcgttttttcgttggtttttcgggaaggttaaagaaaggttgggtcgggcgttaagtttgaggttgtagggtttggttaaggtttcgggtttggtcgcgtttaggggtaggtaggggatagttaaagcgttttggtttgatagttttaggtttgagagtgttaagtttaggagatggtttagggtggtttagattaggagggggtggggttttggttttgtgtattttgtttttttttttttttatttttatttatttatatatttatttttgagatggagtttcgttttgtcgtttaggttggagtgtagtggcgtgattttagtttattgtaatttttgttttttaggtttaattgatttttttgttttagtttttcgagtagttgggattataggtttttattattatattcggttaatttatgtatttttagtagagacggggttttattacgttggttaggttggttttaaatttttgattttagttgatttattcgttttagttttttaaagtaatgggattataggtgtgagttattatgtttggttattttgtttgtttttttaatattttttttgaggttcggtatagtttttttttttttgagtgtttagtaggtattttattgagtatttattatgtatttggttttgggttttgaggatttaaagttgaattttttttagtttttatttttaaggagcgtatagttggggtggaatttgattataattacgttaagaagtagatgatgggttgggcgtagtggtttacgtcggtaattttagttttttaggaagtcgaggcgggcggattatttaaggttaggagttcgagattagtttgattaatacggagaaattttatttttattaaaaatataaaattagttgggtatggtggtatatgtttgtaatttttgttatttttgaggttgaggtaggagaatcgtttgaatttaggaggtagaggttgtagtgattcgagattagtttattgtattttagtttgggtaataagagtgaaatttagttttaattaaaaaaaataaaaaataaaaataaaaataaaaagaagtagatgatgatggttgtaagggaagttatgagaaagtgttatggtgggttggcggttgtatgagtaaaggaggtgggtcgtgaagggtaggcggagaagtgtttggttttttattatgggtagaagttttagaatgagaaggttagggttggagaatagtgtttcgggtatgtgggggaaaaacggggatgaggttgggaagttaataggatttggattatggagggttttatgggttgggtatagggtttggatattgttgtatgggaggaggttggggagttagggttagagggagggtgagtattgaggttagatttgggttttagggaagattattgtggtagagaattgagggtgggtgggaggggtgtttattttatatttaggaatttggtggaggaaggggcgtggggagtattgggtaaaatgaggggtatgttggggggttgttacggggatttttttttttatttggtcgttttttttttgaaattgttggtattaaagagggacgaagatgcggattaggagtgatttatatttggaagttaggttaatatatttattttgttttttaggggtatttttttttagatgtttaaagtttattttggtataggatgagaggggagtgtgtagggtcgtaaggcggatttagagaggggatggggttgtatttttgtgagtgttttatttttttttttagattaagtggttgtttggaaattaattatagtagttttattttttttttcgggtttttttaaaattttaattataggaagggttggatggggtttagtttagttttattgttttttttttatgttttttttttttgttagattaaggaatggggtattttaggcggagttttagatcgagggttagaggcgttttaggtgtggttttcgtcgggttgcgggcgggtgggtgtggttatttttttagtttagtttaataattgggtttttgtagttttaggagttgtttttgtatttttttttattttggaaaatgggttcggtattagggattgtttgttgttggatggagggataatttatttttttgtagcgtttggtatgagtggggttggtagggaggtagggtggtatggtgaagaggtttttagaaaggtttatttgggagtttagatacgcgggtgttggttttgtttgttatgtttttttagagttttttggtaagttgttttttttatttgttttagtttttttatttgtaaattggggagatgaaattttgttttttttgtacgaggtgaatatagggtggaattgaggtttgttgtattaaatagatgattcgtgtttttatggaggtttagaaggtttttattttttttttgtttttttttaggttgttattttttttaggtttttgtagtatttttgggaggtttatatgttatgtttaataggtttttaatagtttttttttgtcgaggttggggtaagaagtttttttagattttagtgttttttgtgataggagttgcggtttttttggcggggagggaaggtagggatataggtgtatcgtgggttttttttttttagtttttagggttttttagtggtagcgtttatttattttgttaggttttgtgttcggcgttttgtttttattatttttttttttatttttttttcgtttttattttgtgtttgttaatttggttgaatttttgtatagggaaatgaagttgtagttagaattagaagaggtcgggtacggtggtttatgtttgtaattttagtattttgggaggttgaggtgggtggattatttgaggataggagttcgagattagtttggttaatatggtaaaattttatttttattaaaaatataaaaattagttgagtgtggtggcgggtgtttgtaattttagttatttaggaggttgaggtagggagaattgtttgaatataggagatggaggttgtagtgagtcgagatagtgttattgtattttagtttgggtgatagagtaagattttattataaaaaaaaaaaaaaagaattaggagatgagacgagtggtgagttttggtttgggggttgagtggttgtagttgtagttgaggtttttggtttttttgaattcgtttttaggtttggaagatgggaataaggttattgtttggaggatgataggagtgatgtttaaggaggggttcgatgttagtgtttttttttgtattttttaggttaaggttattattttagggatttttttttttacgttataattgttttgaaatagaggtagtgagttttttggaatttttttgttttgggttggattttggttgttgttatgagaaatgggtttagtttggtttagataagttatttaggttagttcggttattttcgttttgttagggatagggggtagaggcggggaaagggaagttgtattttttttagttggcggtgttgaaggagggcggtttatagaggcgttatttatattcgtagttaatttgggtgttttagttagggaaggtaggggaggttagagttagtttttgagttttagaagttagagtagggaggaattttgagatatcgtgtttgatttgtttttttatttaatgatgtagtttaaggtcggggaaattatttagagagggtggttatttgattaaagttatataggtagttagggtcgattcgtttttatttgttgaattaaagatatttgggtttgaaaagttatttttttttttttattttatgaaggtgggggatgtttttggtaatttgggtttttttttagttaggtggtattttagttcgtttttttaattttgtttatttatttttattttttagtttttgtttagatagttttttttatatttgttattggtttttttattttttgtttgtattttttttgattgtaggttttagttttcggttagggtttcgtcgttttttttaggtaaggtttgggtgggggttaggtttttttatttatagtttttttagatttaggtttgaatttttataatgtttttagtattttattttatattattttattttatattttattattttatttttgagatagggttttattttgttatttagattggagtggattatagtttattataattttaaatttttgggattaattaatttttttgatttagttttttgaggagtttggattgattataggtgtatattattgggtttgggtaatttatttttatttttggagatataggatttcgttatgttgtttaggttgttttttaatttttagtttcgagcgatttttttattttcgttttttaaagtgttgggattatagg

SEQ ID NO: 1149 - DNA, 8077 bp, Artificial Sequence
  chemically treated genomic DNA (Homo sapiens)
  unsure 2115, 2121, 6646: n is a or g or c or t
ttgaagtataataaggatattaacgaggaagggggttttggaaaaggaaggtggagaggaataattgcggtatttttgtttgaattcgttttcgatttttgtagtttttagggttttttaatgttattttggaggttttgggttagtgtttggtgatggtagatgttatagaggattttttgtaataggtttttgaatggtagtggagtgatggtagatgataatttagtgaataaagaagtggttttgggcgttggtagatttagggaattttaacgttggtgttatggtttttaaatagttattgcggtgtttttttattgtttttaaaataataatgattttttaggttaggtatggtggtttatgtttgtaattttagtatttgggaggttgaggcgtgtgattatttgagttcgggagtttgagattagtttggttaatatggtgaaatttagtttttattaaaagtataaaattagttaggcgtggtggtagatgtttgtaattttagttatttgggaggttgaggtaggagatttatttgaatttaggaattggaggttgtagtgagttgagattttattattttattttagtttgggcgatagagcgagattttgttttaattaattaatcgtttttaaaagaaagggtaagagggggttgatattttttaacggttgtggtattataattatttaagtaagtatcgggttaggcgcggtggttcgtgtttgtaattttagtattttgggaggttgaggggggtcgaggaggggcggattatttgaggttaggagttcgagattagtttggttaatatggtgaaatttcgtgtttattaaaaatacgaaaaaaaaaaaaaaaagttcggcgtggtagtatatgtttgtttttttagttatttgggaggttgaggtaggagaattttttgaatttgggaggtagaggttgtagtgagttacgattatgttattgtattttagtttgataatatagtaagagtttattttaaataaataaataaaaaattagttaggtggtggtatgcgtttgtatttttagttatttaggaggttgaggtaggaggattatttgagtttcgggagtcgaggttgtagtgaattatgattgtgttattgtatttttatttcgggtaatagattgagattttgttttaaaaaaaaaaaaaaaaaaaaaaggaagaaagagtaagaataattttttaattgttattttttttttttttggtatttagtaaaggtttaatgaatgaaagaaagttgtggttatggttggtttttggttttagtttttcgatttatttttatatttattggaggttgtatttaggtatttgttcgaaagttttgtttgtttgtacgtttttgtttgtgaatatatatttattttttaataatatattgatattatttgggatgtttgttttgtttatttttttttgtgttattattgtaattgtataagtgtttgttaaataaaaattatgggaatttattattttggattgagtttttatattaggttttaatagattatagtaaagtaagatggagttatttatgttaaacgttatatattattaaatcgaatttttaaggaagtagatagattttaaatagataagttttttttgaaaataggagattttagtttatttaagttagtgtgataaggaagttttttttgttttaatttttattaaaggaggtaatacgatggtgattaattgacgtttttttcgtggtttcgtttttttgtttttattttataaaagtcgttgtttgtcgttggttaatggaagtttttattttatgttgtagaagggaagttgtttcgatttatgaattttaaataaaagttaattagatttataattaaatgtgttataattttgttttttgatatacggtatttattttttttttttaaaattttaaagtattgtagatagaatttatgttgttttttatttatttttttttgttttttatattttttttttaatagtttattttttagtattttattaatattagtaatttggtttgtttttttagatgttttaaaatattttgttttgagggattntaattnaatttgtttggatgttttatgcggtcgttgtttatttttgaggttagcgaggggtttttttgagttttttttgtttttattttttggggtttggtgttttttattattaaaggggtggggggtatagttgtttggggtcgggtgggttatgggtttcggggtttgtgggagaaagttgttgattagtaagggtgtttttttaatgttatacgaaaatagggtattggagtaaacgtttggtaaaatgttagttttatgggcgggggttggaatcgtgttttttttttttttagtagatatcggagtcggtttattttatttttttagcgtttttattatttttttgttcgtttgtttttagggtcgtgtattaggatggattttatggtgttgagatttatgtaagtgtagtttcgtcgggagggagggtgggattaggcgttttgtgggttttaatgagaagtcggcgtttttttttttattgttcgttttttttattttattttattttatttttgaagttaggagggcgagggtgttacgtttgtttagagtatggtatttttgagaattttagtatggtatagtttggttgttggtatttattaagggagtagttaatgggtcgtttagtagttttgtgagttgaaattatttttttgtgggtaaggttttatataatgggggtagtgggattttgttacgtttttaattacgttgcggttagtgagtgagtttttaaggtatttatagtacgggttgtaagaggggttaggaggtagggtttttgggtgtttgtgttttagggtttattttttttgatggggttcggtggtttttttttttttttatggggttatatgtgttgttttttttgttttagatttattgacggttatattttatgtatttagttattttttagttttgggtagttgcgtataatttagttatttgtttatttgagggtacgatattatttgagtttacgtttttttgtgttttttatttttgattttttttggggggttagatattatttaaaggtattgggggttttttttattttttaatatttaagttaagttttaatggttttgggggtaggtttgtgaatatttttttttttgttagggttttttttttaattaatgagttatgggttttttttaatgggggggggggtatataaaggggtgggaaaataaaagatgaaagaaaggggggggtaaggaaaattttttttttttcgaaatggggtttttaatataatggaggttttgggtttggggttaaaataaaaaatagttattgaatgtttgatttttgggttggttgtttcggattttaagttgttagggaattagggttttttatttagtgggattgtttgggggtttttaaatgtttttgtttgttttttatttttagagatggtgattttttgggtttaggtattaggagtttgtaaaattttttgatgatttttttgtttagtttaggttgagaattattggttagaggtttgggtatattttaaggtttatttagaattatggggtgtaagtgatagaaataagagcggttgttgattgttttattgagtagtgaagtttagttttgattatggattaggttagttggatttaggagtttaggtcggaggatgtttgtttttttttgttttgttttatcggttttagtagtttgggtttatatttttttagttagaagttggtttttatcggttggttgggtttatagttttattttgaaattagtagtgtggttcggggttttcgtagggtttagatagttaggttttgggtggttgaaggttaagagttgggggttttttgggaattatatagtcgggaatgggagggggtgttttttaagggatagttgaggtgtcggtttttagtgggaggaaagggaatgggtatgagttggatagagttattatgttatttagagaggttttgtttttcgtttcgttgagggggagatagtaggagagtggttataggtttagtagtggcgagtataggttttggggttaggtgttggagtagggtttagtttttttattggttagttgtatatttggtttttagtgttttttttttttggggataggggatagtgttatgtaattttgtggggtataggttttttgtgtggttagtatgttaagagtatagagagggtggatttgtatatgagtagttttttgtgtggtgtttatttagttagtaacgtgttagatttaggaaaagattcggagcgttttgttagagtttatagttatattattaggtgtagattgtttgggtttagagtttttgtttttttttttttcgtttattaaacgttagtttttgattagtttggcggtttttttaattgagtgtggttgttagtttttttgtaggttttgttttagttagatttttattttgggtttttgttagtttggtattgatagttataggtagagttgagataaaagagaggggttttggggagtattagtagtagttaatttcggaagatatttatgttaggtggtttttggaaatcgaaagtagatttttttttgaagtattttttgggattagtttgattacgttttatattgggagaggtttttgggttaaaggattagtttgtagagggattttgtggttggaagcgaggaggttttatacggtcgttgtagttatcgtagttaggtaagtttttgtttttagtttttaggtgggtattttttttagttttttttttttttttatttttattttttttgagatagggttttattttgttatttaggttggagtatagtgatgtaatgttcgtttattgtagtttttgttttttgggtttaaacgatttttttgtttcggttttttaagtagttgggattataggcgcgtgttattacgtttagttaatttttgtatttttagtagagatagggtttcgttattttggttaggttggttttaaatttttgatttttggtgatttattcgtttcggttttttaaagtgtagggattataggtgtgagttatcgtattcggttagggtatttttttttttatataggtaagtgggggttatgtttttttgtttgtatataggtttggagttggggatttagggtttttgagtttagtaataattattgttgtttttaggtttatagggtttttgtgtatagttgggtagattatttattgtataaggatattagttaaagggtaagtgggttagaatttagtttggtttttttttagatttgtgtatttggtttaggtttgtatttattttaaggaagagtatttttttttttgatttgtacgaaggggttaatataggtagtcgggttttaattgtatgaaggaattaggtaaaaatagtcgttgttatataaagggtagcgacgttatttgttaggtgtttcgttgttttttttttttttttttgagatagagttttgttttgttatttaggttggagtgtagcggtttattataatttttgtttgtcggatttaagtaattttgttgttttagttttttgagtagttgggattataggtgtatattattatgtttagtttattattattattattttgtatttttagtagagtcggggttttattatgttggttaggttggttttgaatttttgattttaagtgatttatttgttttagttttttaaagttttgggattataggcgtgagttatcgcgtttggttagttggttatttttttaaggttttgagttatttttttaggacggataaatttagtggttgtagtagagtgaagtggttgggggtagaagtggagagggcgtttatttatattggcgtgtttgggattgaggggttttttaggatatagggaaattttagtgttaaaattagtatagtttttagtatataggataggcggttatattttggtttttttagttatttattgatattgatatagggaggagaggtgggttttttcgagtagattttttgtttgtggtttattgattgtggatgtggagttcgtttgtttttttgggtgttagtttatttatttgtaaggtgaggtgtaattaaggtggtttttagggttacggtaaggtttttagtggtgttcggggagtttcgataaggggtggttgtatagtgttagcgagtacgagttttagagtaaagttgtttattagttagtgtatttagtttttagggcgtttgtttatgtagatttttatgtagaggggttagggtaaggttagttatgattgtattttcgataagttttggggatgttattgtagtcgtttattaggttttttttaagtagttttaaggttattaggtttagatttttagtcggtgtttatagtagtgttatttagaggtttgttttaggtttgttgaattgaggggatagtgttaggtattataggattgttattcgagttagcgaaaaatatagggttgtantatttaaagggtatagtttaacgttatatattttatataggtggaggagcgaggagagaaaacggcggaagtatttacgagagatacgagggggaacggtttcgacgtacgcggtacggaatacgaatggcgcgaagaaattacggaggagtagaaaacgaaggcggggcgtcggttagagaaagacgagaagggtaaataacgcgagaaaaataaggaggggaacggggggtatataagaagaggcggacgcgtcgttttcgtaagcgtagtttattttaggcgtcgcgacggaacgaagttacgaggcgatgtcggcgcgcggtaagcgcgttagtaaggatataaagagagaagcggttataagaagaaaaagaacggagagcgataagcgagaaatataggcgaggaatcggagtacgggacgaatcgagggtcggggagtcgaagcggacgacgggggggagcgaacgatacggattaggatcggagaagaggagggaatataacgtaacggtacgaaaggttaaggtatcgtattaaaagaatagacggttaagcgttcggtaaaaaattttttttgagagggaaaatagtttttttttgttattaaaaacgtaggttgtatttgatcgaggtatagaatagaaaatgtgatggtatttatagagaatatgacggtagtttagaagtttaagagttgaatttttttagttatggtttaagtgttagtgttaagggtagaaattagtatttttatttagtttattttttagtttggaatattttgggttgtagttttgatttatattatttattttttttatcggaatattacggagtttcgatatatttttttgttatttatttttgttatttttcgttcggatatttgtgtttttttttgacgagtttttttttatttattttttaggttgtagtttcgtttttgtttgttgagattttttgggatagtttttgtaggggtttgttgtttgaagtttaaggtcgagattttaattaggtttattcggtttttcgatttgggtttacgtttgtggttttttttattttttcgtttatgttcgtgtggtagttttgttcggggtttggttttttgagatgagtttatttgtttttagttattaatttttgttgtttttattgttagggggtgtttttagtttacgttttatttagttaagtgttatatatttttttaggattatattgtagattaggtgaggggttttcgcgggggtatttatagtatacgttatatttattgggattatagtgggttttgtaagagagggatttcgtttgttatatagtttaggttgggttgaagggtgaatgggtaggttagtttttggggtttcgggttatttggttttcgtgttttattttttcgtttttgtttgttgtagg

SEQ ID NO: 1150 - DNA, 8077 bp, Artificial Sequence
  chemically treated genomic DNA (Homo sapiens)
  unsure 1432, 5957, 5963: n is a or g or c or t
tttgtagtagatagaagcggaggggtgaggtacgggagttagatggttcgaggttttagggattggtttgtttatttattttttagtttaatttgggttgtgtggtaggcggggttttttttttgtagagtttattatgattttagtaagtgtgacgtgtgttgtggatgttttcgcgggggttttttatttggtttgtagtgtggttttggaaggatgtgtaatatttggttagatgaagcgtgggttgggggtattttttggtagtaagggtagtaagaattggtgattagaggtaagtgagtttattttaaaaaattaggtttcgggtaaggttgttatacgggtatgggcggggagatggaggaggttataggcgtgggtttaggtcgggaggtcgggtgagtttggttaagatttcggttttaagttttaggtaatagatttttgtagggattgttttagagggttttagtaggtagagacgaggttgtagtttggagagtggatgggaggggattcgttaggagagggtatagatattcgggcgaggggtgatagagataagtggtagggagatatatcggggtttcgtggtgtttcgatggggaagatagatgatatgggttagggttgtagtttagggtgttttaggttgggggatgaattgggtggaaatgttgatttttgtttttgatattgatatttaggttatgattggggaggtttagtttttgaatttttgagttgtcgttatgttttttgtgggtgttattatattttttgttttgtgtttcgattagatatagtttacgtttttgatgatagagagagattatttttttttttagggagggttttttgtcgggcgtttggtcgtttgtttttttggtgcggtgttttggtttttcgtgtcgttgcgttgtgtttttttttttttttcggttttggttcgtgtcgttcgttttttttcgtcgttcgtttcggtttttcggttttcggttcgtttcgtgtttcggtttttcgtttgtgtttttcgtttgtcgtttttcgttttttttttttttgtggtcgtttttttttttatgtttttgttggcgcgtttgtcgcgcgtcggtatcgtttcgtggtttcgtttcgtcgcggcgtttggggtgggttgcgtttgcgggggcggcgcgttcgtttttttttgtgtgtttttcgtttttttttttgtttttttcgcgttgtttgtttttttcgtttttttttggtcggcgtttcgttttcgttttttgttttttcgtggttttttcgcgttattcgtgtttcgtgtcgcgtgcgtcggggtcgttttttttcgtgtttttcgtgagtgttttcgtcgtttttttttttcgtttttttatttatataggatgtataacgttgagttgtgttttttaggtantataattttatgtttttcgttggttcggatagtaattttgtgatatttgatattgtttttttagtttagtaagtttggggtaggtttttgggtggtattgttgtgggtatcggttgggagtttgggtttggtgattttgaggttgtttggagggggtttggtggacggttgtaatggtatttttagagtttgtcggaaatgtagttatggttggttttgttttagtttttttgtatgggagtttgtatgaataagcgttttgggagttgggtgtattggttggtgagtagttttgttttgggattcgtgttcgttggtattgtgtagttattttttgtcggggtttttcgggtattattggaggttttatcgtgattttgagaattattttagttatattttattttataagtgaatgagttgatatttagagaggtaaacgggttttatatttatagttagtgagttataggtagggggtttgttcgggggagtttattttttttttttgtgttaatgttagtagatggttaaaggggttagggtgtgatcgtttgttttgtgtgttggggattgtgttggttttagtattgaagtttttttgtgttttgggaaattttttagttttaggtacgttagtatgggtggacgttttttttatttttgtttttagttattttattttgttgtagttattaggtttgttcgttttgggagagtaatttagggttttggaaaaatggttaattggttaggcgcgatggtttacgtttgtaattttagaattttgggaggttggggtaggtggattatttgaggttaggagtttaagattagtttggttaatatggtgaaatttcggttttattaaaaatataaaataataataataataagttgggtatggtggtgtgtatttgtagttttagttatttaggaggttgaggtaatagaattgtttgaattcggtaggtagagattgtagtgagtcgttgtattttagtttgggtgatagagtaagattttgttttaaaaaaaaaaggggggggtaacgaagtatttggtaggtggcgtcgttgttttttgtgtggtagcggttatttttgtttgatttttttatatagttgagattcggttgtttgtgttggttttttcgtgtaaattagaaaaaaaggtgtttttttttggagtgggtgtaggtttaggttaaatgtataggtttgagagagggttaagttgaattttaatttatttgttttttggttggtatttttgtgtagtgagtaatttgtttaattgtatatagaggttttgtgggtttgggagtagtaatgattgttgttggatttaggagttttggatttttagttttaggtttatgtgtaaatagggaggtatgatttttatttgtttgtgtagagagaggggtgttttggtcgggtgcggtggtttatatttgtaatttttatattttgggaggtcgaggcgggtggattattagaggttaggagtttgagattagtttggttaagatggcgaaattttgtttttattaaaaatataaaaattagttgggcgtggtggtacgcgtttgtaattttagttatttgggaggtcgaggtaggagaatcgtttgaatttaggaggtagaggttgtagtgagcggatattgtattattgtattttagtttgggtgatagagtgagattttgttttaaaaaaaataaaaataaaaaagagagagagattgagaggggtgtttatttgagagttagaggtaggagtttatttggttgcggtagttgtaacggtcgtgtggagttttttcgtttttagttataggatttttttgtagattggttttttgatttagaagttttttttagtatggagcgtggttaggttgattttaggaaatgttttagaaaagagtttattttcgatttttagaaattatttgatatagatgtttttcgggattggttgttgttgatattttttagggttttttttttttgttttagttttgtttgtggttattagtgttaggttggtagaggtttaaggtgggagtttggttggagtaaggtttgtaagaggattaatagttatatttagttggaaaggtcgttaggttggttaggggttggcgtttggtggacgggaggggaagaagtagaggttttgggtttagatagtttgtatttggtggtgtggttgtggattttgatagagcgtttcgagtttttttttgggtttagtacgttgttggttgggtgaatattatatagggggttgtttatgtgtaaatttattttttttgtgtttttggtatgttgattatatagagggtttgtgttttataaggttgtatggtattgttttttgtttttaggggagggaggtattgagaattaggtatgtagttggttagtggaggagttggattttgttttaatatttgattttagagtttgtgttcgttattgttggatttgtggttatttttttattgttttttttttagcggggcgggggatagagtttttttgggtgatataatggttttgtttagtttatatttattttttttttttttattgaaagtcggtattttaattgttttttggggagtatttttttttattttcggttgtgtggtttttagagggtttttagtttttggtttttaattatttaaggtttggttgtttgagttttgcgggggtttcgggttatattgttggttttagggtggggttgtgagtttagttagtcggtgagagttagtttttgattgagaggatgtgggtttaggttgttggggtcggtggggtagagtagagggaagtaggtatttttcggtttgagtttttgggtttagttggtttaatttatggttaaggttgggttttattgtttagtgaggtaattagtagtcgtttttgtttttgttatttgtattttatggttttggatgagttttgggatgtgtttaggtttttgattagtggtttttagtttgggttggatagaagaattattagggagttttataaatttttaatgtttagatttaggaagttattatttttgggagtaggggataggtaggggtatttaaaagtttttaggtagttttattgggtggaaggttttggttttttggtagtttagagttcgagatagttagtttagaggttagatatttaatgattattttttgttttaattttaagtttagggtttttattgtgttaggggttttatttcgggggggagggggttttttttgttttttttttttttttattttttatttttttatttttttgtgtgtttttttttttattaggggggatttatgatttattggttggggggaaggttttggtaaggaaagaggtgtttatagatttgtttttagggttattgaggtttgatttggatgttgaggggtgggaggaatttttagtgtttttggatagtgtttggttttttagaaagggttaagggtaaagggtataagaggacgtgagtttagatgatgtcgtgtttttaaatgggtaggtaattgaattgtacgtagttgtttaggattgaagggtggttgggtatatggggtgtggtcgttagtgagtttgagatagaggaagtagtatatgtggttttatgaagggggagaaaggttatcggattttattaaggggggtaggttttggagtataggtatttaggggttttgttttttggttttttttgtagttcgtgttgtgggtgttttaggggtttatttattgatcgtagcgtggttagggacgtggtagagttttattgtttttattatatgaggttttgtttataggaagatggttttagtttatagggttgttgggcggtttattaattgtttttttgatgggtattaataattaaattgtgttatgttgggatttttagggatgttatattttgggtagacgtggtattttcgtttttttggttttaagggtgggatgggatgggatgggaggagcgggtagtgagagaggagacgtcgattttttattgagatttatagaacgtttgattttattttttttttcggcggggttatatttatataaattttagtattataaaatttattttgatatacgattttggaagtaaacggataagaaagtggtgggaacgttggagaggtggggtaggtcggtttcggtgtttgttgaggagggagggggtacggttttagttttcgtttatgggattggtattttattaagcgtttgttttagtgttttgttttcgtataatattagaaaaatatttttgttgattagtaatttttttttataaatttcggggtttatagtttattcgattttaggtagttgtgttttttatttttttagtgatggagggtattagattttagggaatgggagtagagagggtttagagaagtttttcgttgattttaagagtggataacggtcgtataaagtatttagataagttnggttanaattttttagggtaaagtattttaaaatatttgaaaaaataggttaaattgttgatattggtggaatattgaagggtggattattgagggggaagtatggaaagtaagggggagtggatgaaaggtagtatgaattttatttgtaatgttttgaaattttaaaaggagaaaatgaatgtcgtgtgttaaaagataaaattataatatatttagttataaatttaattggtttttatttgagatttatgaatcggggtagttttttttttataatatggagtaagagtttttattggttaacggtagatagcggtttttgtgagatgggaataaggaaacggaattacgggaaaaacgttaattggttattatcgtgttattttttttggtaaaggttaaagtagaggggatttttttattatattgatttaagtagattggaattttttgtttttaggaaaaatttgtttgtttgggatttatttgtttttttaagggttcggtttgatgatatgtggcgtttagtatgagtgattttattttgttttgttgtggtttgttggagtttagtgtaggagtttagtttaaaataatgggtttttataatttttgtttaataaatatttgtgtaattgtaataataatataagggaaaatgggtagggtaggtattttaggtagtgttaatgtattgttgaggagtgagtgtgtgtttatagatagaggcgtgtaggtaggtaggattttcgagtaggtatttgggtgtagtttttagtgggtataaaggtgagtcggggggttggagttagaggttagttatagttatagtttttttttatttattaagtttttattgagtattaaggagaaagggagtgatagttgaaaagttatttttatttttttttttttttttttttttttttttttttgagatagggttttaatttgttgttcgggatggaggtgtagtggtataattatggtttattgtagtttcgattttcggggtttaagtgatttttttattttagttttttgagtagttgggagtataggcgtatgttattatttggttaattttttgtttgtttgtttgagatggatttttgttgtgttgttaggttggagtgtagtggtatgatcgtggtttattgtaatttttgttttttaggtttaaagggtttttttgttttagttttttaagtagttgaaaaaataggtatgtgttgttacgtcgggtttttttttttttttttcgtatttttagtagatacggggttttattatgttggttaggttggtttcgaatttttgattttaggtgattcgttttttttcggttttttttagttttttaaagtgttgggattataggtacgagttatcgcgtttggttcgatatttatttagatagttgtaatattatagtcgttgaggggtattaatttttttttatttttttttttaaaaacgattgattaattgagatagagtttcgttttgtcgtttaggttggagtaaggtggtgaaattttagtttattgtaatttttagtttttgggtttaagtgagttttttgttttagttttttaagtagttgggattataggtatttgttattacgtttgattaattttgtatttttagtagagattgagttttattatgttggttaggttggttttaaattttcgaatttaggtgattatacgttttagttttttaagtgttgagattataggtataagttattatgtttggtttaaaaaattattattattttaggagtagtaagaagatatcgtagtggttatttagaggttatggtattaacgttgagattttttaaatttattaacgtttaaggttatttttttgtttattgagttgttatttgttattattttattgttatttagaggtttgttgtaaagagttttttgtagtatttgttattattaaatattgatttagggtttttagaatgatattgggagattttgagaattgtaggggtcggggacggatttaagtagagatgtcgtagttgtttttttttattttttttttttaaagttttttttttcgttgatgtttttattatattttag

SEQ ID NO: 1151 - DNA, 12054 bp, Artificial Sequence
  chemically treated genomic DNA (Homo sapiens)
agttatatatttgttttttttgaatgtgatgtaaaatttgtatagtaaagtttttatattttttattaattatatttgttttttagatatgttattaatttaaattaaaatggttagtattaataaatatgttgtatcgggtttttttgttattggtaagaatatgttttttgtgttaagttaggtttgggtgtttggagtttgtgaataaagttatattaaggtgttttggggtttgtttttgttttggttagttttagttgagttttggggattatttggatgggtggtatgggaatggataggtttggggtgattgaatttttggtttatagattaaggagttttttttaaaggaagaagttatgttaggattttagtggtaggtgtttttaaatagatggaggaatggagaaggtatagcgttaatggtttataatgcgtagaggaagattatttaggttttagtagtaataaagttatgagtaggtttagtattttttgagttggagatgttttagttttatggaagttttggagggatgaggtggtgtttatttgaatttaatatttaggagttttttattgttagttatatatatagataggtggagaagaggtattttttaaatattattttattttaatttttataaggttatgaggtaagaattgtgatgttttagttgaggaaaatgagaaacggagaggttaaggtatttatttaagattatatagttgtagggtggttaatttaggatttaggttatagtttttattttagaatttttttagaagtttaggaatttgttggttagatatttattgagtatttattatgtttataagatagtgttaggttgtggagtattttttaggataggtcgcgtggtaggttatatattaagttttaatagatttaaatataatatataaagtattttttttaattataataggatgaagttaggtagcggtattagatttttataggggtataaattttattgtgaattatatatgtgaaggatttaggttgtgcgttttttaggagaatttgagtttaatgtttgatgatttaaggtggaaaagttttattttgaaattattgtatatttttttttattcgtgaaaaattgttttttatgaaattggtttttggtgttaaaaagtttggtgattgttgttttaaattattattggatttattgagtgaggtaaattaagtattgttttgttatagtttgtttataggagagagttgtattgttaatttgttattaggaagtagttagaattatatatttgattttatggaggtagaatacgtttaaagagaatgtttttagtgggggggatgtgtatgtatgttttagtgattaatgtggtttagtacggttgtattaatataatgaggtttttaaagggaattggataagacgatttagggttttttgtattgtacgataggatttaggtgtttgcgggtattattgattgttttgtcgaggttttttgtgttggaggtgttattgtagatggaaggatttttttttgaggaagtttattattggcgaaggtgaatgggtttgggcgtaggattagtgtagtttaggagtgattttaaaggtgttggtgtgtgggtattacgtgcggagtttagttttaagttttttttatgtattagtttatttaatttttatagtatttttttaaggtttatatttatttgttttattttatgggtgaggaaaggaagtttggagaaattaaggaatttattgaagattatataagaattaaatgatagggttaagatttaaacgtgggttatttgtattatttatagaattgtatgtttggtttatattttgttgattatttatttattgatggatatgcgttgtttttattttttggtttttgtgaatgatgtttttataaatatgggtgtttatatgtttttttgagtttttgtttttggttatttgggggatatatttagaagtggaattgttggattatatagtaattttatgttgagatttttgagtaatagttatgttgtttttatagagttttagtttatttataatttagttaatagttgttattttttggattttttttttttttttaattatagttattttaatgagtgtgaggtggtagatttatattttgaaaagattttttagtttatagggtagagaatagagttttcgagataggtttgcgattttgaatattagagttttgagaagaaatatttacgagggttgttttttattttttgaagattagggttaattattgcgaatggattgtggtgattgaagggtgtcggtattgtgttttaaagtgtttttttattgtgttgattggtttaaaaatatattagtttttgggtatgattttattggggtttttttaggtagggtgtggagtagaggatttttttttataggttggatttaatagtgaggttgtttatttgtgatttatttttaaggtttaaggtgatgttaaggtgttgatttgttagaattttgagttgtgtttgtgtttttttgggttttgggagatttttttttttagtagtattttatggaaatattgtttaggtagagtaaaatgtatagattttggttttttgttttgagttttgttttgagatagggttttgttttgttatttaagttggagtgtagcggtatggttatagtttattgtggttttaattatttaggtttaagtaatttttttgttttagtttttttgtagttaggattataggtgtgtattataatgttttattaatttttttgatttttagtagagataaggtttcgttatgttgtttaggttggtttcgaatttttgggtttaagtaattttttcgttttagttttttaatgtgttgaattataggtgttagttattgtatttagttttagtttgttgttaatggatgtaaatatttgtgtgatcgttatttagaattagatttagaatatttttagttttttaaagatttttttttgttttttttagttagagatttttaagggtgacgttattttggtttgttgtttaatttgatttgaataatattttaagttaagtttggatttggttttttttgtttagttgcgaggtttattgatgttttttgtggtttagtttttttttattgtcgagggttattttgttgtatgaaaattataatttatttttttttttttttttggtgaatatttgtattgtttttagtttggggtaatgatgagtaaagttgttaaaaataggtatatatgttttttttttttttgggtaattttttagaagtagaaaagttagaatatagaagtagatatttgattgtattataatttattaagtagtttttttttttattttttattttttaattttttgagatagagttttgttttattatttaggttggagtgtagtggcgtgatgagggtttattatagttttgattttttggggttaagtgagttttttattttagttttttatgtagttgagattataggtgtgtattattatatttggttaatttgtttgttaaattatatgtagggatagggttttttaatttttttcgagttggttttaagtttttgggttgaagtgatttttttgttttagttttttaaagtgttggtattataggtataagttattacgttttgtttatttttttaagttggattattttatattttagtttgttgtgaatgagagttttagttgttgcgtatcgtaattaatttgtgattgtttataaatgatgtgtcgtgatgaaattgtttttggtgttcgagaggatcgtaaagaattttttttttttttttttttttttgttttttttgtattgtttattttttaaattggtatttgatttaggaatataatggggatggatagtgtagatggtatatatggttttagtttattggagtattttaaaggaattagtttgtaaattttagtgtatttaggtggagtataggaaggaagagaggtgtagatttacgtatggttttggggtatttgttattttttcgtattcgtatagtttttatttgttagtatttattttatttagtttgagttttgggtttttttattagtatatcgttgggatttggtcgattttaggtaagtttattttatggtttttttttttacgatttgtatatgttatatgtttttttttagttttatgttatttgaaatgttttattatgtttaagatttttttttttattttaaagtgtagaaaataaggatggagaagagaaggagaagagaattaagagagatttattgagagggaggattagaagtttttgggtattttatattgtagaataaaaatatttattatggtgttttttttgtaaaatatttttttttatataattatgtttttatatgaataatataaatttaaataggagaaatattttttgaagagtttgagaatttttataaagtttaggcggttacgaattagttgtgtgatttggggtatgttttttagattttgagttttagtttttttgtatgtaaaatgggttgaagtcgtttttttttataagtattttgtgtataggtaatgtttagttttattattttttggatttcgtggttaagtatgtttaggatatatagttatatatttttgggtagtgttatttggtaatttgttgttatgttagtgtggttaagtattgtagatttttatgaattaaatatgttttaggtttgggttgagtataggagagggaggagggaaaggttattggggttgggagtgtttatttttttttgtgagtgttattttagtttatttagtattatatttttttttttttggatttatttttttttgttgtcggtttttttttattgaataatagttaagttgttttggtttttatttttttgttaagtcgttttttttataaaggattttttagtgggtgtgaaaggtagcggtggttatagaggcggcggagagatggtttttagcggtttttaggttttttatttgagtttagtgagttttagggttatgggtatagggttgttttagttagagggatatagttttggggttttgaggaagtaatttttgggtggtaggggatgggggtgggggtattttaaagagaatataagtagggtagaaatattagaggaggttattttggtatatttgtgtcgtgttgagtttatttatgtttggagggatgtttttttttacgagttatggttttgatagtgttgattgagttgttttgttttgttttgttttgtgtgtttaggggaagatatgtagagcggggtggtttatgtaaagaggaagtaagtacgtttttgggatagtaaggacgttattcggtatggtagttaagggtgtttattgtgaaggtggtttttttgggtttagttatttattggttggtggtttttgggttttagtttttatatttgtgaagtgggaataatatttgagttttttatttttagggttgggatatggattaaggaagtagtgtatttagtgtgtttgaatagtgtttgatatattgtaggtgttttgggagtgttttatgttattgggtgtttgagggtagtagggaagatttttcgaggaggtgtttgtgttttgaaggttgggtatgggtatgtttagggtatttgtggaggggtagttttagaggtgagaggggggtgaggattgtttttgtagcgtggggttagagggcggtaggtgttttgttgaaattttgtgaggtttatgagttttttttatatacggaaaatttgaggtttagggaggtagaggttagttgttaaatgtttttagatgggagtggtagttttaggagtttaggagattttaggggttattgtgttttgggtcggtttttgttataggattttatttcgttttggtaaagagtttttcgaggggttggagagggtgggttgatgggttttttttgggtggggaggtagggtggggagggtgggtagaggtagggtattgagggagggaagttgttatggtttattttagtagaggttagggtcgggtttgagtgttttttggtgatattgagtttagaatgaggttgtttacgttttggtttgtagagttcggttttgttttttaaattttagagagaaagaatggggaaaggaggtttgtttttttttggttgttattaatgatattttagttattttgtggaggtttttgaggtaggatttgtatagagggggttgggggaagttggaataggtcgttggtgggggttttagggttagtaggtgttgttttgggtatgttattttgtttttggttttttgttaaagaggggattttagagttttttttaggttttgatatattattattttggtgattggtttttattttttaatttttggatttagaaggaaaattattttacggatattagagagttaaaatagggttttggagtttagataagaaagatgattagtgtagtttttatgggtgtttagagtatttttttattttacgggggtttttttgggttgggataattaagttttatttggtgatttatttggtagtcggagttacgttttttttatatgtcgatagtgggggaaggttacgcggttcgttgttttgttgaggagggttgagtgttatgagggtttggtttggaaattttatttttattttttgtttggttttatttagtttagtttttttggagggtttgggggaagttggaattacgtgttgtgtggtttaggaagtattgggagagttaggaataaggatgtttttagtttatttatgagaggaagtttgtgtggtggttagaagcgtgggtgttggggtttaaattttagttttgttgttgattagttgtgtaattttgagtaagtgattgaatttttttgtgttttagtttttttatttgtaaaagtggtcggggttgttgtgaggataaatgtttttagttatgtttagagtttttatggatatatatggatttaaatgttatagtagttttagttggttaattttaaaataatatatttgtttttatagtgttggaggttagaagtttaaaattaaagtgttatggaaggtggttagtaggattatggagtttttgaggtagcggggtattttggttaagagttacgtattggttttttgttggtacgtagttttggttagttaggttgagttttttatttcggggtcgggtttgggtgttttttggtgatgttgagtttaaaataaggttgtttatattttggtttatagggtttagttttgttttttagatttttagataagaagaggaggaaaagttttcggtttttgggtattattaggaatagagagtaagttatgatttagtagagggatcgatttgtttaatgtaaagagttgtattgttatgtttgatatgagttaggggtttagtatacggaatcgtatttagtttttttagaacgttgttagttaggggtttagtatatagcgttgtatttagttttttttagaatattgtcgggtggtgttattgttttgttatttagaggagggaattggggtataggtaggttaagtgatttggttagtgttagaattgttagtgtatagagttgggaggtaagtttagtttcgtgggattataaatttagtgtgaaaatttatttttttgtattatatggaataaaagtaggttcggttgtttttttgggttttttggatatatttatttaaattttatagtagttttggttggttaattttaaaataataaatttgtttttttaatgattttgaaggttagatgttaaaattaatgtgttagtaaagttgtttttttttggaggttttaggggaaaatttgttttttttttttttttattttttagaggttgtttgtaggttttggtttatgattttttttgttatttttaaaattagtagttttggttgggtttagtggtttatgtttataattttagtattttgagaagtcgaggtaggaggatttttttaatttaggagtttgagattagtttgggttataaagtgagattacgtttttataaaaaatagataaatattagttaggtgtggtggtgtatgtttgtagttttagttatttgggaggcggaggtgggagggttacgtgagtttgaggaagtggaggttatagtgagttgagatcgcgttaatatattttagtttggttgatagaatgagattttgttttaaaaaaaataaaaaataaaaaacgaaaataaataaaaattttttaaaaacgtaaattagtttttttttgtttttgtgtttttgttgttatattttttatttttgatattgatttttttgttttttttttataggatttttgtgattatattgggattatttttaaaattaggataatttttttatgttaaaattattaatttaattatatttataaagttttttttataatatatttatagttttcggggattcgaatgtggatgtttttggggggtggtttattggtaattagtgttataagttttttataaatttttttagatatattttatttataaataaataaatgtaagtttatagattttttttatttattttttatataaatggtattattttatattagtgtttagagttttgttttttttttttttttttttttttaaggttatatagaatttattaaatggaaatattttaatttattttattttttttttgttagaggatttttaagttttttttaatgttttgttttataattttttgtgttataatgttgtaatgaataattttgtttgtaggatgatatttaatttaaaaatttattttttaggttaggtatgatggtttatgtttgaaattttggttttttgggaggtcgagtcggaaggattatttgagttagtttaggtaatatatagagattttatttttataaaaaatattgtaagattagtgggatatggtggtttgtatttattttgttttagttattcgggaggttgaggcgggaggattatttgagttagggggtggaggttgtagtgaattatgattatagtttttattgaattttagtttgggtaatagagtgagaatttatttttaaataaataaataaataaataaataaataaataaataaataaataattttgttttttcgaattttgggggtattatttaagatattttgaaattttatagagtttttttggggaatttgttgttttggagattagtttgttttgtttcgtttttatgatttgtatttttttttttttttttttggtttttttaattaagttttgtgtgtatttgttagtttatgtttattacgttttgtttttaattttagatgttgtgttgtgaatatatttaagtggaggtcgtatgttttttaggagggtgtgtatttttagtgttgtgttttatgatagtatgaaaggttttggagagaattataggtttttataaataggtaaggagaaaaatgttttatagatatgttttagggaaaataggttttttaattttaggtcgtgttggtttataattggattaggttgatttttttttttttatattgttggtgtagatagggataagaatgagaagttagagatatagagaagttgtgatttgtttgaggttattaaagtatttaatggtagagtttagatttgatttgaggggtaataaaagatattttttttaaatttatggggagtagagtttaattgaattagattttagattttttggggtttttacggtgttaggtgtgtatattgagttaggatgggttttttagggttttgtgtggttatataatttaataatatagattagaaagtagtggtaagtaggttgaatttggttggtgggtgttttttgtttggtttgtatagtgttttttttaacgttttattataggaaatttaaatatgtagaaggaattgtattattaataatatatatttattattttgttttaataatgattaatttaggtttattttgttttattttatattttttttcgtttgttttttttttatttttagatatgtggaagtaaatttaaagatattattttattttaaatattttattttgtatttttataatatgggaatttggggggttttaagataggattttattttgttgtttaggttggagtatagtggtgtgattatggtttattgtagtttttattttttaggtttaagggatttttttattttagttttttaagtaattagagttaaaggtgtgtattattatatttagttattttttttttattttttgtagagatgggggttttattacgttgtttaggttggttttaaatttttgggtttaagtgatttttttgttttagttttttaaagtgttgggattatagatgtgagttattgtgtttagttaggagtttttatataattttttttgataaatttttttttaagaaattagaaagttttatagaaaaaaaaaattcggatttttgtttttttttaaaaatttggaagttttgttaatattgggtttagatggtaattattgtttagtacggagtagatgttgattttttagatgaggggtgtgatatttattttgttatagtttttattatttttttatttggttattttatttatatatattatttgtttggtttttttaggtatttaatttgtgtaggaaattgatttaaaggagatattagagaagatattaaaaatttgaagaatgtgaaaattagttaggagatagaattgtgttttaatgcgggttatagaacgatattggatatgaagtattttgggaataaattttgaaaattggaagtattagtttgtgaattttgttgagagagatgaaggtggggggtgggtgatagtggtgaagtattttttatgtgttagttttttttattataggttgttttttataaaattattaattatatgtagtaggtgaaatatttttttattttatagatgaggaaattgaggtatagagaggtgaaataggttttttaaggttatttaggttatgagtagtagagttaggatttagatttggagttggtttgattttaaaacgatgtatgttttattatggtttattatttttttaaagagtattagaagagagaatttgataaagtggttgttcgtggggtttgggatgggtggggaaattacgttaggtttcggggttgttgagggtttgagggaaggaatggggagttcgggtatagaaatagaggagggggttgttttacggttatagaaggtatttgggaagacgttttgttgaaggtggttaggagggtaaaggttatagtggttattgttatatggtggtggtggggagagggggatggtttttttttaattttttcgggtgagtcgaaggtttattttttagatttttgatgggtttttttggttttttgggttttttgagtttttagttagggtttgggatttttgttgggagtttagtatggggtttagtagtttttattgttatttaattttttagtagtttagggtgtttgtttgttatttttttgtttggaaggaaggttttttgtttggtgtatttttgttgtagtttttattgttttttagatttttatataagtttagttttttgtcgcgtttttttagggttaggtttttttttattataagtttagattgtttgagtaattaattggatttgtgtttgtttttatataggattttaagattcgtggggttgcgattttttttgtattggttatagtcgtattttatttttttgtatggggttgttaaatttaggttggttattgattagcgttggaggggagtaaacgggaggtcggttatttgattgatgtttttatattttttttttgtagg

SEQ ID NO: 1152 - DNA, 12054 bp, Artificial Sequence
  chemically treated genomic DNA (Homo sapiens)
tttgtagggagaaggtgtgggaatattagttaggtggtcggtttttcgtttgtttttttttagcgttagttagtggttagtttgggtttgatagttttatgtaaggggatagggtgcggttgtgattagtatagagggagtcgtagttttacgggttttagggttttgtgtggaggtaaatataaatttaattagttatttagatagtttaagtttgtgataaggagaagtttggttttgagaggacgcgatagggagttgagtttgtgtgagagtttaagaggtagtggaggttgtagtaggaatgtattaggtagaaggttttttttttaggtagggaagtagtaggtagatattttgggttgttaaggaattaggtagtaatgggggttgttggattttatgttaagtttttagtaaaggttttaggttttggttggagatttaggaagtttaagggattaaagggatttattaagggtttggagggtaaattttcgatttattcgaggaggttaagaagaagttatttttttttttttattattattatataataatggttattgtgatttttgtttttttggttatttttagtagagcgtttttttagatgttttttgtagtcgtggggtagtttttttttttatttttgtgttcgggttttttatttttttttttaggtttttagtagtttcgaggtttagcgtggtttttttatttattttaggttttacgggtaattattttgttaaatttttttttttggtgttttttaaaggagtgatgggttatggtgaggtatgtatcgttttagagttaggttaattttaggtttgaattttagttttgttgtttatgatttgagtgattttgggaagtttattttatttttttgtgttttagtttttttatttgtaaaataggaaggtgttttatttgttgtatatgattgatgattttgtgagaaatagtttgtggtaaaagagattggtatataggagatgttttattattgttatttattttttatttttattttttttagtaaaatttataaattggtatttttaatttttaaagtttatttttaaaatgttttatatttaatgtcgttttataattcgtattaaagtatagttttattttttggttgatttttatattttttaagtttttaatgttttttttaatattttttttaggttaattttttatataaattaaatgtttaaaggagttaggtaggtgatgtgtatgggtgagatggttaggtgggggagtggtggggattgtggtaaagtagatgttatattttttatttgaaaagttaatatttatttcgtgttaagtagtgattgttatttgggtttagtattggtagagtttttaaatttttaagagaagatagaagttcggattttttttttttataaaattttttaattttttgggggaaaatttgttaaaaaggattatgtaaaagtttttggttgggtatagtggtttatatttataattttagtattttgggaggttgaggtagaaggattatttgagtttaggagtttgaggttagtttgaataacgtaatgggatttttatttttataaaaaataaaaaaaaaatagttaggtgtggtggtgtatatttttaattttagttatttgggaggttgaggtgggaggattttttgagtttgggaggtggaggttgtagtgagttatgattatattattgtattttagtttgggtaataaagtgaaattttgttttgaaattttttaaatttttatattatagagatataaaatgaaatatttgaaatggaatggtatttttggatttgtttttatatatttgagggtgggaaggaagtaagcgagggagggtataggatgaagtaagataggtttgagttgattattgttggagtagagtgatgggtgtgtgttgttgatggtataattttttttgtatgtttgaattttttataataaaacgttaaaagaaatattgtgtaggttaaatagaaaatatttattagttaaatttagtttatttgttattgttttttggtttgtattgttgagttgtgtgattatatagaattttgggaaatttattttagtttagtgtatatatttggtatcgtgagagttttaggaaatttgggatttgatttagttagattttgttttttatggatttgaggggggtgttttttgttgttttttaggttaggtttgaattttgttattaagtattttagtgattttaagtaaattatagtttttttgtgtttttgattttttatttttgtttttgtttatattagtagtgtaggggaaggagagttagtttgatttaattatggattagtacggtttaggattgggaagtttgttttttttgaaatatgtttgtggaatatttttttttttgtttgtttgtggaagtttgtgattttttttagagttttttatattattatgagatataatattgaaaatatatatttttttgggaagtatgcggtttttatttaagtgtatttatagtatagtatttagaattgaaggtagagcgtgatggatatgggttggtaagtatatataaggtttaattaaggaagttaggagggagaaagaggaagtatagattatgggggcgggataggataggttaatttttaaggtaataagttttttaaaaaagttttgtgaggttttaaaatattttaaatagtgtttttaaaattcggaaaaataagattatttatttatttatttatttatttatttatttatttatttatttagagatgggtttttattttgttgtttaggttggagtttagtgagggttgtgattatggtttattgtagtttttattttttggtttaagtaattttttcgttttaatttttcgaatagttgggataaaataggtgtaggttattatgttttattaattttataatattttttgtaaagatggggtttttatgtgttgtttgggttagtttaagtgattttttcggttcggttttttaaagggttaagattttaggtatgaattattatgtttggtttgaaaaatgagtttttaaattgaatattattttataaataaggttatttattgtagtattataatataaaggattataaagtaaagtattggaaagagtttaaaagttttttgataggaaaaaggtgaaataaattagggtatttttatttaataggttttgtgtagttttaaaaagaaaagaaaaagaggaagatagaattttgagtattgatatggaatgatgttatttgtataaaaagtgggtgggggaagtttatggatttgtatttatttatttatagataaaatatatttggaaggatttataagaaatttataatattggttattagtgggttattttttagaaatatttatattcgaattttcggaaattgtgaatatgttgtagaagggattttgtagatgtgattaaattagtaattttggtatggggagattgttttgattttaaaggtggttttaatgtgattataaggattttataaaaggaaggtaggaggattagtgttagaggtaggagatgtgataatagaagtatagaagtaagaagaagttggtttgcgtttttggggggtttttgtttgttttcgttttttgttttttgttttttttgagataggattttattttgttagttaggttggagtgtgttgacgcgattttagtttattgtagtttttatttttttaggtttacgtgatttttttattttcgttttttaggtagttaggattataggtatgtattattatatttggttaatgtttgtttattttttgtagagacgtggttttattttgtggtttaggttggttttaaatttttggattaaggagatttttttgtttcggttttttaaagtgttgggattataggtatgagttattgggtttagttaaagttgttggttttaaagatggtaggaggggttataagttaaggtttgtaggtagtttttagaagatggaaaaggaaaagaaatagatttttttttggggtttttagaaggaaataattttgttgatatattgattttaatatttgatttttaaaattattaagagagtaaatttgttgttttaagattggttagttaaggttgttgtggaatttggataagtgtgtttagaaaatttaggaaaataatcggatttgtttttgttttatgtggtgtaggaggatggatttttatattggatttatggttttacgggattgggtttgttttttagttttgtatattagtaattttgatattggttaagttatttgatttgtttgtgttttagtttttttttttgaatggtaggatagtaatattattcgatagtgttttggagaggattgggtgtaacgttgtgtgttgagtttttggttggtagcgttttgagaggattgggtgcgatttcgtgtgttgagtttttggtttatgttagatatgatagtgtagttttttgtattgaataaatcgatttttttgttgagttatgatttgttttttgtttttgatagtgtttagagatcggggatttttttttttttttttatttggaagtttagaaagtagagttgagttttgtgaattaaaatgtgggtagttttgttttggatttagtattattagaggatatttaggttcgatttcgaagtggggagtttagtttggttggttaagattgcgtgttagtaggaggttagtacgtggtttttagttaaggtgtttcgttgttttagaggttttatggttttgttggttattttttatgatattttgattttagatttttgatttttaatattgtaagaataaatgtgttgttttgaggttgattagttaaggttgttgtggtatttggatttatgtgtgtttatgagggttttgggtatgattaggaatatttatttttatagtaatttcggttatttttatagatgaggaaattgaggtatagaaaagtttagttatttgtttaaagttatataattggttagtaatagagttgggatttgaattttagtatttacgtttttaattattatataggtttttttttatgagtaagttgagaatatttttatttttggtttttttagtgttttttggattatatagtacgtggttttagttttttttaggttttttaaagaggttgggttagatgaggttagataagaagtgggagtgaggtttttaagttaggtttttatggtatttagttttttttagtaggatagcgaatcgcgtgatttttttttattgtcggtatgtggaggaagcgtggtttcgattgttagatgggttattaagtgaggtttaattgttttaatttaggggagttttcgtggggtagaggggtattttggatatttataggggttgtattgattattttttttgtttggattttaaggttttgttttaattttttgatgttcgtaggataattttttttttgaatttaaggattagaaagtaaaaattagttattagaataataatatgttagaatttggaagaagttttgggattttttttttgatagaaaattagagatagggtgatatgtttaaggtagtatttgttgattttaaggtttttattagcggtttgttttagttttttttagttttttttgtgtaggttttattttaggggtttttatagggtggttgaggtgttattggtgatagttaggaggaaataggttttttttttttattttttttttttggagtttagaaagtagagtcgagttttgtagattagaacgtaggtagttttattttggatttagtgttattagggggtatttaagttcgattttggtttttgttgaggtgggttatggtagttttttttttttagtattttgtttttgtttattttttttattttgtttttttatttaggaaggatttattagtttattttttttagtttttcgggaagttttttgttaaggcggggtgagattttatgataggagtcggtttaggatatagtgatttttgaagttttttgggtttttggggttgttatttttatttggaggtatttggtaattggtttttgtttttttgagttttagatttttcgtgtatgaaggggatttataaattttatagggttttagtaaggtatttgtcgttttttgattttacgttgtagggatagtttttattttttttttatttttgagattgtttttttatagatgttttgaatatgtttatgtttaatttttagagtatagatattttttcgggaggttttttttgttgtttttagatatttaataatatgaaatatttttaaagtatttatagtgtgttaggtattgtttaaatatattagatatattatttttttaatttatattttaattttgggagtggggggtttaagtattatttttattttatagatatggaaattgaggtttagagattattagttagtaaatagttggatttagggaggttatttttatagtaagtatttttaattattatgtcgggtagcgtttttattgttttagaagcgtgtttgttttttttttatatgaattatttcgttttatatgtttttttttgagtatataggataggataggataggatagtttagttaatattgttaaagttatgattcgtgggaaggagtatttttttaggtatgagtgagtttagtacggtataggtgtgttaggatgattttttttgatatttttgttttgtttgtgttttttttgggatgtttttatttttattttttgttatttaggagttgtttttttagagttttagagttgtgtttttttggttgaggtagttttgtgtttatagttttggaatttattggatttaggtagggagtttgggaatcgttgaaggttattttttcgtcgtttttgtggttatcgttgttttttatatttattaggaagttttttgtagagggaacgatttaataaagaaatagaaattaaagtaatttggttgttatttaatggggaggagtcggtagtaaaaggaagtgggtttagagagagaaaggtatggtattgggtggattggggtgatatttatagagggaagtaggtatttttagttttagtgatttttttttttttttttttttgtgtttaatttaagtttgaagtatatttggtttatagaggtttataatgtttgattatattgatatgatagtaagttgttagatgatattgtttagaagtatgtggttgtgtgttttaagtatgtttggttacggagtttagaaaataatggggttgggtattgtttgtgtatagggtgtttgtggggaagggcggttttaatttattttatatatagagaagttgaggtttagagtttaaggggtatgttttaggttatatagttaattcgtggtcgtttgaattttatgaagatttttagattttttaaaaagtattttttttgtttaaatttatattatttatgtaaaaatataattatgtagaggggaatattttgtaagaaaaatattataatgaatatttttattttatagtatggggtgtttaggagtttttgatttttttttttaatgaattttttttgattttttttttttttttttttttatttttattttttgtattttaggatgaggagagaagttttggatatgatagaatattttaagtgatatggggttgggaaggaatatatggtatgtgtaggtcgtgggggagggagttatgaaataaatttatttgaagtcgattaggttttagcgatgtgttggtgagaaggtttagaatttaagttgggtagggtaagtgttggtaggtaagggttgtacgggtgcgagaggatggtaggtgttttagggttatacgtgagtttgtatttttttttttttttgtgttttatttagatgtattagaatttgtagattaatttttttgagatgttttaatagattgaggttatgtgtgttatttgtattgtttatttttattatgtttttggattaagtattagtttaaggagtagatagtataaggggagtagaaaggagagaaaggaagggaaattttttgcgattttttcggatattagggataattttattacggtatattatttgtaggtaattataaattgattgcgatacgtaataattggaatttttatttatagtagattggagtgtaaaataatttaatttagaaaaatgggtagggcgtggtggtttatgtttataatattagtattttgagaggttgaggtaggaggattattttagtttaggagtttgagattagttcgggaaaggttggaagattttgtttttatatataatttaataaataaattagttaggtgtggtggtgtatatttgtggttttagttatatgggaggttgaggtgggaggtttatttgattttaggaggttaaggttgtagtgaatttttattacgttattgtattttagtttgggtaatagagtaagattttgttttaaaaaattgaaaaataaaaaataaaaagaaaaattgtttggtgagttgtaatatagttaaatatttatttttatgttttggtttttttatttttaaaaaattatttaagagaaaggaaaatatatgtgtttgtttttaatagttttatttattattgttttaggttggaaatagtgtaaatgtttattaaaggagaagggagaaatgaattgtggtttttatataatagagtagttttcggtaataaaaaggagttaggttataggaaatattaatgggtttcgtaattgagtagaagaagttagatttaaatttgatttgaagtgttgtttaagttaagttgaataataggttagaatggcgttatttttgggggtttttgattgggaggggtaggaaggagtttttgagaggttggaaatgttttggatttggttttgggtggcgattatataggtatttatatttattaataataggttgaggttgggtgtagtggttgatatttgtaatttagtatattgggaggttgaggcgggaggattgtttgagtttaggagttcgagattagtttgggtagtatggcgagattttgtttttattaaaaattaaaaaaattagtggggtattgtggtgtatatttgtagttttggttataggaaggttgaggtaggaggattgtttgagtttgggtggttgaggttatagtgagttatgattatgtcgttgtattttagtttgggtgatagagtaggattttgttttaaaataaaatttaaaatagaaaattaggatttgtatattttattttatttagataatatttttataaaatattgttaaaagaaaaaattttttagagtttaaggagatataggtatagtttagagttttagtaaattagtattttagtattattttgagttttggaggtgagttataggtaagtagttttattattgagtttagtttataaaggagggttttttgttttatattttgtttggaggggttttagtaaggttatatttaaaggttgatgtgtttttagattaattaatatagtagggagatattttgaggtatagtgtcggtattttttagttattataatttattcgtagtggttaattttggtttttaggagatgagaagtagttttcgtgaatgtttttttttagagttttagtatttaaagtcgtagatttgtttcggaggttttgttttttgttttgtagattgagggatttttttaaaatgtgagtttgttattttatatttattaggatggttgtgattaaaaaaaaaaaaaaaatttaggaaataataattgttggttagattgtgggtaaattggaattttgtgaaaatagtatggttgttatttaaaaattttaatatagaattattatatgatttagtaattttatttttgggtatattttttaaataattaaaaataggaatttaaagagatatgtgaatatttatgtttgtaggagtattatttataaaagttaagaggtgaaagtaacgtatgtttattaatggatgagtggttaataaaatgtgggttagatatataattttatagatagtataaatagtttacgtttgaattttggttttgttatttaatttttgtgtgatttttaataagttttttaatttttttaagttttttttttttatttataaaatgaggtaaatgaatgtgaattttagagagatgttgtggggattaaatgggttaatgtatgaaaaggatttggggttgagtttcgtacgtagtgtttatatattagtatttttagagttatttttggattgtattgattttgcgtttagatttatttattttcgttagtagtagatttttttaagaaggaatttttttatttgtagtgatatttttagtatagagggtttcggtagggtagttagtgatgttcgtagatatttgagttttgtcgtataatgtagggggttttgggtcgttttgtttagttttttttggaaattttattgtattggtatagtcgtattgaattatattaattattaaaatatgtatgtatattttttttattgagaatattttttttgagcgtattttatttttataaagttagatatatggttttaattgttttttaatggtaaattaatagtgtaatttttttttgtaaatagattatgataaaatagtatttggtttgttttatttagtaaatttagtagtagtttaaggtagtagttattaaattttttggtattagggattagttttatggagggtaattttttacggatggaaagggatatataatgattttaggatgaaatttttttattttagattattaggtattagatttagatttttttaaggagcgtataatttagattttttatatgtgtagtttataatagggtttgtgtttttatgagaatttagtgtcgttgtttaattttattttattgtggttggagaagatgttttgtatgttatgtttaaatttattgagatttaatgtgtggtttattacgcggtttattttggaaaatgttttataatttagtattgttttatgaatatagtaggtgtttagtaaatgtttgattagtaaatttttagatttttggagagattttggagtgaaagttgtggtttgagttttggattggttattttgtagttgtgtgattttgggtgaatattttaattttttcgttttttattttttttagttgaaatattataatttttattttatggttttgtgaggattaaagtgagatggtgtttagaaagtattttttttttatttatttgtatatataattggtaatgaggggtttttagatattggatttagatgaatattattttatttttttaaggtttttataaggttaaggtatttttagtttaggagatgttgggtttgtttatggttttgttgttgttggggtttggatgatttttttttgcgtattgtgggttattgacgttgtgttttttttatttttttatttgtttagaaatatttgttattgaggttttggtataatttttttttttggaaggagttttttaatttatagattaggggtttagttattttagatttatttatttttatgttatttatttaaatggtttttaggatttagttggaattgattaaagtaaagataagttttagaatattttggtataattttatttataaattttagatatttaggtttggtttagtatagagggtatgtttttgttagtggtaaaaaaattcgatatagtatgtttgttaatattaattattttaatttaaattaatagtatgtttggaagataaatgtagttgatagaaaatataaaaattttattgtataaattttatattatatttaaaaaaagtaagtgtgtggtt

SEQ ID NO: 1153 - DNA, 6827 bp, Artificial Sequence
  chemically treated genomic DNA (Homo sapiens)
ataggtttagcgtttggattttaagagtttttagaagatagttgggttttttagggtttagagatgggggaagtattgtttatgtttttttataaggttttgagatgttatttatttttttaaaatttatattaggttttatgaattaagcggatttaggagttattttttgttttgattttcggattttagtgtgttgattatgggatttagttttaatttaagtttttgattcggtttggagtttgagttttttttgcggttataattagattttattagaagggttgttatgtgttagacgtttattcgtattttttaagaaatatttttatgatggttttacgaggttgttatgatagtatttttatttgtagaggggaaatcgagggtatgagaaaggaagttcgttgtttcgggttatatagttggttgttggggtaggagggatttgaatttatattattggggtgagaatagtggaggtacggttcgttggtggtattatatttttattttttaagtattgaagagtgcggtgtttttgtttttttggttaggatgtttaattggttgggttgtgttcggtatttttgagttttattattttttttggttattttttattagttttgagtttgggatttattttttggtttttcgttttttttttaggtttatttgagggttttgtttattttttaggtattagggttagaggggatggggaaggaaggagggaggttagtttgggtagtcgggggtgttcggagcgttgtttttgggtcgttggttttggggaattttttaatgttcggagagttgtttatttggtgagtaattgttgttggttgtttatatagaatgtttgattgtgaagggattttttattttatttttgtttatgttattgatatgttgtttttttttttgagagttttagggtttaggaaagagatagataggtagggggttggtttttattttcgtattttttttttaatttcggggttttgtagggggcggttggtgatttaagttttttagagttgagtttgttttttttttttttatatggggtttgggggtgaattagtttttgggggcggtaaggttaggttagttgttgtttttagattaggtttggggtgggggtggtgaggggttaggaagggggttttgggggagtgagtatattgttttgttagtttttttttataatttgtttgatttatttggggtatttttgaagttggaggttacgtgggtattttgttttaatttattattagtagaggtttgagaggttttgtttttgtttagtttttttcgtttagtattttggtatggatttaagtttttttatttgttaaatgaatttttgttttatagggaggttagtataatgggtgatgatatgtagataggtggtttgttgggtgtttagaattatgttgagttttgagtttttatagtagatttataaaggcggtattattatttttattttatagttgaagaaattgaggttaggaggtggtagttttttttttaaagttatttagtttataattggtagagttaaatttttaatttggttgtgaatgaggttagagtttattttttaaatttttaggtttttttattttttttttataagagagttggtattgatagtttttggaaattataaaatgtttttttaaaaaatatttaatttttatttatgttagagtatagttttgagttaggtgttgtttagagtataagtgagttttagattttatttaaatttttaaaggttgaggaataagatttatttttatttgaaatacgagtaggtaggatatggtcgatgtgagttggtcggggttatgggaggtaggggaggttttttggaggaaggcgattcgagtatttttgttatgtttttcgtttttttagagtaagaggtgttgtagggattgttgtggtttgtaagatagaagtttcggttttagatttggttttgttattaattttttatgtgagttttatatagttatttttatttttttgagttttaatttttttatttggaaaataagtagttgtgatattttaggagagatttgtggatggggggtaataattagtagaagacgagtagttgggtagttgtacgtgttagagggtgtattttttttttggagagtagtgatgggttggatggtatagttatttggagatagtatttttgggttttggtttagtaatttttgtttaatgttagggggttttatgtggtcgggattgtttcgtttattttgagatcggttaaatttttagtaggttttatttgtaggagtaggataggttgtggatgaagttatagttggaaggggttaagtcggggttgttattttagggtggggtttggggtcgtgattttgggagtcggtagttaagaagggagggtgttttttatgagggagtcggtcgggggcggggaatatatatatatagtatagagagggagggaagaaaataaatttttagagattaaagtgggtttggagcgtagtttgggcggttgatttttgggggtcgtagttacgttgtaggcggtatacggatttgcggtttcgagattttgtttagttttttttttagaggtttagagtaggtggtgtttggatatggataggagggggaggttgggtttggggcgtcgaggggtttagagtatttggggagtataaattaagttaggtatcgtgagaggaggggaaattgaggtattggaggggttagttagggttggggttaaggggttttagtgttagtgttttttagattttgtttttattttttgttttttgtggggtggggttgagattaaatagcgattgggggtggattatagggttgatgtggggtttggtttgttagaaggtatgtaagggtttgggggttcgtttggaaggatgtaggggagattgggtagaatggtagatgtaggggtagttgtagaatttttgagtttaatgagagatttaggtcgggcgacgggggtttgatgggtggaggttatagtgagtttttggttatatggatttggggtttatgttaggagagttaggttgagttaggtggtaggggtttgggtgatgtgggatgggattggggattggtttagagtttacgtgttttgagtggttaggtttttgtgtaggagatgttgggggaggtgtaagaagaagggttgagttggggtgttttgggatgtggggttatttgagttaggttagggtaggtgagttttttagtagtgtacgttgattttagagtaagtgtataggagtagtaagtgttaagtggggttttttatggttttttaaagaagagataaggtgtggggtgagaggtaggaaggaggaaggagagttagttcgggaagtgttagttgggatgggtagttttattattttatattcgaggttttgttgggagagaatggggggtaagagcgtagataaagtagggtgtgtgtgtggtggggaacggtagtaggtattagggttcgttttggtacgatgaaggaggaattcgtggttgggtaggtttgggatgtggtaagaggtaggaattgggggtatggaggatgggcgagggggcggtgggggttcgggcgaggttgtaagagttttttggttttggaaaattaatttatatattttgattttaggttagggttaggcggaagggttgggaaggggttataggggattaaattattttttggtattgggggttttttggtagttttagggacggtatggttttagacgcgtggttatgttgtttggtcggtattttcgtattttatagggtgtatttatttttatttttttgttgtattttttggaggtgtttttgtgtttattttgttcggttttttattgtttttttttgtttttttttatttataaatcgtttggttttagaagacgttagaatatgtgatattgttttagagtttttagaagtattttttggggatttttattattttttgaggttgggtttaaaggggtttttaaggtaggtttggaagggattagttattttttagtttttttaattattaattagtattcggaggaggaaattggggtacgatttcgttaagttttttttagttttgttttagaatggaaatgttggatcgtttttttagaagtatttttttagagtgtttcgatagaattgagttagttatttttatttttatgtttttttagttttttttttagttttataggtatagtggttagtagggcgagtgtattggtggtgtttggaggtttgattttttggggttttgggtaacgtgtttttttcggagttttttggggtttagtggtaatgtgtagattggaggaggttatttttggggtggtttttagcgtttatgtttagttttattttatgatcgtttaaagtttacgtcggtttcggtttttttttttggagttttttttttagttaagttttagtttttttttttttattgtttttttaaagttttttaattagggggtataggggttagtttttatttgttagtttagattcgttatttttttaaatttaggtgagttagggtcgtttggggcgtttattgttgggatttttgttgattcggttaggggtttttttttggcgatgtttatttttagataattttcgggataagttaggtaggaaaattatagggcgttttgtcgaaggttttattataattttattaattaaatttttagaagagggaaaaagtttgttttttttattttttttttttattcgttttttttttttatttttatttttttttatttataattttttatgatgtattttaaataattttttggattggggatttcggttaaatatagttgtttttgttttataatataggttttagtatataaattaggtaaattttttatttgagtatgaatttttgaaaattgtcggtatttgaggttttttttaaggttttttgaagtgtagtttataatgaaggttttggcggtaggtaaatatattcgtttcgcgtcggtttcgcgttttcgttgcggggcgcggcggtaatttggggcgtttggtagcgcgagtcggacgtttattcgtcgtagatatacgaatatttggggcgttcgcgtagttatcggaggcgttgggtggcggttcggagcgagcgcgggtatatggttttaagtatcgtacgtttcgcggtaggttggcggcgagggagggggcgtcgagtttttttttttttttttttttttttttttttttttttttttttttttttttcgtttcggatattcgttggttgtttttttttttgcgtttttttttagatttattttttttttttttttttttttttttttttttttttcgtttttttttttttaatcgcggtttcgggttgtttttagggaggggcgcgggcggcgagtagtttgtaaatttcggtttgggacgggagtaggtgtcgtttttatttgttggtgtttggaagcgtgtggtttgcgttaggtgagatataggggtgtggtttttttttcgtagttatttcggggttttagtattgttttgggatgttgggacgaataggggatttaggagaagtgaatttgaggaggtttttgttttcgttgttttagtatgggggattcgggggaggtttttagttttattcgttcgttgatttcggtttttattatttttaggtgtttttttgtagagttttggaaaagcgtttaagggggtttggggggagtcgggagaataggtttttttgggggaggggtaaattaggatatgtcgggatagtttttagtttttttgttattttttattttttttttttttcgtttattcgattgtttatgattttttgtttttttttttttttggtgtattattttttttttttttttgagtcggtgtgtgtgtgttaggagggaggggaatttttgggataagggatagcggatgagtcgggagaaggtatggagttaggggttgttcggagttgggggaatagagagttttgaatgatgatttggggatggagagtggggatagttaggtagaaatggggtgagtttgagtgagataggggatattagggaaggaagagatagaggatgatgggggcgggggtagaattgggggtaattggtttagggagttagaattaagtggtaggtttgggagggagatgagggttaatcgaggatttttttttatttttttatgtttcgtggtttttatgggtgtttggtttcggagatttgggttgtaatgggttagtgagtgggaagcgttgttgaggaatttgggttattacgggaggtgggaagagaggggtttttttttttttggtgtttgttgggtttggggtttggtgttttttagttagagggttagggggttttaggatttttgtttttttgagggaaagggtgggatggttgggagttttttttggattttgtattttttgggtggaaatggtttgtgttttgtttttatttttacgttattttagaagagagtagggagaattaaggtagagaaagggagatagagaaatatacgtagtgatagagtgaagattaggttttaggaagatagttgtaggtggtgagggggaattaggagtttttttttatgcggttattgttggatttttattcggtgtgttatgattttaggttatttttttttgtttttttatttatggtttttttttgattgtttttagg

SEQ ID NO: 1154 - DNA, 6827 bp, Artificial Sequence
  chemically treated genomic DNA (Homo sapiens)
tttggggatagttaggaagaagttatgagtagaaaggtaggaaagggtggtttggggttatggtatatcggatgggggtttaataatggtcgtatgggagaggatttttggtttttttttattatttgtagttgtttttttggggtttagtttttattttgttattgcgtgtgtttttttgtttttttttttttattttagttttttttgtttttttttgggatgacgtaaagatgagggtaagatataagttatttttatttaaagggtgtagggtttaggagagatttttagttattttatttttttttttaggaaggtaaaggttttaaggttttttggttttttggttggaaggtattaggttttaggtttagtaggtattaggagaaaggagatttttttttttttatttttcgtggtggtttaggttttttagtagcgttttttatttattggtttattgtagtttaaattttcgaagttaggtatttatgggggttacggggtatgggggagtggggaggagttttcggttgatttttattttttttttaaatttgttatttgattttggttttttgggttaattgtttttaattttgttttcgtttttattattttttattttttttttttttagtgttttttattttatttaagtttattttatttttgtttggttgtttttattttttatttttaaattattatttaaaattttttgtttttttagtttcggatagtttttgattttatgttttttttcgatttattcgttgttttttgttttaggggttttttttttttttaatatatatatatcggtttagggagggagaggaaatggtgtattaggagagagaaaaggtaaaaggttataggtagtcgggtgggcggggaggaaggaaagtgaaaggtgataggagagttgggagttgtttcgatatgttttggtttgttttttttttaggggggtttgttttttcgattttttttaggtttttttagacgtttttttagggttttgtagaagggtatttgaagatggtgggggtcggggttagcgggcgagtgaggttggagatttttttcggattttttatgttggaatagcggggataggggtttttttaagtttattttttttgggttttttgttcgttttagtattttaaggtagtgttgaggtttcggggtggttgcgggaggggggttatatttttatattttatttagcgtagattatacgtttttagatattagtagatggaggcggtatttgttttcgttttaggtcggagtttgtaagttgttcgtcgttcgcgtttttttttgggagtagttcgggatcgcggttggaaaggagaaagcggaaagaaagaaagaaaagaaaaagagagagggagagtgaatttgggagaaagcgtagagggaagagtagttagcgagtgttcggagcgaggaggaggaggaggagaaggagagggggaagaagaggaggaggaggaaggttcggcgttttttttttcgtcgttaatttgtcgcggggcgtgcggtgtttgggattatgtgttcgcgttcgtttcgggtcgttatttagcgttttcggtggttgcgcgggcgttttaagtgttcgtgtgtttgcggcgggtgggcgttcggttcgcgttgttaagcgttttaagttgtcgtcgcgtttcgtagcggggacgcgaagtcggcgcggggcgggtgtatttatttgtcgttaagatttttattatgggttgtattttagagggttttggaggaaattttagatgtcggtagtttttagaggtttatgtttaaatggggaatttgtttgatttatatattggagtttgtgttgtaagatagaaatagttatatttagtcgggatttttagtttaggaagttgtttgaggtgtattataggaaattatgaatggaagaaagtgagagtgaaggggggggacgagtgaggggggagggtggggagaatagatttttttttttttttaagaatttgattgataaaattataatgaagttttcgataaaacgttttgtggtttttttgtttggtttgtttcgggagttgtttgaagatgggtatcgttaggagggggtttttggtcgagttagtaggggttttagtagtgggcgttttagacggttttgatttatttgggtttggggaggtagcgagtttggattagtagatggagattggtttttgtgttttttggttggggggttttaggggggtagtgggaggaggagggttagggtttggttgagaaggaggttttaggaggaggggtcggggtcggcgtggattttagacggttataaagtggaattgaatatgggcgttggaagttattttagaggtagttttttttaatttgtatattgttattgggttttaaggggtttcgaggggaatacgttgtttagggttttagagggttaggtttttagatattattagtgtattcgttttgttgattattgtatttgtgaggttggggaaggggttaggaagatatgggggtaggggtgattgatttagttttgtcgggatattttgggaaggtgtttttgggaaggcggtttagtatttttattttgaagtaggattgagagaggtttggcgaaatcgtattttagttttttttttcgggtgttgattgatggttggggaaattgagaagtggttggttttttttagatttgttttggaagtttttttgagtttagttttagagaatgatggaggtttttaaaaagtgtttttagaggttttaaggtagtgttatatgttttggcgttttttgaggttaggcgatttgtgaatgaggaagggtagaaaggagtagtggggagtcgggtaaaatgagtatagggatatttttaagaaatgtaatagaaaagtgaaaataaatatattttatgagatgcgggaatgtcggttagatagtatggttacgcgtttggggttatgtcgtttttaaagttgttaggggatttttagtattaggagatgatttagttttttgtggtttttttttagttttttcgtttgattttgatttgagattaaggtgtgtgagttggttttttaaggttagggagtttttgtagtttcgttcgggtttttatcgttttttcgtttattttttatgtttttagtttttgttttttgttatattttagatttgtttagttacgggttttttttttatcgtgttaggacgagttttggtgtttgttgtcgttttttattatatatatattttgttttatttacgtttttgttttttatttttttttagtagggtttcggatgtgaggtgataaaattgtttattttagttggtatttttcgaattggttttttttttttttttttgttttttattttatattttgttttttttttgagggattatggagggttttatttggtatttattgtttttatatatttgttttggggttagcgtatattattaggagatttatttgttttggtttggtttaggtaattttatattttaggatattttagtttaatttttttttttatattttttttagtattttttgtataaggatttgattatttagagtacgtgagttttggattagtttttagttttattttatattatttagatttttgttatttgatttagtttggtttttttgatatggattttaaatttatgtgattaggggtttattgtggtttttatttattaaattttcgtcgttcggtttgagttttttattaggtttaagagttttgtagttgtttttatatttattattttgtttagttttttttgtatttttttaagcggatttttaggtttttgtatgttttttggtaagttagattttatattagttttataatttatttttaatcgttgtttaattttagttttattttataggaaataggaagtgaggatagggtttagaagatattgatattaaggttttttaattttagttttgattggtttttttagtgttttagttttttttttttttacggtatttgatttggtttgtgttttttaagtgttttgggtttttcggcgttttaggtttagttttttttttttgtttatgtttaggtattatttgttttgggtttttggagggaaggttgggtagggtttcggagtcgtaagttcgtgtgtcgtttgtaacgtggttgcggtttttaggaattagtcgtttaggttacgttttaggtttattttggtttttgggagtttgtttttttttttttttttttatgttgtgtgtgtgtgtttttcgttttcggtcggtttttttatggaaggtattttttttttttggttgtcggtttttagggttacgattttaggttttattttggagtggtagtttcggtttggttttttttagttgtgattttatttatagtttgttttgtttttgtagatggggtttgttggggatttgatcggttttagggtgagcgggatagtttcggttatatgggattttttgatattgagtagaggttattaggttagaatttaggagtgttgtttttaggtggttgtgttatttaatttattattgttttttaggaagggagtgtattttttagtacgtgtagttatttagttgttcgttttttgttgattgttattttttatttataagttttttttgggatattatagttgtttattttttagatggggaaattgaggtttagagaggtgaagataattatgtggggtttatataaagagttaataatagagttaggtttggaatcggggtttttgttttgtaggttataataatttttgtagtattttttgttttgagagggcgaagggtatggtaggagtgttcgggtcgtttttttttaggaagttttttttgttttttatggtttcgattagtttatatcggttatgttttgtttgttcgtgttttaagtggggatgagttttattttttaatttttgagagtttgaatggggtttgagatttatttgtgttttagatagtatttggtttagggttatattttgatatgaatagaggttaagtattttttgagaaagtattttatagtttttaaaaattgttagtgttaatttttttgtggaaaggagatggagaggtttgaaggtttgaagaatggattttggttttatttataattaggttggaggtttggttttgttagttatgagttgagtgattttggggaagggattattattttttggttttagtttttttaattataaaatgggaataatggtatcgtttttgtgggtttgttgtgagggtttagggtttagtatggttttgggtatttagtaagttatttgtttgtatattattatttattgtgttgatttttttgtgaagtaggggtttatttgatagatggggaaatttgggtttatgttagggtgttgagcggggaaggttgggtaggagtaagattttttaagtttttgttgatggtaaattgaggtaagatatttacgtagtttttagttttaagggtgttttagataaattagataggttgtgggagggggttggtagggtagtgtgtttatttttttagagttttttttttggttttttattatttttattttaagtttgatttgaggatagtagttgatttggttttatcgtttttagaagttgatttatttttaggttttatgtgagaaggaaggagataaatttagttttgaggggtttgaattattagtcgttttttgtaaagtttcggggttgggggggggatgcgggggtgggggttagttttttgtttgtttgttttttttttggattttggggtttttaggagagagggtagtatgttagtggtatgggtaggggtgagatgggaggtttttttatagttaggtattttgtgtgggtagttagtagtagttatttattaggtaagtagtttttcgggtattggggaattttttaagattagcgatttagaaatagcgtttcgggtattttcggttgtttaggttggtttttttttttttttttttattttttttggttttggtatttggaaaatgagtagagtttttaggtgggtttaggaaggaagcggggggttagagggtgggttttaggtttagggttggtgaggagtggttagaggagatggtgaagtttaggaatgtcgggtatagtttagttaattgggtattttggttaaaaaggtaagagtatcgtattttttaatgtttgaggagtgagagtgtgatgttattagcggatcgtgtttttattgtttttattttagtggtgtgggtttaaattttttttgttttaataattagttatgtggttcgggataacgggtttttttttttatattttcggttttttttttgtaaatgaggatgttgttataatagtttcgtggggttattatggggatgttttttgggaaatgcggataaacgtttaatatatggtagtttttttaataagatttggttgtggtcgtagaaggagtttaaattttagatcgagttaggggtttgggttagggttgggttttatggttagtatattggagttcgagagttagggtaggaggtggtttttgggttcgtttagtttatggagtttggtgtgggttttgggagagtgggtagtattttagaattttgtggggggatataagtagtattttttttatttttgggttttggagagtttagttgttttttgggggtttttgaggtttagacgttggatttat

SEQ ID NO: 1155 - DNA, 6134 bp, Artificial Sequence
  chemically treated genomic DNA (Homo sapiens)
aaaggaagtaaagataaaaggaaagttgtggtgataaagagttaaattttgtagagtatttgaagagatttattttgagttaaatatgagtgattaatggtttaagatatagtttttagaagattttgagaatatgtgtttaaggtgtttggggtatagtttggttttatatattttagggaagtatgaaatattaattaaatatatgtaagatgtatattggtttagtttggaaaggtgggataattggaagtagggggtttttaggttataggtagattagaagattttttgattggtaattggttgaaagagttaagttattgtttaaagatttaggaatgtttgggttaagataagggattgtggagattaaggttttattatatagatgaagtttttaggtagtaagttttagagagaatagattgtaaaaatgttttttattagatttaaagagtttgttttattagtatttttaaaagggaggaaggtataatgaggtatgtttgattttttttttttattatggtttgaattagttttttaggttaattttggaatgtttttattgagaggatgaggttatttatatggttagaaggtttagaattttatttttggtttatagttatttttagaagtttaatgatggagggaaaaggtttaattaatttgttaattaaatttttaagtatttttaaaattttttaaagtatttaaagttgtttttaatattaaggagtttgtaaattaattgagaagataagttatagattaaaaaagtaattgaaaatgtaagatagtgggagattatttggtattttttatatttagtcgtgtttttattttatatttttatttttttttaattttatttatttttatagttttaaagattatttgtaatataggttttatgtattaatgatgatttttgaattgtgttttgggttttgattttttcgttgatttttaggtttttaaggtttatgttttaaattgtattattgaggatttttattttaattattattatattttgtggattttgtaattgagttagtgatttttttagtaatggtgttagaaagtttagtttggggttattttattgaaaatgtatattttagttttaggattttaaggtaatgggttttaaattgttttttggagagttaggtgttgtttttggtttattttatagatgttagaatgggaaatatttgtatttataaaatttttatttttgatttattttttgtttttattttttgttttttttgtgatttatttttaagttatgttttttttattggtaatagtttttgggggaagtttgtttatttttttttttggttataggtttagataaggtttaggatttagaagagggtatagaagaaggttatatttattttttaattgagaaatttatgtatttttttataagataaggataattatagttattttaaaggaggttaagtggatgaaaggagataatgagtgtaaattattttatggttttaattaatatttattgaggttttagtatgtattaggtattgtgttaggtatagaagtttgtttaagagttttttacggataaggaagtaaattattatagtaaagtgggaataatgttataataggagtaagatatattttatgttaggggaagtgtagaaaaggggtaagtagtttagtgttgaggaagttagggtagatttcgtggaggagttgagaaggagtagtagttagttatttgaggggtgttaggggaaggggtaggagcgggtgatgtaggtttgtagagaaaaagtttagtgggttgggaatagttattagtgatttattatggttgatattaggaatgttaggtagaatgtggtaggagttagattgaaagtgtgttttttgggaggtcgaggtaggcggattatttaaggttaggagtttaagattagtttgattaatatggtgaaacgttatttttataaaaatataaaaattagttaggtatggtggtgtatgtttgtaattttagttattttggaggttgaggtgggagaaatgttttaattcgggagggggaggttgtagagtatcgagattgtattattgtattttagtttgggcgatatagcgagattttttttaaaaaaaaaaaaaaaaaaaaagaggtgttttaaaatataaggatatttttattttattttgaaggtaataagaaattagttatagttatggagttattgttatagatttgttttttagaaagattttattatgtgaattttggatgtagttggggaaagtgggtgaatttttagagtttaattagtgttttttaattttttttttttttattattattttttaaggagtttttttagatattatttttttaagtattttattaatttttatgaaatttgaatattttagaaatgttgtttatgtttttatgtattgtatgtgttttatgtataaaataaataatttttttgttttatgtatttttatttaataattaatttttattttttgaggattgttaatgtgaagtttttttagattaagtttatgaaatatttgttttttttttttttattattgttacgtttcgtttttagttggttatttattagtattttagttggatttttttttcgttattttagtataggggtttttaatttttgtatttggggttggatattttttagttgtgtaaggttgttttgtgtattgtaggatattgagtagtatttttggtttttgtttttggatgttagtagtattattttatttagttgtgataattaaaaatgtttttagatattgttagtattttttaattgaggtttattattttggtgttttagtttttagtttgtttatttttataagtaatatgtgtaattatagtgattaattttttttttttagagagatggtatttttgggttagagggatgttaggaaggaaaagtttttgtttttttggtatttttttattttacgagttatttttgtgttttttttttatgtaatattgaattttttagtttaggtttttaggttttaagtttataattttattataattaattttgtttacggttatttttttggtagaataattttgtttggattaaggttttttttttattatttaatgtttttgttgttttattgtttttggggattgtggtttggttgagtataagtttttattgatagggtttattttgtttatagggagtttgtagaagggttttattaaatatttttatttttttttttaataaatggttttttttgatttgtgtaaggtataattttgtttattagaagttgggttttttttagttgatgatggggatattttgttttagaaaggttttttaaaataatattttttgaattttagaatatttttaggtttttttattttggaagtatttttttttttttttgtatgttattttttatggtaagtaaagaaaggagttgattttgtattttgaagtttaaggtaatataaagttgaataggttatcgttaaaaatgaggaaaggatagtgttgataataatataaatatttggaattagaataatatataagattagggttgattaggtgtgatcgttttttatattgttaatttaaaattggaagttatttaataaggtgaaaaagaggttatgggtgttagttatttatatgataggatggtagaagttagttgaattatgtggatgaatggtaagggcgattttatattgttcgagttaggtaaagagttttatttatagtaatggtttttaaagtgtggtttttagtttagtagtatgatttggaaatgttttagaaatgtaattttttaagttttattttagatagtgaattggaaattttggaggtggggtttaggtatttgtaagtttataagttttttaagtgatgtgatttttatgtttgttaaagtttgagaatttttgatttgttttaataatttttaaatttcggtgtatataagaattatataagaagttaaaatgtagatttttagattttatatttaacgatgtagatttatttggtttagagtggatttaggaaagtttgtattgttaataagtagtttagggtgatttgggtgtaattggtttatgaattaagtttcgaggagtattggtttatatataaaggagtggtataaattgtttatattgttttagttttattttaaagaggtttttttcgtggttaagaatgagttagtattataatttattttttttttttagttattttatgaagtaggttgttaagattatttattgtgggtcgggcgcggtggtttacgtttgttattttagtattttgggaggtcgaggtaggtggattacgaggttaggagatcgagattattttggttaatacggtgaaatttcgtttttattgaaaaaatgtaaaaaaattagtcgggcgcggtggcgggcgttttgtagttttagttattcgggaggttgaggtaggagaatggtaggaattcgggaggcggagtttgtagtgagtcgagatcgagtcgttgtattttagtttgggagatagagcgagattttgttttaaaaaaaaaaaaaaaaaaaaaaagatttattgtggtttttaggattattttaatattagaaggttagattggttttatggattttttttatattgatatttgaaatatattgttgatttttaatttgggttggatttatgttgttggtttggaggtaaaagttttttattttattattagttttttgaattataatttaagatataatttggtttttttaagagttttgttttgtattgttgatgtattttagttattgttgtgatgtattttttttttttttttttttttagtttttgggtaatgttatatatgtatatatagttttttagtgtgaatttatttaaattttaatttttttttttagaacgtgtttttgttgtaaggtatcgggttttttcgttttgtagaattgtatttgtaagattattattaatttttaattttagtttagaaagggagtttttgcgatttatttatcgttttttaggtatagtattgttggggtttgttttttttttttttggttttgtgttttatgtttttttagatttgttttttttttagatttttttttattttgttttaatattagttgtgagggttttttagggttttgattttatttttttgttttataaaagtgtattttttgtgtggttttttgtgatttgtatttatttagattttttttagttaatttttggtattttatagagatggttttttttagtttttagtttttgtaacgatattagtttttgtttagagatttagagtagaaatggttattgtatatagttgtatagtttttgtatcgtatagatatttgaggaagagagtaagtggttaggaaaatttagtttgtatattgtttattaagatgaatgtttgaagttgttttgtggaaatttagaggaaggtatattgtttcgttttttttttatgttagatattgatagaattatatataattatattagattattagttaaaattagattagtgtgttttattgttatgttattgtgtatgtgaatatgaagatttttagagtgtttgaaaatattttatgagaaatagttaaatagtttttttttttattttttattattagattttattttttagagtagttttaggtttataaaaagttagagtataaagtatagagagttttatatatttttgtttattttgtttattttatttttagttttttttgttagtaatattttatgttagtgtggtatatttgttgtaattgatgaattaatattaatagattagtatgaattaaagtttatggtatatattattatgtatattatgtatatttttcgtgttgtgtattttatgggttttgataaacgtgtgatgatatatatgtatcgttatagtattttataatagttttattgttattgttaaaattttgttgtgttttatttgtttatttttttttttttttttgttttttttaggttttg

SEQ ID NO: 1156 - DNA, 6134 bp, Artificial Sequence
  chemically treated genomic DNA (Homo sapiens)
tagggtttggagaaggtagggaagaaaagaaggatgaatagatggagtatagtagagttttagtaatagtaatgaagttattgtaagatattataacggtgtatatatgttattatacgtttgttaaaatttatagaatgtataatacgaagagtatatatagtatatatagtaatgtatattatgaattttggtttatattaatttattaatattgatttattaattgtaataaatgtattatattaatataagatgttattaataggggagattgggagtggggtggatagggtgggtaggggtatatgaagttttttgtattttgtgttttggttttttataaatttaaaattgttttaagaaataaggtttagtaatgaaaaataaaaagggaagttatttaattattttttataaaatatttttaggtattttaaaagtttttatgtttatatatataatgatatgataataaaatatattaatttggttttagttgataatttaatgtagttatatgtgattttattaatatttgatatggaaaaaaagcgaaataatgtatttttttttaggtttttatagagtagttttaggtatttattttggtgagtagtgtgtaagttggatttttttaattatttgtttttttttttaggtgtttgtgcggtgtagaaattgtataattgtatatagtgattatttttattttgggtttttaaataagggttggtatcgttatagagattgaagattgaggaagattatttttgtaggatgttaaggattgattggagaaagtttgggtaagtataggttataggaaattatataagaaatatatttttgtaggataaagaggtaaggttagagttttgagagatttttataattggtattaaagtagagtgaaaagaaatttaaaggggggataggtttaaggggatatgggatataaagttaggaaggaaggaagtaaattttagtagtgttgtatttggagggcgatgaatgagtcgtagaggttttttttttgagttgggattaggagttgataatggttttgtaagtgtagttttgtagagcgaaagggttcggtgttttgtagtagagatacgttttgggagagagggttaggatttgagtaagtttatattaggaggttatatatatatgtgtggtattgtttagggattggagggaaagaggagaaggaaatgtattataataatgattggaatgtattagtagtgtaaaataaaatttttgggaaaattaaattgtgttttggattgtggtttaaggaattagtaatgggataaaaagtttttgtttttaggttagtagtatgagtttaatttaggttaggagttagtagtgtgttttagatgttagtgtgaaaggaatttatggggttaatttaattttttagtattagagtaattttgaaaattataataggtttttttttttttttttttttttttgaaatagagtttcgttttgttttttaagttggagtgtagcggttcgatttcggtttattgtaagtttcgtttttcgggtttttgttatttttttgttttagtttttcgagtagttgggattataaggcgttcgttatcgcgttcggttaatttttttgtatttttttagtagagacggggttttatcgtgttagttaggatggtttcgattttttgatttcgtgatttatttgtttcggttttttaaagtgttgggatgataggcgtgagttatcgcgttcggtttataataggtaattttagtagtttgttttatgagatgattgggaagggaagatgaattgtgatattggtttatttttagttacggagggagtttttttagaataagattggagtaatatggataatttgtattatttttttatatataggttaatgtttttcgaagtttgatttatggattagttgtatttaaattattttgggttgtttattagtaatgtaaatttttttgggtttattttagattaagtgaatttgtatcgttaggtatgggatttgggaatttgtattttagttttttatgtgatttttgtgtatatcgaagtttgaagattattggggtagattagaggtttttaaattttagtaagtatgagaattatattatttaaagggtttgtgagtttataggtgtttgggttttatttttagagtttttaatttattatttgggatggggtttgagaagttatatttttaaaatatttttaggttatgttgttggattagagattatattttgagaattattgttgtaaatagagttttttatttggttcggatagtgtaaaatcgtttttattatttatttatataatttagttagtttttattattttgttatatagatgattaatatttatgattttttttttattttgttagataatttttagttttaaattgataatatgaaaaacgattatatttggttaattttaattttgtatattgttttggttttaaatgtttatattattattaatattgttttttttttatttttggcggtgatttgtttaattttgtgttattttgggttttaaaatgtaaaattagtttttttttttgtttgttataagaaatggtatgtaagaaaaaaaaaaaatgtttttaaaatagaggaatttgaaaatattttgaaatttagaaggtgttattttggggagtttttttgggataggatgtttttattattagttagaggaagtttagtttttgataaataaagttgtgttttgtatagattaaagggagttatttattgaaggaagggatggaagtatttgatgaggtttttttgtagattttttgtaaataggataaattttattaatgaaagtttatatttagttaggttatagtttttaggaataatggagtaataagaatattgggtggtgaggaaagagttttggtttagataagattgttttgttaagagaatggtcgtaaataggattagttgtaatgagattatgaatttaggatttggaggtttgagttggagagtttagtgttatataaagaaaagatatagaagtagttcgtggggtgagaggatgttaaaaggataaggattttttttttttagtatttttttagtttaggggtgttatttttttggggaggaaaaattagttattgtaattgtatatattgtttgtgggagtagataaattagggattaaagtattaaagtagtgggttttaattaggggatgttggtaatgtttgaagatatttttggttgttataattgggtgaggtagtgttattagtatttaaaggtagaggttagggatgttgtttagtattttataatgtataggatagttttgtataattaagaaatatttagttttaaatgtagaggttgagaatttttgtgttggagtgacggagagggaatttagttaggatgttggtagatgattagttggagacggagcgtggtagtggtggggagggaaggggtaagtattttatgggtttagtttagagggattttatattagtagtttttagaaggtgaaagttggttgttgagtgggggtgtatggagtaagaaagttatttattttatgtataaagtatatatagtgtataaggatatagatagtatttttggggtatttaagttttatggggattggtggggtgtttgggaaaataatgtttaaaaaggttttttaggaggtgataataagaaaaaaaaaggttgagaaatattgattagattttagaaatttatttattttttttagttgtatttaggatttatatggtgggatttttttaagaaataaatttatggtagtgattttatggttatgattggttttttattgtttttaggataaaatagaaatatttttgtattttaaggtatttttttttttttttttttttttttagagggagtttcgttgtgtcgtttaggttggagtataatggtgtaatttcggtgttttgtaatttttttttttcgagttgaagtattttttttattttagtttttaaagtagttggaattataggtatgtattattatgtttggttaatttttgtatttttgtagagatgacgttttattatgttggttaggttggttttaaatttttgattttaggtgattcgtttgtttcggttttttaaaaggtatatttttaatttggtttttgttatattttatttaatatttttagtgttagttatagtgaattattgatagttgtttttaatttattgagttttttttttgtaggtttgtattattcgtttttgtttttttttttgatattttttaagtggttaattgttatttttttttagtttttttacgaggtttgttttaatttttttaatattgggttgtttattttttttttgtattttttttagtataggatgtattttatttttattgtagtattgtttttattttgttataataatttatttttttgttcgtaaggaatttttaggtaggtttttatgtttagtataatgtttggtgtatattgaaattttaataaatattggttaaaattataagataatttgtatttattatttttttttatttatttaattttttttgagatagttatgattatttttattttgtagaaaagtgtatggattttttagttgaggaatgggtataatttttttttatgtttttttttgggttttaaattttatttagatttatggttagaaaagagaatgagtaggttttttttaggagttgttattagtagaaagagtataatttagaaatgagttatagaaaaaataaagagtaaagatagaaagtgagttagggataagggttttataaatataagtgttttttattttgatatttataggataaattaaaggtagtatttagttttttaggaaatagtttgaaatttattgttttaaagttttagagttaagatatgtatttttaatagagtgattttaaattggattttttggtattattattgaaagggttattggtttagttatagaatttatagggtatgataatagttgagatggaagtttttagtggtgtagtttgaagtatagattttgagaatttggagattagcgggaaggttaggatttaaggtatagtttaggagttattattagtatatagggtttatgttataggtggtttttgaagttgtgagagtgaatgaaattagagagggataaaagtgtggagtggaaatacggttgagtatggaaagtgttaaataattttttattgttttgtatttttagttatttttttaatttatagtttatttttttaattagtttatagattttttggtgttggggatagttttaggtattttaaaaaattttaaagatgtttaagaatttaattaataaattaattaaattttttttttttattattaaatttttggaaatagttgtaaattaaaaataaaattttaaattttttgattatgtgaatggttttatttttttagtaagggtattttaaagttaatttgaaaaattagtttaggttatgatgggaagggagggttagatatgttttattgtattttttttttttttagaaatattgatagaatagattttttaagtttgataagaaatatttttataatttattttttttgaagtttgttatttgggggttttatttgtatgataaaattttggtttttataattttttattttaatttagatatttttaagtttttagataataatttaatttttttaattaattgttaattagaaaattttttaatttatttatgatttggaaattttttgtttttagttgttttatttttttagattgaattagtgtatattttatatgtgtttgattgatgttttatgtttttttaaaatgtatgaaattaagttgtattttaagtattttggatatatatttttaggattttttgagggttgtattttgggttattggttatttatatttggtttagaataaatttttttaaatattttatagagtttgattttttgttattatagttttttttttgtttttatttttttt

SEQ ID NO: 1157 - DNA, 6067 bp, Artificial Sequence
  chemically treated genomic DNA (Homo sapiens)
agagattattttattatttatttagttttaggagtgtatttagggttttgttttcgttttttttatagttttgttttttttgttttttggttgtttttgatatttgtagagtatttgggatagtatttgtatatagtaaatttagtgtgtttgttagtttatatattatatatatataaatatattaataaaattttttaaggttttgtttattggttattttttttaggaagttttttagaattatttagtaagtttttaggtggagttgattattttttttgtattttttttttattttttttttaattttatttttattattatgggttattatttataatttttttttgttttttggtttttgtttattttattaagttttgaattgtttaagagtcgagattagttttggattttaaacgtttagtgaagggtatgtatatagtaggtgtttaataagtatttgttatattggaattgggttttgttaataggttttagattaggtttgagtttttttgagttttttgtaagttttaacgttttaggtttttgggtgatgtgtgtgtttgatgttgttttatttttagattttcgagtttttgtttttagaataagtagtgagaaagaagttgtaagaatgtattttataatatatgtttaaataattatcggtgaaagagttgttaagagtgtgtttattttgtgttggatgtttttttgaataatttatttatgagatagatattattatgttttttattttttatatgaggaaattgaggttatagaaaggtgaagttatttatttaatagtatttattaagtattagtagcgtaatggtttagagtttatgttttcgaattttgtaatagttattatttaattagttattttatgttttaggtattagggttatgtgttttttttatgtatgattttatagtatttttataatggttttatgaggcgggtatcgtgataattttattttaaaggatgagaaaattgaggtttggagatgtgaagtttattgtttaaagttatttatttaggaagtcgtggagtatgttttaggtagtttaaaggtagagtttgtgtttttaagtattttgtttttgtttatagttttttaattaagggttttaaatttatatatttattgggattaggtaggtaaaataagtaaaagatagtgttagggatgaggtagtagagagtggtagggtttggggtaaatttgggtagtaaagttttatttaagaggggtggtcgtttgttaatggaaatatgggtttatttttttcggtgttttagtggaagttggaaatttaattgtgtggggaataatttttgtttaaaattggggttagattaggtatcgtggtttatatttgtaattttagtattttgggaggttaaggtaggtagattatttgaggtcgggagtttaagattagtttggttaatatggtgaaattttaaaaatataaaaattagttgggtatggtggcgtatgtttgtaattttagttattggggaggttaaggtaggagaattgtttgagtttaggaggttgaggttgtagtgagtggagattgtgttattgtattttagtgtggatggtagagtaagatttcgttttaaataaaataaaataaaataaagtaaaataaaattggggttaatttggttgggtgtggtggtttatgtttgtaattttagtattttgggaggtcgaggtgggtagattattttagtttttttgaggttaggagttcgagattagtttggttaatatggtgatattttatttttattataaatataaaaattaggtgggtatagtggtatatatttgtagttttagttatttgggaggttgaggtgggggaattttttgaatttaggagttggaggttgtagggagttaagatcgtattattgttttttagtttgggtaatagagtaagattttgttttaaaaaaataaagattaaataaaatataattggggtttattaaaatatttttggttatttgggtgtgattttggtttttttggattttttatttgtttttttttgtatagttgtagggaattatttgtgagtttgtttttttaacgttaatttttttgtttagttagaaagtattagaagggtagggatttttgttttttgtttaattttatcgttttaattagaatatttttagtttatagtatgggatttggttttttatttattgaatagatggatttttttttttattttgcggtttttttgtagtttagttttttagtttttgttttttagtttttgttacgtgtataaaatttggtttttttgtttttttggttgtttttggtgtttttgtttttatgtttttatgtttttggaatttttcgtgattattttttttttttggggtgtgtgtgttttacgttttgtttttcgaagtttttattatattttgtaagttaggtcgggtatagtggttcgcggttgtaattttagtattttgggaggtaagacgggtagattatttgaggttatgagtttgagattagtttggttaatatggtgaaattttatttttataaaaatttaaaaattggttaggcgtggtggcgcgtgtttgtaattttagttatttaggaggttgaggtaggagaaataacgtttgaattcgggaggtggaggttgtagtgagtcgagattgtgttattgtattttagtttgagtgatagagtaagattttgttttaaaaaaataatataaagtaaaataaaataaaaataaaaataaaaaattatataaaaattagtcgggtatgatggtaggtgtttgtagttttagttattcgggaggttgaggcgggagaattatttgaatttaggaggtggaggttgtagatggtattattgtatttaagtttgggcgatagagcgagattttatttcgaaaaaaaaaaaaaagtttgtaagtcgggtttatattattttttgtttcgtgagtatttttgtttttttagttttttttttttttttagtatatgtttttttttgattttcgtttttttgtaaggtgtatttggttgttttagttggtttttttttttttgtatttttgggtggggtgttttttgttcgttttttatttatatttattttcggtgttttttttttttttagtaggatagcggtttaggtttacgtattttacggcgggtcggttgggcgtacgtacgtttttgtatataagtcgtacgtagttgtatttgagtacgtcgatgagcgtgtagagcgggggcgtattggtttagcggtagcgcgttaggtgtatggagtttttgacgaagaagagcgttagtcgttgttggtattacgcgtcgaagaagcggttgaattcggtttacgagaagaaggttcgttttcgtagtttttgttttttttgtttcgtagtcgtgtcgggtgggggtttcggtcgttttattttgggggtttgcgtggaggaggggagaataggtggatattagatttatttttattcggggtattttatttattttatttttggtttgtttcgtcggttgttggtgtttttatcgaggtgggtagttcggggtcggacgtgtttgtttttttttaaatatataaatattaatttttattttatttttggtttttttttatcgttttatttttggtttatttggagtttgttattttgatttttaattttaattcgttttttttttcgtagatgtgatttttaggtatagttggaatttttttttttaaaatacgatttttaagtttagatgttttttaaggatatttttttaaatgtgtttttaaattttagttaaaattttttttttttttagttgtgttttttatttaagagtaatttttaattttcgtatttatttggaatttttttttttatgtgttaatagttggttgtaatttttttaaagacgttttatttttagatgtgtttttatatttaggttacggattttttattcggttatatgttttatgtatttgtggtttcgtattttttagatgtgtttttggcgtgtagttgttgttttttttttcgattatgattttatggttcgttatatgtagttgtagttggggtttttttgagatatttttatttttagatgtattttttatatgtagttatttacgtttcgtttataggtgtgtgttttatttgtggttagtttttttcggaagtgttattagtatttatttgtggtttttttttttttagatgcggtttttagtttagttgtgggtttttttttttagttatatttattatttttcgtaatatgtattttcgttttagatatggtttttcgttttcggatgggtttttttattttagatgttttttttacgtttagttgcgcgttttttttcgagtagttttatttagttcgttttcgacgtttttatttttttttttttcgttcgttgcggtattttttagtttcgtcgttttatttagttgtgttttttttttttttaagatgtgtatttttttcgtttttttttatttatttattcgtttcggagcggcgtttattttttataatgtttcgcgtttaggtttggttcggtttttgttttcgggatgtttcgcgcggtttttcgttttttttttcgtcgtgtttcgcgggggcgtttttatcgattttttttttttttttgttagttattttttagatttttagttatattcgtttatttagggcgagggaaagcgcgggtatttttttagtgtgttttgcgggagggttcgttttattttattttttttttcgttttttttttattcgggagattacgatttttagtgtttttcgcgcgacggcggcggtgcggacggtgtttaggtttcgtttttaggttttgtttcgttttcgttcgtagacgtttgcgcgcgaatgtcgtggcgcgaatttgggattgtagaggcgcgtttggcggatttgagtgtgttgttcgggtagcggcgcgcgggattaacgtaaggtaagtggggtcgttcgtaagtagatgggaggcggagggcggcgggtgcgtcgaatgtttggggtttatgtttcgttatgtcggggtgtttgtagaggagtgggcgtggggacgttgaggttgtcgagagcgcggtggagacggaagagcgcgggttgcgggtcgtcggagagtgtagagaggtgttttttagagggaggggggttaggtagagggtagacgagagatagagatagttggataggttttttgagaagaggttttgaggtgcgagtttatttggaagggggagaggttaaatggaattgaggggcggggcggggggggggaaaattgtgtgggcggggttagttggaaatcggaaggtttttcgagggggcggggttatttgggagggggaggggttgaagggagttaaggggcggggtcggggaaaagattgcgtgtgggcggggttatttggaagggggaggtgttaagggtggggttggttgggaatcggaagtgttgagggggcggcggttatttggaagtgttgagggggcggggttagaagaaggtaaatcgcgggtagtagtattatttggaaggagtgggttttattggagggagatgggtggtgttagggagaggttagtggtagggtttaggtttaggtaaagggttcgtaaaagatggagaattatttgaatggggagacgtttggtttaatgtatgtttgataaagggatggagttttttttttgtttttattttttattttgaaataattatagatttaaggaagttgtgaaaagagtatatttatttttttttaatggtgatattttatgtagttttaatatcgaaattaggaaattgatattaatatagttttgttaattagattatagattttgtttagtttttattagtttgtgtggtgtgagtgtgattgtgtatttgtgtgttcgtgtagtttgattttttgtatagatttgtgtaatttttatcgtaattgtgat

SEQ ID NO: 1158 - DNA, 6067 bp, Artificial Sequence
  chemically treated genomic DNA (Homo sapiens)
attataattacgatgggggttatataaatttatataaggaattaagttgtacgggtatatagatgtataattatatttatattatataaattggtgaaaattgaataaggtttgtaatttagttaatagaattgtattgatgttaattttttggtttcgatattgggattatataagatgttattattaggggaagatggatatattttttttataatttttttgaatttataattattttaaaataaaaagtaaaaataagaggggagttttatttttttattaagtatatattaagttagacgtttttttatttagatgattttttattttttacgagttttttatttagatttggattttattattgatttttttttgatattatttatttttttttagtagggtttattttttttaggtgatgttgttgttcgcgatttatttttttttagtttcgtttttttagtatttttaggtggtcgtcgtttttttagtattttcggtttttagttagttttatttttggtattttttttttttaggtggtttcgtttatacgtaatttttttttcggtttcgttttttagttttttttagttttttttttttttagatagtttcgttttttcggggggtttttcgatttttagttggtttcgtttatatagtttttttttttttcgtttcgttttttagttttatttggttttttttttttttaggtgaattcgtattttaaggtttttttttagaggatttgtttaattgtttttgtttttcgtttattttttatttggtttttttttttttgggagatatttttttgtatttttcggcggttcgtagttcgcgttttttcgtttttatcgcgttttcggtagttttagcgtttttacgtttatttttttgtagatatttcgatatggcgaagtataggttttaagtattcggcgtattcgtcgtttttcgttttttatttgtttgcggacggttttatttgttttgcgttggtttcgcgcgtcgttgttcgggtaatatatttagattcgttaggcgcgtttttgtagttttaagttcgcgttacggtattcgcgcgtagacgtttgcgggcgggggcggggtagagtttaggggcgggatttgggtatcgttcgtatcgtcgtcgtcgcgcggaggatattgggagtcgtagtttttcgaatgggaggagggcgggaaaaggggtgaagtggggcgagttttttcgtagagtatattgggaaaatgttcgcgttttttttcgttttggatgagcgggtgtggttgagggtttgaggagtgattggtagggaaagaggaggaatcggtggaagcgttttcgcgaggtacggcgggaagagaggcgggagatcgcgcggggtatttcgggagtaagggtcgggttaggtttgggcgcggggtattgtgggaggtggacgtcgtttcggggcgggtaggtgagtggggaggggcgggaagggtgtatattttggggaggggagaggtatagttaggtgggacggcggggttggaaggtgtcgtagcgggcggggagggggggagtaggagcgtcgggagcgggttggatggggttgttcgaggggagacgcgtagttggacgtggggggagtatttggggtgaaggagtttattcgaggacgaggggttatgtttagaacgaagatgtatattgcgggggatggtggatgtaattgggaggaggggtttatagttggattgggggtcgtatttgaggaggaggggattataggtgaatattggtgatattttcgaggagaattagttataagtggggtatatatttgtaggcgaagcgtggataattgtatgtggggagtatatttggagatgagagtgttttagggaagttttagttatagttgtatgtggcgagttatagggttataatcgggggaaggggtaatagttgtacgttagaggtatatttggggagtgcggagttataggtgtatgaagtatgtgatcgggtgaggggttcgtggtttggatgtgggagtatatttggagatggagcgtttttggaggggttatagttaattgttggtatatggaaggaggagttttagatgaatacgagagttagaagttatttttgggtgagagatatagttggaaggggaggaggttttagttggaatttgagaatatatttgaggagatgtttttaaggaatatttgagtttaagggtcgtattttgggaggagagattttaattgtatttaagggttatatttgcggaggaggagacgagttggaattaggaattaagatgataggttttaagtgaattagggataaggcggtgggaggaggttaaagataggatggaggttgatatttatatatttggagaaaaataggtacgttcgatttcgggttatttatttcgatagaggtattagtaatcgacggggtaggttaagaatggagtagatgagatatttcgggtgggaatgggtttgatatttatttgttttttttttttttacgtaggtttttaggatggagcggtcggagtttttattcggtacggttgcggggtaggaggagtaggagttgcgggagcgggtttttttttcgtgggtcgagtttagtcgttttttcgacgcgtggtgttagtagcggttggcgttttttttcgttaagagttttatgtatttggcgcgttgtcgttgggttagtgcgttttcgttttatacgtttatcgacgtgtttaagtatagttacgtgcggtttgtgtgtaaggacgtgcgtgcgtttagtcggttcgtcgtggggtgcgtgaatttgagtcgttgttttgttggggggaaggggagtatcgggggtgggtgtgggtgggagacgggtagagaatattttatttagagatgtagagggggagaggttaattgaggtagttaaatatattttgtagagaggcgggagttaaggagggatatgtattgagagaagaagaggagttagagagataaagatatttacggagtaagagatggtgtgggttcgatttatagatttttttttttttttcgagatggagtttcgttttgtcgtttaggtttgagtgtagtggtgttatttgtagtttttattttttaggtttaagtgattttttcgttttagtttttcgagtagttaggattataggtatttgttattatgttcggttaatttttgtgtggttttttgtttttgtttttgttttgttttgttttgtgttgtttttttgagatagagttttgttttgttatttaggttggagtgtaatggtataatttcggtttattgtaatttttatttttcgagtttaagcgttgttttttttgttttaattttttgagtagttgggattataggtacgcgttattacgtttggttaatttttggatttttgtagagatggggttttattatgttggttaggttggttttaaatttatgattttaggtgatttgttcgttttgttttttaaagtgttgggattatagtcgcgagttattgtgttcggtttgatttatagaatgtaatagagatttcgagaggtagagcgtaaaatatatatattttaagaggagaaaatagttacggaaaattttagaaatatggagatatggaggtagagatattagagatagttagggaaatagaagagttaggttttgtatacgtgataaagattgggagatagagattaggagattgaattgtagagaagtcgtaggataaagaaaaggatttatttatttagtgaataaggggttaggttttatgttgtgggttggggatattttagttggagcgatggagttgggtaagagataaaaatttttgtttttttggtattttttgattggatagaaagattgacgttaaaagaataagtttataggtagttttttataattgtgtaaagaggggtaggtgagaaatttaggagagttagaattatatttaggtggttaggggtattttaatggattttaattgtattttatttagtttttatttttttgagatagggttttattttgttgtttaggttggagagtagtagtgcgattttggttttttgtaatttttaatttttgggtttaagagatttttttattttagttttttaagtagttgggattataggtgtgtgttattatgtttatttaatttttgtatttgtagtagagatggggtgttattatgttggttaggttggtttcgaatttttgattttaaggaggttgaggtgatttgtttatttcggttttttagaatgttgggattataggtatgagttattatatttagttaaattgattttaattttattttattttattttattttattttatttgagacggagttttgttttgttatttatattggagtgtagtggtataatttttatttattgtaattttagttttttgggtttaagtaatttttttgttttagtttttttagtagttgggattataggtatgcgttattatgtttagttaatttttgtatttttagggttttattatgttggttaggttggttttgaattttcgattttaggtgatttgtttgttttggttttttaaagtgttgggattataggtgtgagttacggtgtttggtttgattttagttttaaataggggttgttttttatatagttaggtttttagtttttattggaatatcggaagaggtgagtttatgtttttattggtagacggttattttttttggatggggttttgttgtttaggtttgttttaaattttgttattttttgttgttttatttttagtattgttttttgtttgttttgtttgtttggttttagtaggtgtgtgagtttgagatttttggttggggagttgtagataagaatagagtgtttaagaatataggttttgtttttaggttgtttgagatatgttttacgattttttggatgggtgattttgggtaatggattttatatttttaagttttagtttttttattttttgaaatggggttattacgatattcgttttatggggttattgtgaggatattgtgagattatatatgagaaaaatatataattttggtgtttggaatatggggtggttggttaagtgatagttgttataggattcgagagtatggattttgggttattgcgttgttgatgtttggtggatgttgttgagtgagtgattttatttttttgtggttttagtttttttatgtggaaaatgggagatataatagtgtttattttataggtaaattatttagaaaggtatttagtatagagtaagtatatttttaatagtttttttatcggtagttatttaaatatgtattgtgaaatatatttttgtaattttttttttattatttattttagaaatagagattcggagatttgaaagtggaatagtattaaatatatatattatttagaaatttagaacgttagagtttgtaagaagtttaaagaagtttaggtttaatttgaaatttattaatagaatttagttttaatgtaataaatgtttattgagtatttattatgtgtatgttttttattggacgtttagaatttaagattgatttcggtttttgaatagtttagaatttaatggggtagataaagattaaaaaataaaaaaaaattatagatagtggtttatagtagtgagagtgagattgagggggagatgagaggaggatataaagggagtggttagttttatttgaaagtttattgggtggttttggaaggttttttggaagaggtaattagtaagtagaattttgaagaattttgttgatatgtttatgtatgtatagtatgtgagttaatagatatattaggtttattatgtgtaggtattgttttaagtgttttataaatattagagatagttaaggagtaggagagataggattatggagggggcgaggatagggttttgggtatatttttgggattgggtagatgatgagatggttttt

SEQ ID NO: 1159 - DNA, 5371 bp, Artificial Sequence
  chemically treated genomic DNA (Homo sapiens)
ggtagaagaatggtgtgaattcggaaggtagaggttttagtgagtcgagattatattattgtattttagtttgggtgatagagtgagatttcgttaaaaaaaaaaataaaaataaaataaaataaaataaaaaaatttataaattagattatattattttgtttttataaattttttaatttatatttagagtaaaatttaaagggttttttttttagaaaattttattaaatttggtttttgtttatttttttaatttttttttatataatgttttgttttgtttattttgttttagttataatggttttttattttttttttaaaatttaattatattgttttagtttaagggtttttgtttaagttgtgttttttgtttggagttttgttgtgttagttttttatattgtttaagttttagtttaaagtaatttcgttagagaatttttttttgattattaattaaagtaatatttttaaagaaattttagtgtttttatagaatgtattgttatttaaaattatttggtttttttttttattgagatgtttattgtatttttttaatttatatgtaagttttataagaaaagaacgatttttattttatttatagttgtttttttgtgtttagaatagtttttgatgttagtaagtgtttagtaaatatttattgaaggaatgtataagtaaaaagagataaagaggaaagttagaggattaaaagaataggtgaaggattttgtaaatatatttttattattgtttcgtagtatgagttttttgtagaaattatgagatttttttggtaatattattaagagaaaaggttattgtgatttttatgttaagatattttaaatatagacgtggtgatttttaatagatagaagtagagaggtgagaatcgtataatttttaaaattggaagaagtttttaatatttttataatttaatttatttatgtggtgatagagtgaaagtttggaagagattaagtgatttattaaagattttgttattagttaggggtaggttaggagataattgaggtatttagtttagttgatggttttatattttgttgtttttttttatatttatttagtagttatatatgaaagggttggaataacgatatttgtttggtttttgggtttgttggaaatttttttttaagtagttattattttttttttttacgtttggttattattgttgtataataaattatttttaagatttagtggttttaaatattaataataggtgtagtgatggatttatgtttgtaattttaatatttggggaaatagaggtaggaggaatatttgaggttaggagtttgagattagtttgggtaaatatagtaagattttatttttgtaaaaataaaaataattaaaaaaaaaaaaatttaaatttaaatattaaaaaattaataatattttattattttttattgtttttgtgggttaggaatttgggaatgttttggttaggtttgggattttttatgtaggtatagatagagagtggttggagttggttaggtatttttttttttttttttatgtagttttaagatttttttttgaggtttagtttgggtttttttataatatggaggttttagggtagttggattgtttatattaagatttaagagtttaagaggtagtattttaaagttaaaagttgtattattttttatagtttagttttagaggttaaatagtattatttttgttatattttattggttataagtgagttattagtttatttagatttacgagaagggtaattagattttattttttgatggggagtattagggttttggaaagaatgtgggttagaaaatattgttgtagttatttttggaaatataatttgttatattatagaatgtagaggttattttagataattagaaatgtcgtttatagtatttaaaatgttatttatagtatttaaaattaaatttatcgtttgatgtagattatttaaaatgaaagaggtggtatttagaaaattttaaaggtatagtacgtataaggtagtaatgagtttcggttttgtgttttttataaaatgatttaaatatttgtttttgtttattgtaagtttgagagtttttgtttttgtatgagtttatatgtatgtttattaagagtgtagttatgggtatagatgattatatagaaatatgtaaaatgtgatttttaggttaggtcgtaaaatattgttttgaaattagaggaatgatgaatagagtgattttagttgtggtgtcgataattggggggtataatataatattatttatagttaggtaattttatttgatattaggaatattattttatgtattgtttttaatatttgtttgaagaatattcgaatatagaatttttttatttatattgaatttgtgtgtgtttataaggtttttgtgtttcgtattagtggaaataaaagattgacgttgttatttatttaattaggtatttttagattataaattaggatgagaaaggattgttaaacgtaaagaatgtagaaataaagattatttagaggtggcgttgtggtaaaagtatatttgaattttgattatagtgaatgtatttattttttattttttagaagagagattgttagttattatcgtttttgtatttttataaatatatattagtaaataaagttttttggtaatatatttttatttattttaatttattaggatatgtttaaagattttatttcgtatagaattagagttgaagtattaaaattatttgttaaaatgtaggttttgtagtttagagttttgttatttaaagttttatttattttattttttttttttttataaatattatcgggattttttggataattatttaatgatagttgaatatgtgtttggttaaatttttaatattttttttaggaattaagatttcgttttagtgtatattttttaggaaaaattttgaaaagtattataattcgttatatatttatgtattatgtgttttatttaagaaaattatttttaaaaagaaaaaataaagattatttggtttaatttttttatttgtggatgagaaaattaaggtttagagacggaaatttatttgtatatgataaattataatttaattgtagtttattaagattttgtgttatttttttttattataaattatttaaaaagtgaaaatgaattaggggatttaaatgtattatttgtttatggtgtttttttttttatttggtttaattgagtttttttgattaatttttaagtagtattatattttttttaagttggttttttttaattatgtttatttgtagttgttttttgtgtaggatattttaattattattatagttttaatgatttttttttaaaaaaagttttttatatgtgtataaggtgaatttattatagtagtgtaattttaaatataaattaataaaattaatttatttaattttaaggtgttagaattaaaaaatgagtatttgaattgatatttaaaatgttttttatttgattgtatgggtaataattatttttttttatgtagttttattaattttgatggtttgaaagatagaaattttttaaatagatattaaaattttaaatgtttaatatttgtattgtttcgttagatttttttttaggtttttttttttaatttagtagtattgtgtgtaatataatatgaaaatttgttttataaggttggttttatttaatgatatttagtagaagggttttgtatttttatgataatttttattagaaaaatttttttggaatttattaataataattaggtttaatattagttttagtttggagatttatttaatttatttggtagagtagataaagtcgaatgtttaggtatttaagtatttaggttgtgtttcggttttggaaaaagatttttaggttagtattttaaaagtattttttaaaatttgatttatattagaagtgatattttttattttttagaggttgtgagattgtaaattttgtaattatttttattgtttttgggggttgtgagaattttcgttttttattttttatagtgaggagggtagtcgggaaaggtttttttttttaagttttcgttaattttgaaaataaggattgtgttttttatattattagtaattgataaggatttaggaaatgtttgttaggtatttttaaattcggaaaaatgggagtatgagggaggttaagtaggtagtatttagttagtaattattattttttttatgtttttattttgttaattaagtttttattacggtttataaatttttaatatcgtgaattaaagaaataataataaaaatttttttttgtgtgtttgtgcgtgaggggatagaagtttattgttttaagatgtaggatttatttttttaaataggaagagatttatttttgagaaagatggtaagttttttaagggtttttttttagatagaggggatggtagttttcgaggggcgagcgggcgcgggtttttagggttttcgtgcgttgagaaggtaggtgaggtttcgttttgcgtttcgatttcggatttcgggtcgcgaagggtagtttaagcgggttttcggttttaggcgttcgggttattttattttatttgattcgggtttttttttttttttttgtcggttagttttggcgtttcgttttttttttcgtttttcgagtttcgttttagttatttttttgttttttttcggattggtaggttttattatttcgtttgaataattcggtcgtttagtggttgaaggtcgttgacgtcggaggtagagtcggggagtagttgggattttgttttgttagtaatatatgtgttaagagtcgcggaaggtagcgagcgagtcggttagaggttagcgtcgtcgtcgtcgtcgttttcgagtcgggtagtaatagtttcggtagcggcggttagttttagcgcgtttgattcggacggacgtagttttcgacgtttgtgtgcgtttgtttgtcggatttcgtatcgttcgacgtcgtttttcggggttgttgtgtttgtaattgttttcggtcggatgtgtatggagtttattcgagtcgacgttgttattttggtacgagttagttatttagcgtacggtaggtagtaggtcgtattttagtagatgagtatgttagaagtttaacggggtttttttcgtttgtagcgaatttattaatgaagtttattgttaaattttataaattatgtatttatgttgttttttttcgttgttgtgtttgtagttgttttcgtttgtagg

SEQ ID NO: 1160 - DNA, 5371 bp, Artificial Sequence
  chemically treated genomic DNA (Homo sapiens)
tttatagacggaagtagttgtagatataatagcgggaaaaggtaatataggtgtatagtttatgaagtttggtaatgagttttattagtaaattcgttgtagacggaaaaggtttcgttgggtttttgatatgtttatttgttaggatgcgatttgttgtttatcgtgcgttagatggttagttcgtattaggatggtagcgtcggttcgaatgagttttatgtatattcggtcgggagtagttgtagatataatagtttcgggaagcggcgtcggacggtacggagttcggtaggtaggcgtatataggcgtcgggggttgcgttcgttcgggttaggcgcgttggagttagtcgtcgttgtcggggttgttgttgttcggttcggaggcggcggcggcggcggcgttggtttttagtcggttcgttcgttatttttcgcggtttttaatatatgtgttattgatagagtaaaattttaattatttttcggttttgttttcgacgttagcgatttttagttattgggcggtcggattgtttaggcggaataataaaatttgttaattcggggaaggataaagggatgattgaaacgagattcggggggcgggagagagagcgaggcgttagagttggtcgatagaggagaagggaaggattcgaattaggtggggtgaagtgattcgggcgtttggggtcgaggattcgtttgggttgtttttcgcgattcgggattcggagtcgagacgtagggcggggttttatttgtttttttagcgtacggggattttgaggattcgcgttcgttcgtttttcggggattgttattttttttatttgagaggagatttttaggaaatttattattttttttagaaatgggtttttttttgtttgggaagataagttttgtattttagggtagtggatttttatttttttacgtataagtatatagaagaggatttttgttgttgtttttttaatttacgatattggagatttatgaatcgtagtggaagtttagttaataaggtagaaatataaaggaaataatagttgttagttaaatattgtttatttagttttttttatatttttattttttcgagtttgaaagtgtttagtaggtattttttggatttttgttaattgttggtgatgtagggagtatagtttttatttttaaagttgacgaaaatttaagggagaaagtttttttcgattattttttttattgtggaggatgagaggcggaaatttttatagtttttaaaagtaatggaagtaattgtaagatttgtaattttatagtttttagagagtaagaaatgttatttttagtataaattaagttttgaggaatgtttttagggtgttagtttgagagtttttttttaaggtcgaagtatagtttagatgtttgaatatttaggtattcgattttatttattttgttaaataggttaaataaatttttagattgaggttaatattaggtttgattattgttagtaagttttagagagatttttttggtggaaattattatgaaagtgtaaagtttttttgttaagtattattaagtaaaattagttttgtggggtaagtttttatattgtgttatatatagtattgttagattgaggaaaggaatttgaaggagaatttggcgagataatgtagatgttgaatatttagggttttagtgtttatttgggggatttttgttttttaaattattaaaattaataaggttgtataagaaagaataattattgtttatatagttaggtagagggtattttaaatattaatttaaatatttattttttaattttagtattttaaaattaaatgaattaattttattgatttgtatttaaagttgtattgttatgatgaatttattttgtgtatatataaaaaattttttttaaaaaaaagttattaaaattataatagtaattaaaatgttttatatagaaaatagttatagatgggtatgattaaagaggattaatttagaaaagatgtaatgttgtttgaaggttagttaagaaaatttaattaaattagatgaggagaggaatattataaataaataatatatttgaattttttggtttatttttattttttaaataatttataataaaaggagatgatataagattttagtgggttataattaagttatgatttgttatgtgtaagtaaattttcgtttttgggttttaatttttttatttataaatgagagaattaagttaaatggtttttattttttttttttaaaaatgatttttttagatagagtatataatgtatagatgtataacgaattgtggtattttttaggattttttttgaagaatatgtattaaaacgaaattttaatttttgaaggaaatgttagaaatttaattagatatatgtttagttattattgagtgattatttagaggatttcggtggtgtttgtggaaggaaggagagtgagatggataaaattttgaataatagagttttaggttatagggtttatattttagtaggtggttttagtgttttagttttaattttgtgcggagtgaggtttttaaatatgttttggtagattggagtggatgggagtgtattattagagagttttatttgttgatgtgtgtttatagaaatataaaagcgataatggttaatagttttttttttgagaggtagggagtaaatatatttattgtaattaaaatttaggtgtatttttattatagcgttatttttgggtaatttttatttttgtattttttgcgtttagtagtttttttttattttgatttgtggtttgaaaatgtttggttgagtgggtagtaacgttaattttttatttttattgatgcgaaatataaaaattttgtaaatatatataaatttagtatgggtaaagaaattttgtattcggatattttttaaataaatattaaaaatagtgtataaagtaatatttttggtattaagtaaaattgtttaattgtaaataatgttatattgtgttttttaattatcgatattatagttgagattattttgtttattatttttttggttttaagatagtgttttacggtttgatttgggagttatattttgtatatttttatataattatttatatttatagttgtatttttaatggatatatatgtaggtttatgtagggatagaggtttttaaatttgtaataaatagggataaatatttgggttattttatggggagtatagaatcggagtttattgttgttttatgcgtgttgtgtttttggagttttttgggtgttattttttttattttagatgatttgtattagacgatgaatttgattttaggtattgtagatggtattttaggtattgtagacggtatttttgattgtttaaaataatttttgtattttgtgatgtggtagattgtatttttaaagatggttgtagtagtattttttagtttatattttttttagaattttggtattttttattaagagatggagtttaattatttttttcgtgaatttgggtgggttaatgatttatttgtaattaataggatgtggtagaagtgatattgtttgatttttgaagttagattataaaagatgatgtaatttttgattttgaaatattgttttttgaatttttgagttttgatgtaagtaatttaattgttttgaggtttttatgttgtgaggaagtttaaattaaattttaaggagaggttttgagattatatgaaaagagagagagagatgtttggttagttttagttattttttgtttgtatttgtatgaaagattttaagtttagttaaaatatttttagatttttggtttatagaaataataagagataataaaatgttgttgattttttaatgtttaaatttaaatttttttttttttaattatttttatttttgtagagatggggttttgttatatttgtttaggttggttttaaatttttggttttaagtgttttttttgtttttgtttttttaaatgttgggattataggtatgaatttattattgtatttgttgttgatgtttgaaattattaaattttgggggtgatttgttatgtagtagtagtaattagacgtggaaagaaaaagtaataattgtttagggaagagtttttagtagatttaggagttaaatagatatcgttgttttagtttttttatgtatggttgttaaatgaatatgagaaagggtagtaaaatatggaattattaattagattggatattttagttgttttttggtttgtttttggttagtggtaaagtttttggtaagttatttgattttttttaggtttttattttattattatatgaatggattgggttataaagatattggaggttttttttagttttaaagattatgcggtttttatttttttgtttttatttattaagaattattacgtttgtgtttgagatattttggtatgggagttatagtggtttttttttttagtggtattgttaaaaggattttataatttttgtaagaaatttatgttacgaagtaataatgggaatatatttgtaaagttttttatttgtttttttaattttttaatttttttttttatttttttttatttatgtatttttttaataaatatttgttaggtatttgttagtattaagaattgttttgagtataggagagtagttgtgagtaagatagaaatcgttttttttttatggagtttatatgtgagttgaggaggtataataaatattttagtaaagaaaagaattaaataattttagatagtaatatattttgtgaaggtattggaatttttttgagggtgttattttggttaatgattagggaagaattttttgacgaagttattttgagttgaaatttggataatatgaagagttgatataatagagttttaggtagagggtataatttgggtaaaggtttttaggttggaatagtgtggttgagttttggggaagagatagaaggttattgtgattggagtaaaatgaataaggtagagtattatataggaggaagttggagggatgggtaggggttagatttagtaaggttttttaggggaaaagttttttgaattttattttaagtgtgaattggagagtttgtagaagtaaaatgatatgatttgatttgtgggtttttttgttttgttttgttttgtttttgtttttttttttgacggagttttattttgttatttaggttggagtgtagtgatgtgatttcggtttattggaatttttgtttttcgggtttatattatttttttgtt

SEQ ID NO: 1161 - DNA, 5980 bp, Artificial Sequence
  chemically treated genomic DNA (Homo sapiens)
ttttttttttatttaggatattttataattttggttattttttaaggttagttttgggaaattttttttttttttttttttagataggattttattttgttgtttaggttggagtgtagtggtgtgattttggtttgttgtagtttttattttttaggtttaagtaatttttttattttagttttttgagtagttgggattaaaggtatagattattacgtttagttaattttttaattttttgtagaaatgaggttttgttgtggggtatacgttggttttgaatttttgggtttaagtaatttttttattttggttttttaaagtgttggaattgtaggtgtgagttattgtgtttagtttagtttttggaattttttaagtaaaaggtatggtttaaatattaaggtattagtgaggtagtagtgtaggttttgtgttcggtgagggtgtatgaaagaatgttttagtaggggtgaggtgaagttaagttttatttttattttgttttaattataattttatttttatttttagtgattggtttataaatgtataaaatatagttttggtaaatgagatttaaggagaattttaatggggaatttttgagaagggttttttttgtttttaagaaagagatacggaagagtaagtttttttttttttttttgttgtagttaatttttgattatatggtagtttgggttttggggaattgtttatatagaggattgaagagtggagagagagaagttgggtttttgatgaggttggtgagttgtgattgaagattattttattagtggatttgttatatgaaatgataaatgtttgtattatttaaattagttttatttagagttttgttttttgtagtttaaggaatttgaattagtatattattgttttttttaaataataattttttattttatttggttgcgtttttttgttaatgtttaagttttatttgaattttattagataattattttgtttttttttgtgttttaaatattttttgatttgatataattttaaatattattaattaatgtagtgtatgtatgttataaatgggttataaaggtaatgagatattgattttttcggtttttagggtggtcggaaattttatgatggttagttttgttttggcgggaagtagttttttttatttattcgagtgttgaataaataatatttttaaatgtgtttaatgaattaatgtattgttgtttattttaaaataattagaaagattatttagtagggttgaatttaaattttttatggaatattaattaattaagttggaattttaattaaatgattaatggaatagatttttaatagatgaaattagttatatttttttttattttatatttttttcgtggatttttgttattgattttaatttgtttgtggaaattgggagataatagaaaattttgaagtattggtttagaatatagatggtttgagttttagtttatgtttgttcgtggattgtgcgtaaatattttattttttttagatagtagttttttttttatttgttttaatgtgaggtttggatttgttgatttatggaatattaagtgttttattttgataaaaatatttttatatttattgattattaagtttgttagttttttaaataaatgtaatttgttttttagggtgtttatattttttttttgttatgttatttattatgtattataattaattttttaaattaatggtttttaagtgttaaatggtagagagcgtatgatttcgaagatagtagatgggtatagtagataatgttatattattttttttgataatgaatcgtaattttataataatttaaattgttatatttttaaattaaagaggaagttttgtgtgggaggataggcgggtgttaaagataaaaatataatgggttttggttgtgaaattgtgatattatatttttttaaaaaggttttatgaagttaaatgtaaaatagtattcgttgaaataaaataaattttattattatttttttgtttttaggtaggtttttgaaatatttcgtttgtttattatttttattttttatataaaattacgttttttttttttttttttttttttttgagatggagttttgttttgtcgtttaggttggagtgtagtggtgtgattttggtttattataattttcgtttttcgggtttaagtgatttttatgttttagttttttatgttttatttttcggaatagttgggattataggtgtgtgttattattttcggttaattttattttttgtatttttatatgtttttaaatggttttttatgtttttgtgtgtgtgaaggaatgggaggggtgggaggtaagaggttggtaaagaaattatttgtttttttgttaaagaaattttaaaaagatataatgatttatttatattcgttagtgtatttttttttattacgtttttgtagagttgggatatgtaaaataaaatataaggtaatatgttttatatttaaaagtatgatagattgtaggttataggtgaagtgaggtgaggtgatttaataagttgtagtgttttaaatattttttatattaagtggtttggttgtaaaaggaattttaagggaatatgatatgatttaaaatatagagaagagcgttttatttaagtaatataatgtgtgaagtatgttaataaaatttagttttgcgtgtattatataatatttgaattgggatatattagtttttgtggtttattatttttggttttaaaatgttagtattaggggttagtttaacggttttgattattttttatatattagggagatagtagttttgaggtattatatgatatagatattttttttgtattgattaaatatattatttagtatggagttattaattggaagggtttgtagtagtggaagtgaattttaaatattattatgttttttatttatttatgtaaaaattatttattgtatatttatttaggtattggggatatagttttaaaaaagattacgattttgtttttataaagtttgtatttttgagaagggagattgataataagtaataaatttaaaatattgttttagatagtgatgagtgttgagaaggaaataaagtaggttaagtttttatagagtgtttgtggttattttagatgtatggttagataagggttttttgtagaggtgatatttgagtcgagatttaaatgataagatggaattagtaggtaaagtattaagtagaagaaatagtttttgtgcgaggagcgagtaaaaggaattattaataatgatggatggaatttggcgattttcgggaatagtatgaaggtttttgttattaaaatatggtgagtatgtgttgatgaggttttagagttaggtaaggagttttattttttattttaagtgtagttggtatttattggaagttttaagtagagcgtgcgttgtgagggatgtaataataataggtagtttaaaatataatattgtatttcgatttgattttttcgaaatttagtttttaattttagtgttggttaaataatattttggtcgtttttgtttgagtaggttgtttgcgtttgtcgcggtttgtttgtttttggcgtttcgttgttgaaagttttagagcgtgtgatagttggtaggcgtagtgaggcgtagttcgagttaagttaatgtaggggtcggggttgagggaggggaagaggtagaggaggcggtgatggcgcgttgggagggcggcggtttttgtagcgagggtggtggcgatgcgtatatcgagaggataaggaagcggttttcgacgagttttttcggggtttatggggtttttggcggttcggtttcggaggttagcggggttgttcgatttggtattggaaataatggtggttcggggttggaggtaatggcgcgagtgttggggggtaggggcgattaggggagtttcggtttttcgggtttagcgtcgcggagttttgttgcgggttttagtggtagtattttcgggaatcgtaggtgttgatttaaggttcggaataggcgggttttttgtttatattttgcggcgttcgcgattcgggtcgggcgattcggcgtcgggttttgttattcgttcgtatttagaggtcgtaaggtagtcgttagtttcgggattggattttagggcgttttcggttttgcgaggttttcgttttttttttcgttttttttttatcgtttttttgaggtattttgatgcgggcgggtatttttgtcgaaaatatttatagcgttcgttttttcggtttttcgagtagtgattttttcgcggttaatttttttagggaaattagcgattcgcggtttagatagcgattttcgttcgtaggtttttgttttgtttttagatttcggttttagtggtatttgtttagcgaggtttcgtttaattaagttattcgaattaattatttatttattcgttattatattatttcgatttaattcgtagcggggtattgattttatattcgtgtgttttttgtgtttatttatggtttgtttttggaatgttcgtttttgggattgggattatgattttttggcgtagtgcgggtgtttcggcgttcgggatcgggcgggtcgtagtagggttttatatttgttgagtgattgaatatcgttttcggtcggggagagcgtcgtagtcgggtttattttaggtaggggttgggttttttcggtttcgtttaggtttcgtttttagcgcgaattcgtttttatttcgtttgtttacggagtagtagggggtttgattgtgttttttttttttgtttttttcgttttttttgtagttgttacgaaaattcggaacggcggagcggcgtcgtttttcgcggtatttttttggtagtttttggaggtcgcgttgggtatgtttagttagttgggtcgttttagttttcggagtaggaagttcgggcgtttcggttgtaaggagtcgcggcggggggaaaatggagttttttattaatggtgagtgggttgtcgaggcgtcgggattcgggtttttcggagttttgagggtcgtgggtagtcgtgatacgcggggtcgggttgtagtcgttttttttaatatcgcgggttttttacgagggttgagggaggtagggagaggggatttgggggaggtagggaggttcggggggcgggcggcggttagtgcgggattcggggttggtttgaaggttagcgtcgttggatttgaaggttacgttgtcgttagtcgtattagttacggtggtttaggtcggtagggtaaatagtaaaatttgggtatgttgtgcgtagaggagtgggtagtgggaaagttggtagtttaggtttgttttcggaggaggcggtgtcggttcgatttttttgtaggagcgttaagttgtggtagttgtcgagtttaatttttgtggggcgttaggagttgtttttttgttttttagtgagttgtcggcgtgattttttttaatagggcggggtgggggtgggaggtttggtaggttaatgttgtggaaggaagggaaattttaggaaaggtttgtttatttcgttcggtgtcgcggaggtgtttggttatagtgttatttttttgattttgtcgaggtattcggtagggttattacgtatttttttattggttgtagattatattagttttttagttaaagatttgttaatgttaagggttcgttacggtggtgatattattgtgtgataggaagcgagagttaacgtagggagtttggtattttgtaaatagttatagttttttattgaacggggagtataaattttattttagttagaattatggtttttgtgcggattagaagtgttagagttataatataggggtgagatgttttatcgttttgcggtgtt

SEQ ID NO: 1162 - DNA, 5980 bp, Artificial Sequence
  chemically treated genomic DNA (Homo sapiens)
aatatcgtaaaacggtaagatattttatttttatattgtggttttggtatttttggttcgtataaaagttatggttttaattagggtgggatttatgtttttcgtttagtgaagggttgtggttgtttgtagggtgttaggttttttgcgttgattttcgttttttgttatatagtggtattattatcgtgacggatttttgatattaataagtttttgattgaaaaattgatgtgatttgtagttagtgaggggatgcgtggtggttttgtcgagtatttcggtagggttaggagggtggtattgtggttaggtattttcgcggtatcgagcgaggtgagtaagttttttttgaagttttttttttttttataatattaatttgttaagttttttatttttatttcgttttattaggaaaagttacgtcggtagtttattgaagggtagggggatagtttttggcgttttataaaagttgggttcggtagttgttataatttaacgtttttataggagagtcgggtcgatatcgtttttttcgggggtaaatttgagttgttaatttttttattgtttatttttttgcgtatagtatgtttaaattttgttgtttgttttatcggtttggattatcgtggttgatgcggttggcggtagcgtgatttttaagtttagcggcgttgatttttaagttagtttcgggtttcgtattggtcgtcgttcgtttttcgaatttttttgttttttttagattttttttttttgttttttttagttttcgtgggaagttcgcggtgttgggggagacggttgtagttcgatttcgcgtgttacgattgtttacgatttttagggtttcggagagttcgggtttcggcgtttcggtagtttatttattattggtgaagggttttatttttttttcgtcgcggttttttatagtcggagcgttcgagttttttatttcgagagttgaggcggtttagttgattgagtatgtttagcgcggtttttaagggttgttagggaggtgtcgcgaggggcggcgtcgtttcgtcgtttcgggttttcgtggtagttgtagaaagagcgagggaagtaagagggaaaagtatagttaaattttttgttgtttcgtggataggcgaggtgggagcgggttcgcgttgggggcggggtttaggcggggtcgggaaagtttagtttttatttgaagtggattcggttgcggcgtttttttcggtcgggaacggtgtttagttatttaataaatgtggagttttattgcgattcgttcgatttcggacgtcgagatattcgtattgcgttagaaaattatggttttagttttaggagcggatattttagaaatagattataaataaatatagaagatatacgagtgtaaagttagtgtttcgttgcgaattaaatcggggtgatgtgatggcgagtgagtgggtagttaattcggatggtttggttagacgaggtttcgttgagtaggtgttattgaagtcgaagtttgaaggtagagtaggaatttgcgggcgaaggtcgttatttgaatcgcgaatcgttggtttttttggggaggttggtcgcggagggattattgttcgaaggatcgagggagcgggcgttgtaggtgttttcggtagagatgttcgttcgtattagagtgttttaggagggcggtgaggaggagacggaagagagggcggggatttcgtagggtcgagggcgttttggggtttagtttcggggttggcggttgttttgcggtttttaggtgcgggcggataataaaattcggcgtcggatcgttcggttcgggtcgcgggcgtcgtaggatgtgggtagaaggttcgtttgtttcgagttttaaattaatatttgcggttttcgggggtgttattattggggttcgtagtaaggtttcgcggcgttaggttcgagaaatcgaaatttttttagtcgtttttgttttttagtattcgcgttattgtttttagtttcgagttattattgtttttagtgttaaatcgggtagtttcgttagttttcgaggtcgaatcgttaggggttttataagtttcgaggaggttcgtcgggaatcgtttttttattttttcggtatgcgtatcgttattattttcgttgtagaggtcgtcgtttttttagcgcgttattatcgttttttttgttttttttttttttttagtttcggtttttgtattgatttggttcgggttgcgttttattgcgtttgttaattgttatacgttttgaggtttttaatagcggggcgttagggataaataagtcgcggtaagcgtaaatagtttgtttaaatagggacggttagggtgttgtttgattagtattggaattggaaattaggtttcgaagaagttaaatcgaagtataatattgtattttaaattgtttgttgttattatattttttataacgtacgttttatttgaaatttttagtggatattaattgtatttagaataaaaaatgaaattttttgtttaattttgggattttattagtatatatttattatattttggtaataaaggtttttatgttgttttcggaagtcgttaagttttatttattattgttaataattttttttgttcgtttttcgtataagaattgttttttttgtttagtgttttgtttattgattttattttgttatttaagtttcggtttaaatgttatttttgtaaagaatttttgtttgattatatatttaaaatagttataaatattttataaagatttggtttgttttattttttttttagtatttattattgtttgaaataatgttttggatttgttgtttattattagtttttttttttaagaatgtaagttttgtgagggtagagtcgtaattttttttaaggttgtatttttaatgtttgggtaagtatataataaataatttttgtatgaataagtgaaggatatagtggtgtttagagtttatttttattgttgtaaatttttttagttaatgattttatattgaatgatgtgtttgattagtatagagaaggtgtttgtattatatgatattttagagttgttatttttttaatgtgtgaaaggtaattagaatcgttaggttggtttttagtattgatattttagaattaaaaatagtgaattataggagttgatgtattttagtttagatattatatagtatacgtagagttagattttgttaatatattttatatattgtattgtttaaataagacgtttttttttatattttaggttatgttatgtttttttgaagttttttttgtaattaaattatttagtataggagatatttaaaatattgtagtttgttaaattattttattttattttatttgtaatttatagtttattatgtttttaagtgtgaaatatgttattttgtgttttgttttatatattttaattttgtagagacgtgataaaaaaaaatgtattagcgaatataggtggattattatgtttttttgagatttttttgataaagagataaatgatttttttgttaattttttgttttttattttttttatttttttatatatataaagatatgaaggattatttaaagatatgtaaaaatataaaaaataaaattagtcgggagtggtggtatatatttgtaattttagttatttcggagggtgaggtatgagaagttgaggtatgagaattatttgaattcgggaggcggaggttgtgatgaattaagattatattattgtattttagtttgggcgatagagtaagattttattttaaaaaaaaaaaaaaaaaaaaaaaagacgtggttttgtataagaagtaaaaatagtaaataaacgaaatgttttagaagtttatttaggagtaaaagaataataatgaagtttgttttgttttaacggatattgttttatatttgattttatagagtttttttgagggaatatgatattataattttataattaaaatttattatgtttttatttttaatattcgtttatttttttatatagaattttttttttagtttaagaatatgatagtttaagttattatgaagttacgatttattattaaaggagataatgtgatattatttattatatttatttattgttttcggaattatacgttttttattatttaatatttgaaaattattaatttggagagttaattataatatataataaatagtatgataggaaaaaaatataagtattttgaaaaataaattgtatttgtttaaagaattgataaatttgataattaatgaatatagggatatttttattaaaataaaatatttggtattttatagattagtaaatttaagttttatattgaaatagataaggagggaattattgtttagagagggtagaatatttacgtataatttacgagtagatatggattggaatttaggttatttgtgttttaaattagtgttttagagttttttgttgttttttagtttttataagtaaattggggttaatgataaaaatttacgaaaagaatatggaatagagagaaatatagttaattttatttattagaagtttattttattaattatttaattaagattttaatttaattagttgatattttatagggaatttggatttagttttgttaagtgatttttttaattattttgaaataagtaataatatattaatttattgaatatatttgaaaatgttatttgtttagtattcgaataaatggaggaagttgtttttcgttagggtaaggttgattattatgaggttttcggttattttaaggatcgaaggagttaatattttattgtttttgtaatttatttgtagtatatatatattgtattaattagtaatgtttgaagttgtattaaattaagaaatgtttagagtatagaagaaagtagaataattatttaataaagtttaagtagagtttaggtattagtaaaaaaacgtagttaaataaagtgaaaggttattatttggaaagaatagtgatatattagtttagattttttgggttataaaagataaaattttgagtaaaattagtttaaatgatatagatatttattattttatataataagtttattgataagataatttttaattatagtttattagttttattaagagtttaatttttttttttttattttttagttttttatatgagtaattttttaaagtttagattattatatggttaaaagttggttgtagtaggggaggaagaaggaatttattttttcgtgttttttttttgagagtaggggaaattttttttagaaattttttattagaattttttttaggttttatttattaaaattatattttgtatatttgtagattaattattggaaatgaaaatgaggttataattgagatagagtagaaatggggtttagttttattttatttttattagagtatttttttatgtatttttatcgagtataaaatttatattattattttattgatgttttaatgtttaaattatgttttttatttaaagaattttaggaattaggttgggtataatagtttatatttgtaattttagtattttgggaggttaaggtgggaggattgtttgggtttagaagtttaagattaacgtgtattttatagtaagattttatttttataaaaaattgaaaaattagttaagcgtggtggtttgtgtttttggttttagttatttaggaggttgaggtgggaggattgtttgagtttggaaggtggaggttgtagtaagttaagattatattattgtattttagtttgggtaatagagtgagattttgtttgggaaaaaaaaaaaaaaagattttttagaattggttttaggagatgattaaggttgtggagtgttttaggtagggaaggaa

SEQ ID NO: 1163 - DNA, 6215 bp, Artificial Sequence
  chemically treated genomic DNA (Homo sapiens)
tttattgggattaattaaattatgtggattttatttgtaagtaattttgttaattggttgaatttttttttttttttttttttttttttttgagacggagtttggttttgttatttaggttggagtgtagtggcgtaatttcggtttattgtaagtttcgtttttcggtgaatttttatttttattgttaatagaattaattattttgaattttgattttttgtattttaaagatttatttttttattatattatttttttttatttttttattttgttttagtaattaatattttttattttattatacgtgaatatgtattaaggatattagaatgaaatatttttttattttttagagttaaattttatttttttattttttaggtggtttaaaggaatgggtaattaagttagatatatttaaaagttattatttttggaatttttttatttagtttgtttatatttttttttttttagtttggttttgatatatagataagtgtgtatttaattgtttattttttatatttgggtgaatatttggaagtggtatgtggtagaaggttaggataagtagtagaagggaatataagtatattgttaattttaaggttaatttattttttttttttattttattttaagtaaaaagatttttagttttgtattttattttgttatattttttaattattttttaagtatttttaatgttttaatttaatatttagagtgtatttttttttgtgttatatggtattttgtttttttaattattttttttttatatatttttaattttttattttttaaattttattttttgtgttgttttgtttttaaattatatggaattaaagtatatataattattattttttattaaaaaataagttttgtatgagttttttgagttttaaataaaagaatttatatttgaatttgattgttttgaatgtggtattattgttttggtttttgtaatttagaggttttgttttatggtttcggttttttgttttttatttatgtgaaatgttttataaaaataaatgtatttaataaatattaggaatatagtattataataatttttattttttggttaatgggttagatattgttatttaaagatttgatattgatgggttagaaatttaaaaaaagaattagtaatattttttttttttttttatggtatatattgtagaattgtttacgagaagaaaattttatggttaaaagtgaaattagttgtggattttattaaagtaaaaaaagttgtttgtattttgatgtagtcgtggtttattattattattgttattattattattattttagatttgagtggaaaggaattatggtttttttaattttgtgaataatagttttgttattgaatagggaatataatgtgtggttagattatttttcgtagggtttgtaaatattgtattgtttttaaatgtggtagttatatgtttgttttttagttgatagagttttaagttagagagattttagaggaaatgaaggagagtgaaaattaattaagttttttattagtatgtgtgataaagggtagtgtgttttttttttttggtagtgtgtatatgttttaagaaaataaatattgtatattattattgttttagttagttatttatattttgataagaattttaaagtttgttggagtaaatttggaaaaaaggattaattttatttagttttaaatttttagtgtttacgtgtgtaagttattattatggtatattatatttcggaatatatatatgtgtttaagaaatgtttgtaaaataaataaatatgtattgatttttattattggaaaatatgtagaataagaaaattgtagtttgtagattttaatttatataaaatgtatttaatgttttaaattttaattaaaaaaatttgattaaatattaataattataatgaatatattattattaatgaatcgaaagtaattggaataatttgaatatttataaaaattagagattttaaaattaggaaaaatattttagaaagaatttggttaatttttgaattttaaatataataaaagttagagatagtaaataaattgtttaaagagatatagttttttttttttttattggagtattaggattggaaatagggtattttatttgggatttagtgtaaattttttatttttttattaggggtgttgttttggtttgttattttgatattatgtttggtatagtagaggtttttttttaggaatttgtggttaagtaatagtagttttagatttttttagtttagggaataagttgtttatgggtatatgtagagttttttttagatgagggataattatattttttcgttttttgttttttttgtaatttggtttgtttattgaaattataatttatatatttgtttttttttttttattttattttttttagtgggtttggaggagttgagtagtttaattttaagtattgtagtaagtttgtaaaatgatagttagggatgtttttgatttttatagggagagtgagatgttattgttgatttgttattagtgggaatgtattgaatgtttatttttaagtgtaaattattatgtaagtaatagatttgttaatatattggcgagtttttatgtgatatttttttgtgattaaggatgttgtgtagttatgggtaggggaaatttaatttgatttaaattgaattaaatttattattttgaattgagaataatgtgaattgattaggtgatagaagtagttatattttgtttagtgttagttagtttttttaggtggaaaataatagaaattgattttgattatgtttagttataaaggaatgtatgggggggatgggggggtgggtcggggagtaagaaagaaagaaggaaatgttgaagaattaggttttagaatgtatttatttaaagtagtttgggtgacggggtaggggacggatttatgtagtaagatataatgggtatttttttatttgtttgtttgttttttagatggagttttattttgttgtttaagttggagtgtagtggtggattttcgtttattgtaatttttgttttttgggtttaaggaatttttcgggtttaagtaattttttagttttagtttttagagtagtttgggattatagatatgtgttattatgtttagttaattttttgtttgtttgtttgtttgtttgtatttttagtagagatggggttttgttatgttggttaggttggtttcgaatttttgatttcgaatgataatgattcgttcgttttggttttttaaagtgttaggattataggtgtgagttattgcgttaggtttgggtattttttttagtagtttgaggagtaatatttttgatagtgtttttttgtttaagatttagattttagataaaattaaattatttagagagatggtttgattggttaaatttggattttatgattattttttgaagtgggtaagttttataaatgtttagtttttttattatgtaattgagtggggtgggtgggaagttttttaaaggaaaattcggttgtttttattagaaagaaaaggaaaatggatgtgaggtagttaaaattagtagaggtttattatattattaaaatgtggtgattaaatatggagagatagagattaatagaggtatgtgaatattgaagtatgtttggataatagtttaatgatgagattaataaaatggttattaaaatttggttttgagtagtagtgttaaattagattatttagtaattattttttgttgtaaagtttttagtattgtttaaattttgagtggtatatgaataattcgtttattatgtatttttttttagttagtataatttattttttatttatatttttttttgattatttttatttttttttttttattaaaatttaaattttaaggttgtttttttagtaatttttttgtttagattggaagataaattaaatagtatgcgatgttttattgatttttagtatttaatagaggtgatttaatttttttttaaatttaaagttaaatttttttataagatgaaggagaaaaatgttttataaaatgtatatgtgaagatgttttttgagtgtttttttatgtagatttgttttagtttttaatgaattttttttgtagatattgtggagatgaaagatggttttttatttttatttaaagtataaattaggtcggtattttgaaaaagagataggtttatttatagttgtagcgttagttggttttgttttttgtataattttatttttggttattaaaatatttattgtaggaaataaatttgtaatttattttttatattatttatatatagaaaaataaaatttgatattttggggtttatttgttgagggcgttttttataaaagcgagagagtgtgcgttgggaaatgtgtttggttaatttttttatggataaattttagttataattttttttcgttttttttttatttttagtatttttttaatttttcgatttttcgttttttaagggttggtgatttaatagtattttttttcgtgtatattttggcgtcgttttatggtttggttgttttcgtttgtttgagttttttgaaatttttgtatgttcgttttagattaagttagtgtgttttaggatgtgtgtttcgttttgttttttttttttaacgttttttgtgtaacgtgtttggggggaggagggtagggacgggagagagggaggggtagaggcgaggagttgttcgttttgtacgtttttaatcgtattacgtgaataaatagttgaggggcggtcgggttagaacggtttgtgtaattttgtaaacgtgttagaaagtttaaaatttttttttttttttttattttagatattgttcgtttttcgggattgtcgcgtcgtttttcgttgttttttaggattgagaaaggggaaagggaagggtgttacgttcgagtagtcgttttgattggggaagggtttgaattttatttttggtattgtttggtggagattgagatattcgtgtttcgttcgtttttttggttgaagattttttttttttttacgtgatttgagtttcgtttttattttttgtgagttacgtttttttcgagcggggttaatttggtaaaaggagtgatgcgtttcgtttggatcgtgtttttgttcgggtttttgtagttttgcgcgttagtgtattgcgtttttttcgtcgtcggttaatagtagttttcgcgcgagtcgtcggcggtttcgggcgtttggcgttagtagatttaatgggagaataacgggtaggtgtttagtttgttgagtttgggtttatagtattagttttagcgtcgtcgggattcgggcgtcgtcgtttttggtgtagttaacgttttcgtttagtagtttcgtatttcgattttgttgattcgcgataatcgtatcgtcgcggcgcgaacgcggacggtcggtttatttggagttatcgttggtcgttttaggtttatcgttcgttattggttttaagttggttattcgatatttagagttcgcgaagttggcgtttcgcgcgcggagaattagatagcgtcgggagaagtttttgcgtttagtaatttgcggtcgtttagtcgcgtggacggtatggtgggcgacgatttttataatttttataagtattttgacgataatttttattataattattacgatatttatgaaaggtttagatttgggggtaggtatcggttcggatacggtattggttatttttagtacggtaagtatttttaagttcgttggaagtattcgtgtatttggtttttagttatgtggtttttcgacgtggttgtttgggcgcggcgggtttcggttttcgtagattcgattttttttttacgcgtttgtagtggtagttttggaatttagtgtaaatcgcgcgtttggttttttttgttttttttttatattgttttgtagtttcgggcgtttttagtttttttgttgtttttcgttttattttgtagtttcggtgggcgaagggtgaggagtaagggatttagaggggtagggagttggagcggggggcgtcgggttgttttattgttgcgttcgtcgtttgttgacgtttagg

SEQ ID NO: 1164 - DNA, 6215 bp, Artificial Sequence
  chemically treated genomic DNA (Homo sapiens)
tttaaacgttagtaggcgacgggcgtagtagtgaaataattcggcgtttttcgttttaattttttatttttttaggttttttattttttatttttcgtttatcgggattgtagagtggagcggaggatagtaagagaattggggacgttcgggattgtaaagtaatgtgaaaaggaagtaggaggggttagacgcgcggtttgtattggattttagggttgttattgtaggcgcgtgggggagggatcggatttgcgaggatcggggttcgtcgcgtttaggtagttacgtcgagaagttatatagttggggattaggtgtacgggtgtttttagcggatttgggggtatttatcgtattggaagtagttagtgtcgtattcgggtcggtatttgtttttaggtttgggttttttataagtatcgtagtagttgtaataagggttgtcgttagagtatttgtaggggttgtaagggtcgtcgtttattatgtcgtttacgcggttgggcggtcgtaggttattgagcgtaggaatttttttcggcgttgtttggtttttcgcgcgcgaggcgttagtttcgcgggttttagatgtcgagtagttagtttggaattagtgacgggcggtgggtttggggcggttagcggtgattttagatgagtcggtcgttcgcgttcgcgtcgcggcggtgcggttgtcgcggattagtaggatcggagtgcggggttgttgggcggaggcgttggttgtattagggacggcggcgttcgggtttcggcggcgttgaggttggtattgtgagtttaggtttagtaagttgaatatttgttcgttgtttttttattggatttgttggcgttaggcgttcggagtcgtcggcggttcgcgcgggggttgttgttggtcggcggcgggaggggcgtagtgtattagcgcgtagagttgtaaaggttcgagtaggagtacggtttaggcgaagcgtattattttttttgttagattgatttcgttcgaggaggacgtggtttatagaaaataaaaacggggtttaaattacgtgagggaaggagaaatttttaattaaggaggcgagcggagtacgggtattttagtttttattaagtaatgttaagggtgggatttagatttttttttagttaaggcggttgttcggacgtggtatttttttttttttttttttttagttttggaaggtaacggggagcggcgcggtagtttcggagagcgggtagtgtttggagtgaaggaaggaggagagattttaaattttttggtacgtttgtaaagttatataagtcgttttggttcggtcgttttttagttatttgtttacgtaatgcgattggaaacgtgtaaggcggatagtttttcgtttttgtttttttttttttttcgtttttgtttttttttttttagatacgttgtatagggagcgttaaggggaaagaataaaacggaatatatattttgagatatattggtttaatttggggcgaatatgtaggaattttaaaaaatttagataggcgaaggtagttaggttatggggcgacgttaaaatatgtacgaagaaaaatgttattaggttattagtttttgagaggcgggaagtcgggaggttgggagggtgttgggggtgagaggggggcgggggaggattgtgattaaagtttatttataaaagagttaattagatatattttttaacgtatattttttcgtttttatgggaagcgtttttagtaaataaattttaggatattaaattttgtttttttgtgtgtaggtaatatgagaaatgggttataaatttattttttatagtgaatattttaataattaaaagtgaaattgtatagggaataaagttagttaacgttgtagttatgaataaatttgttttttttttaaaatgtcggtttgatttgtattttgagtagaagtggagaattattttttatttttatagtgtttataaggaagatttattaaagattagaataagtttgtatgagaaagtatttagaaggtatttttatatatgtattttataagatattttttttttttattttataaagaagtttgattttggatttaaaaaaaaattaaattatttttgttaaatattgaaagttagtaaaatatcgtatgttgtttaatttattttttaatttaaataaagaagttgttgaagaaatagttttagagtttagattttggtaaagagaaggaagtaggagtggttagaaaagaatataggtgggggataaattatgttgattggaaagagatatataatggacgagttatttatatattatttagggtttgggtagtgttagaaattttgtaataaaaaatggttattaaatggtttgatttaatattattatttaaaattagattttggtaattattttattggttttattattgggttattgtttagatatattttaatatttatatatttttgttagtttttgtttttttatatttaattattatattttggtggtgtggtggatttttgttgattttgattgttttatatttattttttttttttttttagtaagaataatcggatttttttttgaggggttttttatttattttatttagttgtatagtggaaggattgagtatttatgagatttatttattttaagaagtggttatgagatttaggtttggttaattaagttatttttttagatggtttaattttatttgggatttgaattttgagtagaaggatattgttaaaaatgttgttttttaaattattaaagaaagtgtttaggtttggcgtagtggtttatatttgtaattttagtattttgggaggttaaggcgggcggattattattattcgaggttaggagttcgagattagtttggttaatatggtaaaattttatttttattaaaaatataaataaataaataaataaataaaaaattagttgggtatggtggtatatgtttgtaattttaaattattttggaggttgaggttggagaattgtttgagttcggagaattttttaagtttaggaggtagaggttatagtgagcggagatttattattgtattttaatttgggtaatagagtgagattttatttaaaaaataaataaataaatgaaaaagtgtttattatgttttgttatatggattcgttttttgtttcgttatttaagttattttaggtgagtatattttaagatttggttttttagtattttttttttttttttttatttttcgatttatttttttattttttttatatatttttttgtgattgaatatggttagagttaatttttgttgttttttatttaagaaggttgattgatattgagtagggtgtggttgtttttgttatttaattagtttatattatttttagtttagggtgatgggtttggtttagtttgagttaagttagattttttttgtttatgattgtatagtatttttggttatagggaaatattatatggaagttcgttaatgtgttggtaaatttattatttatatgataatttgtatttgaagatgaatatttaatgtatttttattgatggtaagttaatagtgatattttattttttttataagggttagagatatttttagttgttattttatagatttgttgtagtgtttaaaattaaattatttaatttttttaaatttattaagaaagatggagtgaaaaagaagaaataggtgtatagattataattttaatggataggttaaattataggagaagtaggaaacgaaagaatgtaattattttttatttgaaaaaggttttgtatgtgtttatgaatagtttattttttagattagagaagtttgaaattgttattatttgattataggtttttgagggaagatttttgttatgttagatatagtgttagaatggtagattaaagtagtatttttaatgggagggtagaaagtttatattggattttagataaaatgttttgtttttaattttagtgttttaataaaaaaaaaaaaagttgtgtttttttggatagtttgtttattatttttggtttttgttatatttaggatttaaggattaattaaattttttttaaagtattttttttagttttaaaatttttgatttttgtgaatatttaagttattttaattattttcgatttattgataataatgtgtttattatgattattaatatttaattaaatttttttagttggagtttaaaatattggatgtattttgtgtgagttagaatttgtagattgtaatttttttattttatatattttttaatagtgaaagttaatatatatttatttgttttataaatattttttgaatatatatatatgtttcgaagtgtagtatattataatggtgatttgtatacgtgagtattaaaagtttagagttgaatgaagttgatttttttttttagatttgttttaatagattttaaaatttttattagagtataaataattgattagagtagtaatgatgtgtaatatttatttttttaaaatatgtatatattattaaaagagaaaaatatattattttttgttatatatgttaatgaaaagtttagttgatttttatttttttttattttttttaaaatttttttggtttaggattttgttagttgaaaaataaatatgtggttattatatttggggataatatagtgtttgtaagttttgcgggagataatttagttatatattgtgttttttgtttaataataaaattattatttataaaattggagaaattatagtttttttttatttaaatttgagatgataatgatgatgataataataataataagttacggttatattaagatataaatagttttttttgttttgataagatttatagttgattttatttttgattatgagatttttttttcgtgaataattttgtagtatgtgttataagagaagggaaggaatgttgttaattttttttttgagtttttagtttattaatattaaatttttaaatggtaatgtttggtttattggttaagaaatgaaagttgttgtaatgttatgtttttggtatttgttaaatatatttatttttgtaggatattttatataaatggaaaatagaaagtcgaaattataaagtagggtttttgaattgtagaagttagaatagtaatgttatatttaaagtaattaggtttaagtgtaaatttttttgtttgaggtttaagaagtttatataaagtttgttttttggtaaagagtaatggttgtatgtgttttggttttatgtggtttgaaaataaaatagtatagagaataaaatttaaaaagtggaaagttggagatgtgtaaggggaaaatgattgagaaaatagaatattatataatataaaggagaatatattttgagtgttgaattaggatattgaggatatttaaaaagtaattaagaaatgtaatagagtgaaatatagaattagaaatttttttatttggagtgaaatggaggagaggagtaagttagttttaaagttaatagtgtgtttgtgtttttttttattatttattttagttttttgttatatattatttttaggtatttatttaaatataaaaagtagatagttgggtatatatttgtttgtgtgttaagattaaattgaaaaaaaaaaagtataaataaattgagtagaagaattttagaaataataatttttaaatgtatttggtttggttatttatttttttgggttatttaaggaatggaaaagtggagtttaattttaaggaatagaaaagtattttattttggtgtttttaatgtatgtttacgtgtgatgaagtaaagaatgttagttattgaaataaaatgggaaaatgagaagaggtgatatgataggagaatgggtttttgaagtataggggattagagtttaaagtaattagttttattaataataaaaataagggtttatcgggaggcgaagtttgtagtgagtcgagattgcgttattgtattttagtttgggtgatagagttagatttcgttttaaaaaaaaaaaaaaaaaaaaaaaaaagggtttagttaattggtaaaattgtttataagtaaagtttatatgatttaattggttttaataga

SEQ ID NO: 1165 - DNA, 13814 bp, Artificial Sequence
  chemically treated genomic DNA (Homo sapiens)
  unsure 4518: n is a or g or c or t
ttttatgattttaagattttattttttatagttaggttttggtcggtattatatattaatataatattagacgtttttatttaggtgattttttttttagaaataaggttttattttatatttaggttagagtgtagtggtacgattataatttattgtagttttaaatttttggttttaagtaatttttttgtttttaattttttaagtagttgggattataagtatatattattatgtttagttatttttttttaattttatgtagagatagggttttattatgttatttaggtgggttttaaatatttggtttttagtaattttattttagttttttaaagtgttggtataataggtatgagttattatatttggttttattcgggaagttttaatattaaaaatatttatgtaaaaatgaatttgagtttgattttttttattgatggttttttgaaggagaggtgtttagggttgttgaaaagtttaggataggaagtggaggtgagaggtaaggtgtggtagagtagtttttttattgttgtttggttttaggaagtttttgttgttgtgttagggtggtttagtggtttttatttaggggttttggagttaggtggttttgtgtggttttgtattttggttttgttttgtttttatttgttatgtgatcgtggataaggtaatttttgtgtgttttaagttttttgtttgaaaacggagttgagtggtttttttttcgttggttattgggaggatgaaatgttgttttacgtgaaatgtttgggagagggttttgagtgtagttagtgttggttaatattagttattaggttaattttttttttaattaggttaattttattttttttttgttttttatgaaattatatagaagataaatattaataaaatttgttttaagggagtatttaagaatgaaagagttaagaagttttgtagttattttgtataaaaggttttagaaattttttttaaataaagattttttttatagttatattaaaattaataagatggtttaaataagagatatttgattttaaaaatattaattagtttgttttgtagtgtttattagtgtaatatgagtttattataaatatataagttattttttttttagtgatgggatgtgttgttatttaaaagtttttaaattaaatatttttatttttaggttttttaatattattagggttttttagagggatcgaattattggatagatgtatatatgaaagggagtttgttaaggagaattagttgatatgattagaaggtgaagttttatagtaggtcgtttgcgagttaaggaagaaggaagtttatagtggtttagtttaagtttaaaagttttaaaagtagggaggttaatagtgtattttttagtttgtggttaaaggttcgagagtttatgattaattattggtgtaagtttaagagtttaaaggttaaagaatttggagtttgatgtttaaaggtaggaagtatttagtacgggagaaagatgaaagttagaagatttagtaagttagtttattttatttttcgtttattttgttttattttcgttggtgtttatttagtttgagggtgggtttttttttttcgatttattgatttaaatgttaattttttttggtaaaagttttatagatatatttagaaataatattagttatttaggtattttttaatgtaattaagttgatatttaatattaattattacgaatagtttttttagtttagtgttttaggagtagtgtatattataataagattttttaatattttaaaatgtaggtattagttaaaagaggattaattattttttttaaaatttagtggtgttatttttttgtgaagaggttgtagggaaagggttatagaataaaatggaaatttagattgaatttgtagaaaaagaaggagttgggagaaaattgtagattttttagtatataatggttttatttaaatcgttgtattaagagatttgattaaattttagtttggttattagtagtttaaggttatgattttagtttcgtttaaaatgtttgtttgagaaagttttatgttattaaaatttattttagattaaattaggtgataggtagataggtttttggattttcgtttagaatagttattttaaaaaggttgtaattatatattttttgttttttgagatgtaaagtgattttttagagttgtttttttaagaatttaagagttggttttttgaaatttatttagggaattaatttttgtttttagtttttgtgatagggaatatttgagttgggtttggattattgtaatatttagatttttataggagatgtattgttgttatggtaattttgttttttaataaaggaattgtaggtttaggtttttggtgtttgtttgtttgagtaacgaatgaggtaaagttattatcgggatgattttaaggtaggtagaagatatagcggtgtataggaggtttgattgattttggatatttcgttttagatattttttttatttggtagcggggtgtattttgcgtgtatagtattttttttttacgtttaggtttatttggatgtagagttttttttgggaaaaggggaattgttagaaagagatatttgttttttattcgttattaaatgtaggtttttggggaaaatgatgttagtaagatttgtttttgggttttttaagtagtagaatagttttttcgttgtaatttattgaaagttagttttggatattagggtttgtttatttatatggaggttttaagtatttatgtatttatttttttcgatttttaggatttcggattcggagttatattgtggggcggtagtgattaggtatttttttggtaattcgatttaatgtttcgttttttcgttattttgttaggatgtattttgggttgggataaagttggggagcggtggggatagtagagatggatgggtagttttttgtatttttagggttgattagtagtttgttaggttcggttttttttttgtagtttattaatttttaaagatttatatcgataggtttttgtttgttttaggttaggggtttttattagattgtagttaagggatagtttattgagatagtggattagtttaaggtttcgagttgttgggtcgagattagttgttcggttgttattttagacgagaggttagggttaatttagagaggggtttacggggatttagattggtagcgggggtaaaatagagaattattttttaggtggggtggggtttaaggtttatgggaaaaatgttattgttattagaaatatttatttgtaaatatgaaattatagaaattgtaatatagttttttataatattaaatataaattgtaggggttataaatgataaatttatgtgaaaaataaataaacgtgaatagttatttttatttttttagagatagggttttgttttgttatttagagtaatagttattttggagtgtagtgtcgcgattatggtttatggtagttttttgggtttaagcgatttttttgttttagtttttgagtagttgggattattggtatatgttattatgttcgattgattttaaaatgttttatagagatagggttttattatgttgtttaggttggtttttaatttttggatttaagagaattggttatttttattttttaaagtgttaggattataggtgtgggttattatgttaggtttgaagttatttttgttattgttatttattatgattgtaattatcgttgttatgattattcgttgtcgtagttagagtaataaatacgttgagtatagttttttgtttataaaagggttttattaatgggaggtaacggaggaagtgtttagggtttagaatgtttaattttgtagggtattattgttttttatttatagttggttttggtttagggttttttggaaaaaaaaaaaagttaaggttttttggattgtgggggtcggttttttttaatttattttaattagggagttttaaggtggaggttaggtatacgttgggtatttttcgttagttttgggttaagaaatgtgatttaacgtgagtggagttaaggtcgggtatttttattatttgtgatggtttttgtggatatagattttcgtattttttgttaggaataagttggtggttgtttttatgtaatttatgaaggttatttagatggttagatttgagtttggtgaaatgggggtgggaatgggtcggggttggtgcgaaagggtagttagagggttaaaaattgagattgagtttttagttggaaggtgtaggatgtagtgttaggtgtgagagtgatttacgaggtttatagtaatgagaatatttttgttatttataaataattgtaattaatatatatataattatataagtattataaatatataattttattatatataaattatatataanaggagaggtgtattaaaagtgtcgatttaaatgtaattaaatagttgattttttttttttttggaaaataggggattgttgaggttttaatcgtgaacggatgtaaatttgtgttgggggatagatagggggttttcgggtagagtggaatttttttaagttaagcgattaggagtttaataaagtaaattttttcgtttgtttttttttttttatttcgttggtagggttgatttttataattgtttgtttaaacgtttagaagtgaatttaggtttttttttttaatttatgattttatagttaataggtgatgaggtttatttgtatatttttagttatataagtagttttggcgtgaaaatagtgttagattcgatttttttttttttttttttttaagggaaagttgtttatttttagttgttttgttattttttttaaagggcgatttgtttagcgttaaatcgcggttttagttttttttagttttcggtttagtcggtttattagtcggttcgcgttttgtagtttttttagagggacgcgtttcgagatggagagtaaagttttgttcgtgttgattttggtcgtgtggttttagagtttgatcgtttttcgcggaggggtggtcgtcgtcgatcgtaagttttgcgcgtaaatttttttttatttgtagattcggcgggtggttattgttattcgaattgaggatgagaagaaggaagttggaaggggcggtggatgcgtttagggatttttttagtttgggttttagtttcgaaacggttttcggagtgggatttaggaggggtcgggagggaattttttttcgatcgtgaagcggcggcgtttagttttcgttttttttttttgtcgggttttcgcgttattttttttattttggttgggatcgcgttttcgggttcgtaggtttcgtcggggaggtttcggggtgtgggggtcgggacggcggaggcggggagtaagggttcggttggcggtgatttgtagttatttttttgtcggaggggttttggaatgaaaggcgcgcgggttaaggtgatttcgttttggttggtattgcggtttagttttcgttcggggattcgcgggtcgattgtggttttttttggggaagtcggggcgcggggaggcgtttcgggtattttagtcgtacggggtacgttcgttttcggcggggtttttcgtttcgttgtgggagtggtagtgggtgtcggggtggagaaagtacgcgtggcgcggagttttggggacgcggcgttttattcgttttggggagtttcggattttttttagtttttaggttcgtatgtttttttttttttagtgttttgagaatttagcgaggggttgattttttcgaaatcgtggcgtagttattagtaatttgtggtcgtcgattcggggggttgttaggtttgcgtttggttattttttttgttttgggggttgaggttagtttcgggcgttcggtttcgtcgcgcggttgcgagtacgtggggttgacgggcgtcgcgtggaggtagcgagtataacggtggttatcgtcgttagggaatcgttcgttcgttggggtttaggcgttcggggttaaatgagaatgttttagatttgttcgtaatggaggtagtttgtttaattcgaatttcgatttagtaaatatgtaatagtagtatagagagtagttgaagttatttataatacgggataatattttttttttttttttatgttggaattgtaattagggcggtgtcgtttggatgtgtttttaggcggtacgtttttagcggtttaagttataatagagtttttttatagttttgatggtcgttaaacgtttgttttattttggtattaatttgtgaaatatttttgttaggttaaaaaataaaaagttggtagggagtagtggtttatttatgtagttttagtatttcgggaggtcgaggtcggaagatagtttgagtttagaagttcgaaattagtttgggtaatatagggagatatcgtttttataaaaaaaaaatataaaaattagtcgggcgtggtggtttgtgtttgtggttttagatagttagtaggttgagagattatttgagttagggagttttagtagattgtagtgagttgtgattgttttattgtattttattttgggtgatagtgagattttgttttataaaattaaaataaaataaaataaatattaagtatagattttattaaagtaaaattggataagaaaaaaagtattttttttattggattagtttgaaaatattggagagttgatgagaaagtttttaatattttaggtggggtatgtttcgtatgttttttttcgtattgtttaatgttgataagaagatggtaggagttaattttaaatttttattttagaaagtatattatagaataacgttatttttattgtaaaataagtatcgaaatatgttattatatttaagttttttttaggtttttttataggtttaagattttaaatttttgggagttagtgttatttttttgggtttaggttttttaattttgtaatgagtttggatgaggttaatgttttttgagtttggtgtaatttttgtttttttaagtggatatttatgtgattaattagtttaattgagttgtagttaatatatgttttttttagttgtaaatatattaaggaaggattatttttaagtagattggaaacgatgtttttttattttttttatttttattttatttatttaatatattatgttttttttattatagtaatttttttttttttttttttttagatgtatttatttaggaaggtaagaattttagggagagaaagatgttatcgtggtagaaagatagggattattttttttgggtttttgagtttatttatttattttggattttttttaataagaatatgaggataagaggtattgtttttaggtatttcgttttgggagttattattatttttgtatggttttaattaggaaacgtgaagagttaggagagggagagtatggttagtgtttagtagttgaagttttatttgtttggttatcgtgaatttttaggttgttttttgagttgaatatgatggtaaaggagagtaaaatagtagatgttattgaaggagagtttagcgagggagtgattgattaatagttgtattgaaaggtgggagttaggtacgggggaagagcggcgatggaaaattttcgtttttttttagtagtttatttttaatttagttttttgtttttgttttattatggaggaaaaattgggttatagagtttattgttttatgttagattgtttaagaaaatgttttgtaatttataatattttgtagttagtttttttcgtgattattataaagattgtattgatttaaatatgaagatgttttagttattaaaatgatggttggtgatgattttggattataaagtgtaaggaaagtatttaagatatgagtattatgattttttaaggtttggatgaagagattatttggatttattaataaggtaaattttaatttttatggtaataaaaataataaaaatatttattagtgtaaagttttgggattatttatttattaaatgagtttgttattatagtgaattaaatattttttattaatagagattttttaatttgggagtaaaatttttgttatagtgtttttgttatattttgtttttgtaaaagttgaaggttttaatagtttttgaaggattaataggatagggttttaatttatttagaggttaagagtttgaaatttattttgaacgatgtttgtttattagattgcgtgattgtagtttgttgttttgtggttattttaagattgtttgtgtgtattgatattatttgcgtatttaataataggtatttattaggaaggaaggaatggattattttaggtgttatatatatatgtaagttttgtcggaagtgagtttattaaatttgtgttaatttattttttttgttttttttagtttgtgtttttagaatgattaaatgttatttaagtagtgtggtgattttgattgtttgaatgaataaacgaaaacgttttttattattatttgatagtagaatagaataaagatgatttagttggcgtggttatattgtgtttaatttagttattttgtttatagtatttaatttattttggtgtgtgcgtttatttgtattttcgtaaatgttgaagtttttttttatgtagttaggtaggggtaatattattttggtttggattaatttgagtgtagtataaagtttagagaagtttttaagtagtatgaaaagttagatgttttcggagggatggtggtgaatgtaggtaaatggatttgtatttagagatttttaatagttttttatttaagatatagttattatgatattaataatgtatttttgaaaaaaaattggttgtagaattaattacggtgaaaaatagtataggagttagtatttatattttaattaaaaagaatagcgtttttatgtttatttagttttttttttaataaaataattgttggtaaagtaattatggatttttattgtgttagtttgagataattggatgtttttatttgttatttttagtaataagaagaaagtagttttagattaattaggtaagtattttgtattttatttaaaaaattttgattgaaatatgtttatgtgatgatatttaattaaattattttattaattagtttataagatttttttaaataatgatggtttatttatatttgatggttttatttagtggggtaattttaatatatatttttgaatttattttttaattttttttttttagtagtgtggaaggttagttttaatattggagaaaatttagggtaaaatttagatgatttatataggatttattttttttattttattaataaaataatttttataaaaataaaaagtaggttggtatagtggtttatttttgtaattttagtattttgggaggtcgaggcgggtggattatgaggtcgggagtttaagattagcgtggttaggatggtgaaattttatttttattaaaaatataaaaattagttaggcgtggtggtaggtatttgtaatttcggttattcgggaggttgaggtagagaatggtttgaatttaggaggtataggttgtagtgagttacgatcgtgttattgtattttagtttgggtgatagagtaagatttcgttttaaaaaataataataaaataaaatgaaataaagtaaagttgtatgttagagaagttaagagtattatttacgttagaatatttgaatagattaattaatttagtttgattatgatattgatgtttttttttattaaatcgattatattagtaatttattttgtttttcgatattttatagatattgtttgagtcgataattatgattattagttttagagagtaaatgaattattgaggaagttttgtaggagtgagagaaaaggggggagagagagagaaaggggtggggggataataggagaatagaaattttaaagagaattgtatttttattgagtttttgtattttatgttattgtataaatgtttattttatttacgtgatgattttgatttgtttttaaagtattatttgttgtttttttgggatgtttaatatttttttttttttagtaataagaattattattttttttttttatatatttatttttttttacgtgttttaattttttagtttaatttcgtttttgtgagttattatttatgttagaataaattttttgtttttgtttatatatttagatttgtagttatttatttaggaatttaggaataaagattttatagttaggaaaggtataatttataatttgcgtgttatttaaaatttttttttaagggtttaatatggatatttttgacgaggtttgatgggtaggtggtacggtgatgttaagttaaatttagaatgaaggtttgttttttttttttttttttttttttttttttttttttttttttttttttttttttttttattttttttttttgtatttttttttttttttaattttaaggtggttttaatttttaagggatatggtaaaagatagtttagttggatgagtgtagttattaatattatttttatgtatggaaaataattgtttttttagtaataattgtattaaattagtttatttgttgtttaatagtaattataggatgtattgggataaataaatatattgattgttttatagttatatggtttaagttagttattggagagttgattgaagtttgggaagtatatttattttacgatattgagatattttcggggggttgtaaatataggtagtgtgaaaattattagaatatttaagaaaaggaaagtttgattaagtgtcgataagatttatgatgttatgtttgatatagaattgaaattattatagagtatatagagtggtatatttttttgttaaatgaaaattattttttttaaaagtgaaatgaaagtttttaaatataaatttattagaggatgtgtaaattttttattttttattatatattttggatttaatagagggaaattggagttgttagtgagttatatatgtaatttggtataggatttatggattgaatagatttttttttatggaattatataaagttagttttagttattttaaagaaaatttgtggttattttaaaattattagtaattttagggatattaagttgtataattttaggggaaagtggattaaaagtgaatggtagtttttggagttatattgagtattatttttaaaatgttaatttggtaaataggtggtaagcgagatttgtttgttagattgtttatattatttttgttttaaaaagattgattatagaatatgttaaaataagatttgtggagaggaggtatgagttatttaaggtggaaaggtgtgggagagggtgaaattagttttaaattttttaaagtattttttaataggaaaagaagtttttgggtattgaaggtagaattagattaaaagtatttaatatttttttattattagagaaatagtaaagttattagagtgttttttggttgggaaggaagaaggttattaatatttttaaataaagatgagaagtagagtatatttttggtggatgaatggatttacgtgtatttttattatatgtaaatgaaaagagttttaaagattaatagtttagtaagatttttatttgaataagtgattttggagtgtttatttattgtaataaaatttttttttttataattagaattattaagaaattttttttatattttagatgacggaggtgtgtgtgtacgtgtgtgtgtatgtgtgtgtgattaatttattgtatattttttaaattataatattgtttaaggaattttagaaaataattatttaataggaaaatgttggttaatttttagatatttagataaggttgatttaaatgtttatttttttattgtttttattatgatatttttatttttattattggtttgattttcgtagttattttgaagttatagatttttaaattttgagttgaaaaaaaagagtaaatttagattaaggaatgagaagtagttttcgtagttttatgaattttttgaaatttcgaacggtaaaatttaaaatttataagttattatttttttatagtaaataggtgggtgttatgggtcgttttttttaatttttttatttgaaaaggaattaaatgatttttttttaatataatttttttttgattgtgttttgttttatgaagtttgattttatttgtaatataatttattttaattatttattgtattttatgaagatttagtagtatttataattattgtttatagttttaaaaattaggttgtttttttttttttattaagtttgggattaattatgaagaattaaagtgaatttttttaataataaggtttgttgtggtttttaagttttgtttttgtgtggaatattgtaatgatatagtgggaaaagaaatatttggggagagaattaattatggttgatatatagtacgggtatttttgaataatttattaaattattttttagaatattttgaagtatattttgttataggagtgggaatagttttatataaaagtttttttatgtttttaatttttttttaaaaaatttttttaaaattattttattaaaaatagaggttcggttcgatggtttatattggtaattttagtattttaggaggttgaggtgggtaaattatttgaggttaggagtttgagaatagtttggttaatatggtgaaattttatttttattaaaaatttaaaaattaattaggttcggtggtttatgtttgtaattttagtattttaagaggttgaggcgggtggattatttgagtttaggagatagcgattattttgggtaatatggttaaattttatttttataagaaatataagttagtttggcgtggtggtacgtatttgtggttttagttatttaggaagttgaggtgggaggattatttgagttcgagggtgtagtgaattaagatcgtattattgtatttttttggtttgggatatagaataagattttgttttaaaaaataaaataaaataaaataatttttttttcgttttatatatatataaatagtggaattatagtatataagagttatgtatgagttagtgttttttacgaaagtaagttttaaagtggaattgagagatcgggttttgatttttatttttttattaatattagggtagttttagttaagttatttaaatttatgttttgagagaagatagaattaattaaggaatttttaaatagtagtttttttagttgaaattataaacgtatatatatatattttgattaaggagagttttaagaaaggttggaagatttaggagaggttaatggtgataattttaatttagagttaaggttgtttttttgttaattttgtttaacgttggagtatttgttgtttttttgtaatttatattcgttttcgaaaatattttagaaataaaaatagtattagcggtggttgtttgtgaatttaaaatatattattttaatgaataaaattaagtaattttttagttaattttatatttaattttttttttttaga

SEQ ID NO: 1166 - DNA, 13814 bp, Artificial Sequence
  chemically treated genomic DNA (Homo sapiens)
  unsure 9297: n is a or g or c or t
tttggaaaggaaaaattggatatgaggttaattggagggttgtttgattttatttattggaatgatatgttttaggtttataggtaattatcgttgatgttatttttgtttttgaagtgttttcgaaaacgaatgtggattgtaagagaataatagatgttttaacgttgagtaaagttgatagagagataattttaattttgaattaagattgttattattgattttttttaagttttttagttttttttgaagttttttttagttagggtatgtgtgtgtacgtttgtgattttaattaagggaattgttgtttggggattttttagttaattttgtttttttttaagatatgaatttaagtgatttggttgaggttattttggtattagtgggagggtgaggattagagttcggttttttagttttattttgaagtttgttttcgtggagaatattgatttatgtatggtttttgtgtgttatagttttattatttgtgtgtgtgtggggcggggggggggttgttttgttttgttttgttttttgagatagggttttgttttgtgttttaggttaaaggagtgtagtggtgcgattttggtttattgtattttcgaatttaagtgatttttttattttagttttttgagtagttgggattataggtgcgtgttattacgttaggttaatttgtattttttgtagagatgaagtttggttatgttgtttagggtggtcgttattttttgggtttaagtgatttattcgttttagttttttaaaatgttgggattataggtatgagttatcgggtttggttaatttttggatttttagtagagatgaggttttattatgttggttaggttgtttttaaatttttggttttaagtgatttgtttattttagttttttaaagtgttgggattattagtgtgagttatcgggtcgggtttttatttttaataaaataattttaaaaaaattttttaaagaaaagttggaagtatgaggaggtttttgtatgaaattgtttttatttttatggtaagatatattttaaaatgttttaagaaataatttagtaggttgtttagaaatattcgtgttatgtattagttatggttaattttttttttaaatatttttttttttattatgttattataatgttttatataaaggtaaaatttgaaaattatagtaaattttgttgttgaaagggtttattttggttttttatagttaattttaaatttggtgagaagagaaagataatttagtttttgaaattatggataatagttataaatgttgttgaatttttatggggtatagtgaatagttgaagtaaattatattgtaaataaaattagattttatgaagtagagtataattaaagggaagttatgttaaagggaaattatttaatttttttttaagtaaagaagttaaagaaaacgatttataatatttatttatttattgtaagaaggtaataatttgtagattttagattttgtcgttcgaaattttaggagatttatgaggttgcgaggattattttttattttttaatttaaatttgttttttttttttaatttaaaatttaaaaatttgtaattttaaaataattgcggaagttaggttaataataaaaataagagtgttatagtgagaatagtgaaagaataggtatttgaattagttttatttaaatatttgaggattggttaatatttttttattgagtaattattttttaaaattttttaaataatattgtggtttaagaaatatgtaatgagttgattatatatatatatatatatacgtgtatatatattttcgttatttaaaatgtaggagaaattttttaatgattttaattatgagaaaaggagttttgttataatgggtaaatattttaagattatttatttaaataagagttttgttaaattattgatttttaaagttttttttatttgtatatagtaaaagtatacgtgaatttatttatttattaagaatatgttttattttttatttttatttgaagatgttggtagttttttttttttttaattagaaagtattttagtagttttattatttttttgataatggaagagtattgaatatttttaatttaattttgtttttagtgtttaagaatttttttttttgttaaaaagtgttttagaaaatttaaaattaattttatttttttttatatttttttattttaaatagtttatattttttttttataggttttattttaatatattttatgattaatttttttaaagtagagatgatgtgaataatttggtagatagatttcgtttattatttatttgttaaattgatattttaagaataatgtttagtataattttagaggttgttatttatttttagtttatttttttttagaattatgtaatttggtgtttttggaattgttggtggttttgaaatgattataaattttttttgaaatgattaagattggttttgtgtagttttatgaaaaaaagtttatttaatttatagattttgtattagattgtatgtatggtttattgatagttttaatttttttttgttgggtttagagtatgtaatgaaaagtaggaaatttatatattttttagtaaatttgtatttagagatttttattttatttttaaagaaaatgatttttatttgataggaaaatatattattttatgtgttttgtgatggttttaattttatgttagatatgatattataaattttatcggtatttagttaaatttttttttttttggatgttttgataatttttatattatttgtgtttgtaatttttcgaggatgttttagtgtcgtaagatgaatatgttttttaaattttagttagttttttagtaattgatttagattatgtggttgtggggtagttagtatatttatttgttttaatgtattttgtgattgttattgggtagtaggtgaattgatttgatgtaattgttattaaggaaatagttattttttatatatggaaataatattagtgattgtatttatttaattagattgttttttgttatgttttttagaaattaaggttattttagaattgagaaagaagaggagtataggagggagggatggagggaaggaaggaaggaaggaagaaggggaaggggaaggaaggagggaaggaaaggtaggtttttattttgaatttaatttagtattatcgtattatttgtttattaggtttcgttagaaatgtttatattaagtttttaggggagagttttgggtaatacgtaagttataaattgtgttttttttgattatggaatttttatttttaaatttttaaataaataattataaatttgagtgtgtaaataaagataaagaatttattttaatatagataataatttatagagacgaaattaggttgagaagttaaagtacgtagagaaagataaatgtatagaggggaagagtggtaatttttgttgttagaaagagggaagtgttgagtattttaggaaagtagtagatggtgttttaaaggtagattaaagttattacgtgagtaagatgaatatttatgtaatgatatgaggtataagaatttaatgagaatgtaattttttttggaatttttgtttttttgttatttttttattttttttttttttttttttttttttttttttatttttatagggtttttttagtaatttatttgttttttgagattgatagttatagttatcgatttaggtagtgtttgtaggatatcgaagaataaagtgaattattgatgtggtcgatttggtgaagaaaaatattaatattatgattagattgaattgattggtttgtttagatattttaacgtaagtaatgtttttgatttttttaatatgtagttttattttattttattttattttattattattttttgaaacggagttttgttttgttatttaggttggagtgtagtggtacgatcgtgatttattgtaatttatgttttttgggtttaagttattttttgttttagtttttcgagtagtcgggattataggtgtttgttattacgtttggttaatttttgtatttttagtagagatggggttttattattttggttacgttggttttgaattttcgattttatgatttattcgtttcggttttttaaaatgttgggattataggagtgagttattgtgttagtttattttttatttttataaaagttgttttattaatggaataggaaaaataaattttgtatgaattatttgaattttattttgaattttttttaatattagggttaattttttatattattgaaaaagaggggttaaaaaataggtttagagatgtgtattaaaattgttttattgaatgagattattaagtgtgaataagttattattatttaaggagattttgtggattggttaatgaaataatttggttgagtgttattatataggtatattttagttaagattttttaagtgaaatataaaatatttatttggttaatttgagattattttttttttgttgttgaggatggtaaatggaaatatttagttgttttaaattaatataatgaaagtttatgattattttgttaataattgttttattggagggagggttgaataaatatggggacgttattttttttagttaaaatgtaagtgttaatttttatattgttttttatcgtaattaattttgtagttaatttttttttaaaggtatattattgatgttatgatagttgtattttgaatgaagggttgttgaggatttttaagtgtagatttatttatttatatttattattattttttcgaaagtatttgattttttatgttatttaaaagtttttttaaattttgtattatatttaaattaatttaagttagaatggtattatttttatttgattgtatagaaagagattttaatatttacgaaaatatagatgagcgtatatattaaagtgggttgagtgttgtgagtaaggtggttggattagatatagtgtggttacgttaattgggttatttttgttttattttattgttaaataatggtgggagacgttttcgtttatttatttaaatagttaaaattattatattatttagatagtatttgattattttgagagtatagattgggaagagtaaaaggaatgaattggtataagtttaataggtttattttcggtagaatttatatatatatatagtatttaagataatttatttttttttttttagtagatatttgttgttgagtacgtaaatggtgttagtgtatatagataattttaaaatggttataagatagtaaattgtagttacgtagtttagtgaatagatatcgtttagagtaaattttaaatttttagtttttgagtaagttggaattttattttattagttttttagaaattattggagtttttaatttttgtaaagatagaatgtgataaaagtattgtgataagaattttatttttaggttagaaagtttttgttgataaaaggtatttagtttattgtggtgataaatttatttaatggatagatgattttaaagttttatattgataagtgtttttgttgtttttattgttataaaagttggaatttattttattagtaaatttaaatggtttttttatttagattttaaaaaattatgatatttatgttttgaatattttttttatattttgtgatttaaaattattattaattattattttgatggttggaatatttttatatttaagttaatgtagtttttgtggtggttacggaagaaattagttgtaaaatattgtaagttgtaaggtatttttttgaataatttggtataaggtagtaaattttatggtttaattttttttttataataaagtaagaatagaaagttgagttaaaaataagttgttgaaagaaagcgaaaattttttatcgtcgtttttttttcgtatttgatttttattttttaatatagttattaattaattattttttcgttgagtttttttttagtgatatttgttattttgtttttttttgttattatgtttaatttagaagatagtttggaaatttacgatggttaggtaagtggaattttagttgttaagtattgattatatttttttttttttagttttttacgttttttaattggggttatgtagagatggtggtggtttttaggacgaagtgtttgaggatagtgttttttgtttttatatttttgttagaaagaatttagaatgaataagtaaatttaagagtttagaggaggtgatttttgtttttttattacggtgatatttttttttttttgaaatttttatttttttagatgaatgtatttggaggagaaagagggagaaagttgttgtgatgggagaggtatgatatattgggtgagtagagtgaaagtggaggggatgggagggtatcgtttttagtttatttggaaataatttttttttaatatatttatagttaggaaaagtatgtgttggttataatttaattaaattaattaattatataagtgtttatttaaagaggtaagagttatattaggtttagagaatattggttttatttaaatttattgtagagttgaggaatttaaatttagagaggtgatattgatttttaagaatttaggattttgaatttgtaagggagtttaggaaaaatttgaatgtgatgatatatttcggtgtttgttttgtaatgaaaatgacgttattttatggtgtgttttttgaaataagaatttggagttggtttttattatttttttgttagtattaagtagtacgaagggaaatatacgaaatatattttatttaagatgttgaagatttttttattaattttttagtgtttttaaattgatttaatagaaaagatatttttttttttatttaattttgttttgatggaatttatatttagtgtttgttttgttttgttttaattttatgagatagggttttattgttatttaggatgaagtgtagtggggtaattatagtttattgtagtttattgaaattttttggtttaagtgattttttagtttgttgattatttgggattataggtataggttattacgttcggttaatttttgtattttttttttatagagacggtgtttttttatgttgtttaggttgatttcgaatttttgggtttaagttgtttttcggtttcggtttttcgaagtgttgggattatatgggtgagttattgttttttgttaattttttgttttttaatttaataaaaatgttttataaattaatgttaaaataaaataaacgtttagcggttattaaagttatggagagattttattataatttgaatcgttggggacgtgtcgtttgagagtatatttaagcgatatcgttttaattgtaattttagtatggaagaaaaaaggaaatgttgtttcgtgttatgaatggttttagttgttttttatgttgttgttgtatgtttattgaatcgaggttcgaattaagtaggttgtttttattgcggataggtttgagatatttttatttggtttcgaacgtttggattttagcgagcgggcggttttttggcggcggtgattatcgttgtgttcgttgtttttacgcggcgttcgttaattttacgtgttcgtagtcgcgcggcggggtcgggcgttcggagttgattttagtttttaggatagaaagggtggttaaacgtagatttggtaatttttcgagtcggcgattatagattgttggtggttgcgttacggtttcgggagggttagtttttcgttgggtttttagggtattaagaaaagaggggtatgcgagtttggaagttggagagagttcggggttttttagagcgggtgggacgtcgcgtttttaggatttcgcgttacgcgtattttttttatttcgatatttattgttatttttatagcggagcgaggggtttcgtcgagggcgagcgtatttcgtgcggttgagatgttcggaacgttttttcgcgtttcggtttttttagaaggggttatagtcggttcgcgagttttcgggcgggggttgagtcgtagtgttaattaaggcgaggttattttggttcgcgcgttttttattttagggttttttcggtagagaggtgattgtaggttatcgttagtcgggtttttatttttcgttttcgtcgtttcggtttttatatttcggaattttttcggcggagtttgcgagttcgggaacgcggttttagttagagtggaagggatagcgcgggaattcggtagagagaaaaagcgggaattgggcgtcgtcgttttacgatcgggaggagattttttttcggttttttttggattttatttcggggatcgtttcggggttagagtttaggttgggagagtttttgggcgtatttatcgttttttttaatttttttttttttatttttagttcgggtggtagtggttattcgtcgggtttgtaggtggaggggagtttgcgcgtaaaatttacggtcggcggcggttattttttcgcgggaggcggttagattttggagttatacggttagagttagtacgagtagggttttgttttttatttcggggcgcgtttttttggaggagttgtaaggcgcggatcgattgatgagtcggttgagtcggaggttggagagggttggagtcgcggtttggcgttgagtaagtcgttttttaaaggggatggtagggtagttagaagtgggtagtttttttttgaggaggaggaagagggggaatcgagtttgatattgtttttacgttaaggttgtttatgtgattggaaatatgtaaataaattttattatttattggttataaaattataagttggggggagggatttaaatttatttttaaacgtttgagtaaatagttatgaggattaattttgttaacgagatgagggggaaagggtagacggaaaaatttgttttgttaggtttttggtcgtttagtttaagggggttttattttattcgggggttttttgtttattttttaatataggtttatattcgtttacggttaaaattttaataattttttgttttttaaggaggggaaaggttagttgtttaattatatttggatcggtatttttaatatattttttttnttatatatagtttatgtataataaagttatatatttatagtatttatataattatatatgtattaattataattgtttataaataataaaaatatttttattattataaatttcgtgagttatttttatatttgatattgtattttgtattttttagttgaggatttagttttagtttttaattttttagttgttttttcgtattaatttcggtttatttttatttttattttattaggtttaggtttggttatttgggtgatttttatggattatataaaagtagttattagtttgtttttggtaagggatgcgaaagtttgtgtttatagaagttattataggtggtgaggatattcggttttggttttatttacgttgggttatattttttggtttaaggttggcggagagtgtttagcgtgtgtttggtttttattttggagttttttggttggaatgggttggagggggtcgatttttatagtttaggaggttttgatttttttttttttttagagggttttgggttagggttagttatgggtgggggatagtggtgttttgtaagattggatattttgagttttgaatatttttttcgttgttttttattggtggaatttttttgtggatagagagttgtatttagcgtgtttattgttttagttacgataacgaataattataatagcgatagttataattatgatgagtgatagtgataaaaataattttaggtttggtatagtggtttatatttataattttagtattttaagaggtagaggtggttagtttttttgaatttaggagttggagattagtttgggtaatatggtgaaattttgtttttataaaatattttaaaattagtcgggtataatggtatgtgttagtggttttagttatttagaagttgaggtaggaggatcgtttaagtttaggaggttgttatgagttatggtcgcggtattgtattttagggtgattgttattttgggtgatagagtaagattttgtttttaaaaaaataaaaataattgtttacgtttatttgttttttatatggatttattatttataatttttataatttatatttaatgttatagaagattgtattataatttttgtgattttatatttatagataaatatttttaataataataatattttttttataaattttgggttttattttatttgaggaatgattttttgttttattttcgttgttagtttgggttttcgtgggtttttttttaggttggttttagtttttcgtttaaggtggtagtcggataattggtttcgatttagtagttcgaggttttgagttagtttattgttttaatgggttgttttttggttatagtttaatggggatttttggtttaaggtaggtaggggtttatcgatgtgagtttttggaggttgatggattgtagaagagagatcgagtttggtagattgttggttaattttgaggatgtagggggttatttatttatttttgttatttttatcgttttttaattttgttttagtttagggtgtattttggtagggtggcgaggaggcggggtattgagtcgggttgttaggagggtatttgattattgtcgttttatagtgtggtttcgggttcgaagttttagggatcgagagggatagatgtatagatgtttggagtttttatatgggtggataaattttggtgtttaggattgatttttaatggattgtagcgagggagttgttttgttgtttaggaaatttagaggtaggttttattagtattattttttttaggaatttgtatttggtgacgagtgaggggtaggtgtttttttttggtagtttttttttttttaggagggattttatatttagatggatttaagcgtaggaggaggatgttgtgtacgtagggtgtatttcgttgttaggtgaggggaatgtttgggacgagatatttaaggttagttaagttttttatgtatcgttgtattttttgtttgttttaaggttatttcgatggtagttttgttttattcgttatttagataagtagatattaaaagtttgagtttgtagtttttttgttagggagtaggattgttatggtaatagtatattttttgtaggagtttaaatgttatagtggtttaaatttagtttaaatgttttttgttatagggattgggagtaagagttgattttttgaatggattttaaaaagttagtttttgggtttttgagaaaatagttttgggggattattttgtattttaaagggtaaaggatgtgtaattgtaatttttttaaagtaattattttaagcgagagtttaggggtttatttgtttattatttggtttggtttggaataaattttggtagtatggagtttttttaggtaggtattttaagcgggattggggttatggttttaagttgttggtagttaagttagagtttggttaggttttttagtgtagcgatttggatggagttattatgtgttgagaggtttgtagtttttttttagttttttttttttttgtaaatttagtttgagtttttattttattttgtggttttttttttgtagtttttttatagagaagtggtattattgaattttaaaaaagatggttaatttttttttagttagtatttatattttggggtattagaaagttttgttgtgatgtgtattgtttttgaaatattgagttgaggaagttgttcgtgatggttaatattaggtgttaatttgattgtattgaaggatgtttagatagttggtattgtttttgggtgtgtttgtgaggtttttgttagaggagattaatatttgagttaatggatcgggagagaaagatttatttttaagttgggtagatattagcgagggtagaataaagtaggcggaaggtgggataagttgatttgttgagttttttggtttttatttttttttcgtgttggatgttttttgtttttggatattagattttaggttttttggtttttggatttttggatttatattagtggttggttatgggttttcgggtttttggttatagattgaaggatgtattgttggtttttttgtttttgaggtttttggatttggattgagttattgtgggttttttttttttttggttcgtagacggtttgttgtggagttttattttttgattatgttagttaattttttttaataaatttttttttatatatatatttatttaatagttcggtttttttgaagaattttaatagtgttagaaaatttaaaggtgagagtgtttaatttgggagtttttaggtggtagtatattttattattaaaaaaaggatagtttatatatttgtaataaatttatattatattaataaatattgtaaaataagttagttgatatttttgagattagatgttttttatttaaattattttattgattttaatatagttataaaaaggatttttatttagaaaagatttttaagattttttatgtagagtaattgtaaaattttttagtttttttatttttaaatatttttttgaaataaattttattgatgtttgttttttgtataattttatgaagagtaaaaggaaaataaaattagtttaattaaaaaaaaaattagtttaatagttaatgttggttagtattaattatatttaaggtttttttttaagtattttacgtggagtaatattttatttttttaataattagcgaggggaggattatttagtttcgtttttagataaagagtttgaggtatatagaagttattttgtttacggttatatagtaagtaagggtagggtaaagttaggatgtaaagttatataaggttatttggttttaaagtttttgggtagaaattattgggttattttggtatagtagtagggattttttggagttagatagtaatggggaggttgttttgttatattttgttttttatttttattttttgttttgggttttttagtagttttgagtattttttttttaggggattattagtgggagaggttaggtttaaatttatttttatataaatgtttttggtgttaaaatttttcgaatgaggttaggtatggtggtttatgtttgttatattaatattttgggaggttgaggtgggattgttggaggttagatgtttgagatttatttgagtaatatagtgagattttgtttttatataaaattaaaaaaaaatagttgagtatggtggtgtatatttgtagttttagttatttgggaggttggaggtaggaggattgtttgaggttaggagtttgaggttgtagtgagttatgatcgtgttattgtattttaatttgggtgtagagtgagattttgtttttaaaaaagagattatttgaatgaaaacgtttaatattatgttgatatgtaatatcgattaaagtttaattatggaaaataaaattttaaggttatggaa

SEQ ID NO: 1167 - DNA, 14861 bp, Artificial Sequence
  chemically treated genomic DNA (Homo sapiens)
  unsure 4370..4371: n is a or g or c or t
ttttttagttttagtaggaatttttgtatttagtttgggattagggggattgggagtggagtgataagaaatattttttgataggtaaattggtatttagattttgttattttaaaggaggaagttaatttatagtgagaagtaaggggtggagttgaagagatggaagggagttattttttggattttttttagtaagaggtgtaggtttgaggtcgggaggtaagagtatgaataggagattggagggagagaacgattagttttaattaaagatttgttatttagggtagtgaggtaagaggaattaatatgaaagttggttttaaagttttgtttttgtagttttttattttttttgtttataattgtttataggtggtagttattgtttgtgttagttgttggttaggtattaaattttttttttttttaaattagttaagtttaaatatgttagtttttatttaaaggaagaaggagtaaataaaggagtaaaggagaaagagtaaatgaatttagggagataatgaagaggtttagagttttagagtttttattttttttttaagttgagggatttagattttcgaataataaagagaggttgtaagtaaatgtgttttatgtttgaatgagtaatagttagggttttaattacggttaaaaatttaattagcggaggttagttataatttgttttagtttttgtttaagattttatgttttttttttttttttttggttttttttagggttttattggaagtgttttttttttttgggttttttttttgatatttaagagtttagttttatgtcgtaggatttttgtattttttgggtatattattcggataggatttttttttatgtttttatttagtttatgtatgattattgtgtgttttagttttcgatgtttttttgatttaattttgttaatttgggagattagtttaaagttttttttgattttttaagtttcggattgttttttttttttttgaagttttatagtaatttgtttatattcgtttttgtattatagttatttgtatggaaaatagtttttttttttagatattgagtttttataaggtaggattttaggttttatatttttttttattagttaatatttattgagtgtttatttagtgtttggaattgttttaggtattgggatataatagtgaataaagtttttatttttattggatttatattttattgtagggtggagaaggggattaattatataagtaaataaatatatagtgtgatgttagataatggtatttgttgtgatgtaaagaagtagattttgaggtaggaatgagtggtagtatattttagagatattaaaaagttagggtgagtaaaaattagttgggtatggtggcgtatgtttgtaattttagttattttagaggttgagataggagaatcgtttgaattcgggaggtggaggttgtagtgagttaagatcgtattattgtattttagtttgggtgatagagtaagattgtttaaaaaagaagaaaaaaaaagggtggttagaattatttgagtaggaagagagaggattagagagtaggtcggggtagattatgatgggttttgtaggttgtggtaaggagtgaaatggaatattattggagaatttatatagaagaatagtataatatgatgttttaaaaatttaatatagtttattattttgaaagtttttttaatttatagaaaagttgaaaaaagatataattaatatttgtatattgtatgttttttatttaaatgtattaattgataatgttaatattttgtattatttgtgtgttttgatatatatatatatgtgtgtatataaatatatgtatatatatatttatataaatttttgttattttattattttaaagtaggttatagatattatgatattttattttaaaatgttagtatgttttttttaagaattggaatatttttttatataattataattttattattatatttaagaaaattaatattatttatttaatagcgatttatttttagatttttttatatgttttttataaatttttaaatatgttttttgaagttttatttttttttttttaggatttaattaagttttatttatggtaattgattttttagtttgttttaatttagaataaggatttttaagtttttgtttttgtttttttttttgagatagggttttgttttgtcgtttaggttggagtgtagtgttattattatagtttattgtagttttgttcgttttttgggtttaagcgatttttttattttagttttttaagtagttgggattataggtatgagttattatatttatttaatttttaaattttttttgtagagtttaggttttattatgttgtttagattggttataaatttttgggtttaagtaatattttcgttttagttttttaaagtgttaggattataggagtgagttattttgtttggttaaggttttatattttatagagtatttagtaatttgtttgtttatggtatagaattattgaagatataaaaaatgatttgatttttggtatttttaaatgtttggaatttttatgaaaaagttttattaagatattaggttaaaaaatttaaatagaaagaggtagaatatatagtatattgttgttaattgtaggaattatttaagtttattgtagtttttattgtaggtttagtgggtttggtgggtttgggatttgggtttgtgaaggtttttaagattggagtttttagtttttagtttgattttatttattaataatttaataaatatgtttaagtatttgttataattttttttgttttaattaatgtggagtttttgaaggtttttttttttttattgtttgttttagaattagaaagttttgtttttttttatgtagtttttttgtttttaggtttgtttagggttatgggttgtttaagtttttattgatgaggggtagttttaggtagtggttaaaagttttagagttaaatagtttgtaatttagttttattatttatagttgtggaattttcggtaagttatttaatttttttgagttttggttttttaattataaaatgggagaaagaaaagagtttattttatagggttattgaaagtattagagttaatgtatgtaaagagtttaatgtatagtagatgtttaaaagataatgggtaaggtcgggtgtagtggtttatatttgtaattttagtattttgggaggttaaggcgagtgaattatttgagtttaggagtttgagattagtttgggtaatatggtgaaattatatttttattaaaaatataaaaaattagttaggcgtggtggtatgtgtttgtggttttagttattggggaggtcgaggttgaaggatggtttgagttcgggagatggaggttgtagtgagtcgagattatgtttgttgtattttagtttgggcgagagagtaagattttattttaaaaaagaaataggttgggcgtagtggtttatatttgtaattttagtattttgggaggtcgagatgggcgggttatttgaggttaggagtttaagattagtttggttaatatggtgaaattttgtttttattaaaaatataaaaattagttgggtatggtggcgtatgtttgtaattttagtttaggaggttgaggtaggataattatttgaatttgggaggcggaggttgtagtgagttgagatcgcgttattgtattttagtttgggtgataagagtgaaattttgttttaaaaaataaataaataaataaataaaaattaaaaaaatgagaatggatattagtattagttatagttaaggtagtggtaaattggaatatttagaaatattgggggaattagtgtttagtgttcgtaggtttttgtgggggtgtgatttattgagattttggtttaaatttagtagtttttgggttgataattagtagttgtttgataatatatagatgaaagaaaaggaagaagaagggtagttaggagataatagttttttggtgttagttttggtttatttagtatttttttatttgtttatttgtggagtagttttgtgtcgggggttgggtggtttggtaggattaaggaattggttaggatcgttgtttgttttttttatatattggtgttgtcggtgtttttgtaaagagagaaatcgagtggaggggatttaggaaggttgtagttatttagttttagttttttgataaaggttttgggagggtttaggggagttgaggggaggggttgagagttattaattttagtttaggtgatagatnntattattgtatttttttcgcggattggcggtttttgtttttatttcgggtagaggaggtatttttagggtttttttagaaaatcgagtttcggtttagattattgagtttcggacgttttcggagggagtttgaaattttagagtatgatattgagttttaaaggggagtcgtttagtttttcgtttattgtttaattttattttcgattttttttgttttttggagtattagggaggagggtttagttaggggagagggcgttttaggttttaaattagttagcgagttttcgggatttttatttttggatcgttttttagaatttcgaattttgtcgcgggttcgcgtcgttttttttcgggtagcgcgttaaatcggcgtatgcgtatttattggattgtcgcgtagttttttttttttttatttattaatttttttttttttttcgttttttttttttttttttttttaattcgtttttttttttttttttattagtttttttttcggtattttagttcggggaatagcggtgcgagttttaggtttatgtattgaggaggcggaaataaggggagtttttagagttttattaagttttttttaaaggtttttttattcggtttacgttttttatttttttttttcgtttttttttaattgtgtatttttgtagtcggaggcggtttcgagatggggttgtgagtttcgttcggggagggggaaagagtagcgaggagtgaagcgggggggtggggtgaagggtttggatttcggggtagggggcgtattttcgttagtaggttttttttaaggggttcggaattttatttttttatttacgtttttggtgcgttttgtcgaaggaaagaataagaatagagaaggaggagggggaaaggaggaaaagggggattttttaattggggggggtgaaggagagaagtagtaggattagaggggaaggggttgttgtttgtattagtttatattatgttgatttcgtcgttgtttttgttgttgtttttgtttttagttttggtcgcggcggttatcgacggtgagtgagatttcgcgttttttttggatttttgggggtattttttttttagtttttatttttgtatacggatggggaagggagacgcgggagggggtgttttttgttattttagtttagttgatatagtagcggttcgattgggggcggggatggggttcgatttgggggatgggggttttgggtaaatgatgttttcggggttttttagtataaataaagattagaggtttgggtagagagaagagggttttttatttttttgattttggggaggagaggttttttttttttatttttgttcggggagggttttcgttttttttatatttttataattttttattttttatttgaattgtgaaggaattcggatttgtaatgttcggttgtaaaagggggtgggggtggggggggtggtttttgtattggtttttgtagttcgaaaggggagttaggttaggggtattttgtcgggtagagggtaggtaggttcgggaaggttgtgggtggggagagggagggttttttgtttgggcgtggaatcgattttagagtttcggttggaggtttgggtgttgaagtaggttttttttttttttagggtttttgttagtagtttggggtagggttgtgttggggggtagagagggggagttcgttatattatgtgattttgaatttttttttttaatttttgggagttttgagatgaaaaaacgttagatgttattattggggaaggggattggagaatggtttggaatgttggggtaggagggtgggggaggttgttttttttttgatttttggttttattatagtttggattggaaggagagttggaggttggatggggattatggttgtgtttttatatttttttagtaaatttgtttattttttgtatttttttaagtttaaaattttatatatatatattttgtatattgtagagttaggtttaggttagaattgtatttttttggggaaatggggtgttttttttttttttttttgttagttgttttttttttttatttgtgagttattggtttaagttttgtttaagttttaagtattaagttggggttatggggttgggttgggttaggtttttgatttgagaaggggtgggattttatttttttttgttattttagtttttttatttaaagataaaattgggttggatattattatatatttttttttttgttttgttagattgggattgggaaagtttttttttgaaattagattatttttttttttttttttaatttgttttaattgggggaggagatttatagggttaggaagtagttgtgtttttaaaaatatatttagtgttttttagttgtgttattttggggattttttattttttatttttattttattaattagttgtttcggaggaggagaggggttttttttgaatattttttagatgtcgtatagtcggtttttgtttataatttttgttattattatgtgttttttttttgtttttagttttgtgaggtgagaagggaaatcgaggtagggagattggggttgtagtcgtttttgggaggaatagaaaaaaaatttgagagagagagagatttattaggagttttttgaaggagggtggttagagttaggtagaagtaagagggtttttgtggagagtagggaaggttaggaagggattttagatagtattatttttagggttttaaaggagttttatttgttatattaagttagtggaagagagagattggatatgttttttttaattatttttttatttttttttaaaatgtttatttacgttttttttgtatttttagtttagattaaattatttaaagttttaggagaggatttttttttaaatatatattaatatttttgttttgggagtgggaatataaataattagttttattttatttttgggtatagggtggtgagaaaggggaattgtatagaaatgtaagtttaattttatttagaggtagtttaggggattttttatttttaatttttgtttttttgttttagggtttattaatattgaatttttttgtttattttttagagaatggagatgatttagtttatttgatttagtatgttattttttttttgttattatagttttgttgttttttttttagggtagtaattttaggggtttttttattttttttgtttttttttttatgtttgaaattgtttttggggttttttgttttttggggagtaacgttattttttattagcgataaaattgagtgtatttgttgttggagaggttgtagaaagatggggtggagaatgggattattgagggttttgttgagattggggaatattttttagtggggagggtatttttagataaatatagtttatagaataaggttgatttttttttttttttttttttgatttttttttatatatttttttgagtcggtatattattagttattagagtaggtatagtggaagtgagttatgaagttggggtgttagttttttggatttttgagagaaagttttaaatttttttttttttgattagatttatattttaaacgtttttttttgtttcgttgttttttaaagtaagaatgtgtaagaaatttattttggggttggagggatattttgatgtttagggttgttttattagatattttttttttttgattttgtttttttttttttttttatttttttaattatttttttattattgagttttttaaaggatgatagtttaggttttggttagagttagtttttgtttagatgtttttattttttaaaattttttttttattttttgggaagtttttttttatttaagtttatttttttttttttttgttgtagtgtgagtttttgtatattagaatttttaagtttaggtttattttcgtttagtattttttttttagggttttttttattttttagattttttattttttaggttttttagttttgcgtgtgggtttattgtttttggggtatttgggtgtagttgaatggtattgtaggaaggtttttgatttggtagtgttgggtatgagcgatagagaatttgttttttttttttgttttagattttagtttggttagtaggattttgtattgtttggagaaggaagtagttggttttggagtgttttcggtgtaatggttttaggtattaatataaattttttttgggaaagaggtgaggggtatatgtggagagttgttttttttgtttttttaggggagatgaaagttttttttttttttattaggttttagtttttttggttgaagagttttattttttttttttttttttatttttttgattttaggggtggtagtggtttttattttgggttttttttgagttaggtattgtttagggtcgagattttgtttttttaagataggatagattttgtttttattttattttaggtttagcggggtagttattttttgggtttattttaggataattgtgttatttttttggtaatttttggattgagttttttttttggtttttttggttgtttgtttgtttttttgtttgtttgttattagtgtgcgttgttttggttttttagaatttttttgttttttatttttttagtttattttttattgtcgaatttttgtgatattttttgttttgttttttgcgtttttgttatttgttttatttttttttgtttgtttttatttatttttatttaggttttttggtattttaaaagttttttgggagtaagagtttttttgggtttttttatttattttttggtttttttttttttgttttggttatttttttttttttttggttagatttagtgtttagtttagtattaaaagttttttttttattttttttcgattttttttttttttttttttttttattaatttggggaatgggttttggagagaatgtttttggaagaaaggaatttgatattttttgtgggttaagagggagaaaggaggtattttagaaggaaggagggaggttagatttttggtagaatttttttttgattaggagtttaagaattggagaaagatgtaaggagtgagttaagaatttggagtttttattttggtgagtataagttgtgtgtgtggttggggtggggggagaaggagaggaggtttagaaatgtttggtgagtgatatggtgatttttggaggttttttgggggtttggtttttatttgtggggaaaggaaaagttggtgggggaggttacgggttaggttaatgttttgttgtattaatattgatttagaatggaagcggagatttttttttttttttggttgtttaagttattttgtttgtttgtttgtttaggtcgtaaagtagaggtttagatttaggaatgataaaaatgtgtttgagttttaggaaagagttattgggtaatatttaaaatataaaaaatttagtgaaaatttttcggtttgggtttgggaggtttttgttgttttatttttataaggtcgaaaatttagatttttgtaggttttgttttcgcgtcgtttttttattttatttttcgtattttgagtattttttttttattttgtttttttagttatattatgtggttttttttagagaattttttttttatttagtttagaggggagtttatttttttttttgttgtgtttatttttaaaaagggttttaagagtttttgttatgtttttgtagtttttgagtttttttgttttttaagaagtatttttaaggttttagtttttttttttgttttcgtttttttaagggggtattaaaggatgggttttttttttttggagaagatttttttagggttggatttcgttgttattttttttggttaggtatttttattttatttttttatttttaaggttttagaatgggatatagaatgatagttaagggttaagtagggtagtggggtttgtgttgtgtttggacgtatatttaattttatattttttgttttggttttagtttggtggttttggggatcgtggttgggttgggtgtttgggtttgggggggtggggtagggtgttggttaagttagtatggtagttatatttatttttaggtaaagtcgagaatagacggtttttgtgttttggtgttttttttttaaattcgtttttttttttttttttttagattttttttttttttttttttgtttgtttttttttttttttgttttatttttgtttttttttgttttttttatgttttttttttttttttgaggagttttgaaggttattttttaaaattttttttttattgttagggttagagaacgatagcgttttttttgtaattttttttttttgttttttgtttttgttttgttttgtttttgagatatagttttattttattatttagattgaaatgtaatggcgtgatttttgtttattgcgattttcgttttttgttaatttttgtatttttagtagagatagggttttattatgttgtttaggttggttttaaatttttgattttaagtgattcgtttattttcgtttttattttttaaagtgttggtattatagacgggagttattgcgtttatttggttttttttttttttttttttttttttttttttgagatggaatttcgttttgttgtttaggttggagtgtagtggcgcgattttagtttattgtaagtttcgttttttttggtttacgttatttttttgttttagttttttgagtagttgggattataggcgtttgttattacgtttagttaattttttatatttttagtagagacggggttttatcgcgttagttaggatggtttcgattttttgatattatgatttgtttgtttcggttttttaaagtattgggattataggtatgagttattatgttcggtttggtttttttttttaattcggttgtattttatgatttatgaggaaattatttgtttagttattagttattttgtgttttagtttttttatgtgtgagaggggggtcgtaagggtatttattttatagggttatagtatttaagtgagttaatagttatcgtatttttaattagtggttggtggttagtaaggtgaaaaaggttagtttttatcggttagggagattttcgggtttttttatgcgggttaggaggcggggaaggttttagttgtttttgattttagggtaatgttgtttttttatttaaattgtaggttataaaggtgggttttttgggtgttggatttagatatagaaggttttgttgaggggagtggggttggttttttttttaagtagattataagggttttatttcgtttttaatttagtttttttttagttttgagtgaggttttttttggttgtgtagattgttttaaagtagtttatttgttttttttttttttttttttttgaaggaaattaaagataggttttagttttttcgttttagatttttgggttttttaatattagttttgataggaagtttttttacgtatttttttgtaatttttgtgttggttaggttttcgggagatgtggttttttttttcggtgttgttgtgggataggggtttggggttttttttttttttttatttgttttattttttattttttttttgtaagagtatatttggtttgtgaattttttttattttagtttttggagtttgttagttgttgttttttttgtggagtttaggttaaaaatgggggtgggggatagcgggggggatttagtgagggttaaaggagggggtattatggttgggatgtggaatggaggggaggttaggtgattattcggtgattttaggtcgtggttgtgcgttttgtttttgggaggagtagggtatggattaagttttaggtgggtggtacgggggtttgtttttgggttttaaatattttatttgtttttgagttttattttagtttttttttttttttttagtcggttacggttggttaggggaagcggacggtttttcggtatgttaattaggttggcgggttgtgtttttcgggaagattttatagttggtttagtggggtaatgaatttagtattatttatttttttaaggggtttttattttaggtttagggtgggggttaggggagggaggttgaagggggagtttggttaggttatttttgatgtgttttttgaattcggttattttggttaggggtttgagtgtcgttttttttgttagcggtgggggttaggagggaagatattttagtgaggtttttattagatttttttttttttaagagtttttttttttcgttattttttttatatttttgtttttgttttgtatttgtattagttgggtatagttgtttttttaggcgattttggtttttgtagggtagagggttattttattttttttggtattttgatgtttagtgtagtgtttggtatagagttggtttttagtgtgtgttagtagaatagaaatgtgatggtatagtttgaggaaaagttacgaaaggttaggagattgggagtttagttttgggtgggggagaaggggtgggtgattgttttttttgtggaggatgtggtgatagaggttgggaggagtgggaattcggaggattggtgtggattttattggtttagagtttggagttagtttagttggttttgttatttgttagttatttgattttggttaagttatttggtttaatttttttatttgtgaaatggtggtattagttgtttttatttgttatattgtggagggaattaaatatgatgatatatggaaaaaattgttttattatagtttttggtatatattgagtttataataagagttagttgttagtcgggtgcggtggtttacgtttgtaattttagtattttgggaggttgagatggatgtattagatgaggttgggagttcgagattagtttgattaatatggagaaatttcgtttttattaaaaatataaaattagttatgcgtggtggcgtatgtttgtaattttagttattttggaggttgaggtagaagaattatttgaattcgggaggtaggggttgtagtgagttaagatcgtgttattgtattttagtttgggtaataagagtaaaattttgttttaaaaaaaaaaaaaaaataatagagttagttgttattatttttaatttttttttgggggatgagggaagagaatggggtaggagtggaagaagtttgattggggtgggagggtagggttaagaggttttgaatatagtagttaattagttggattggattgaaattagtttttagagtttattttagttatttttttgtttttgttttttaattttgatattttgaaaatttttaggtgttttttaattttaaggatgtttattgaaagtttttttgaggtttaattaagggaggttgtgtttttagagaatggagaggataaggtaggtggattatttgaggttaggagtttgagattagtatggttaatatggtgaaatttcgtttttattaaaaatataaaaattagttggatatggtgatgtatgtttgtagttttagttattggggaggtcgaggtaggagaatcgtttgggtttaggaggtggaggttgcggtgagttgagattgtgttattgtattttagtttgggggatagagtgagattttgttttaaaaaaaaaaaaaatagggaatggaaatggaagtaaggttttttattttgtttatttttgtttagttttgtttttttgtgtttttgttaatattatttttaattattattgtgtgtgttaagggtatttttttttattgtttttatttgggggtttagtgattaggggttgggaaggatggggtgatgggttaggggattaggagtgttttagaaggtagggaagtagagaggttagataagattagttcggggtttttagtagtaggagttagaggaagataaagagaaaatatgttaaggtttaaatgtatttttttttattattattttgttattaaagttagggggtgttggtgtttgatgagagtaattaagaatagtaaaggttttgattttgatttttaggaataggtagtttagaggatttggaggggtgtagtaaaatgtgtttttggattttttttatttttatcgtagatatatagtgtttaggaattatttaaagttattttttgatatttttaggtatatagattatggttgagggtttgggttagatggagattgatgttagggaaggaagagtagtattaggggattttgggtttatagagttggtttttattttttatttatatttttttttttttttttgttttagt

SEQ ID NO: 1168 - DNA, 14861 bp, Artificial Sequence
  chemically treated genomic DNA (Homo sapiens)
  unsure 10491..10492: n is a or g or c or t
gttagggtaaggaaagaaaaggggatataaatgaaggatggaggttaattttgtgaatttaaagttttttagtattgtttttttttttttagtattagtttttatttggtttagatttttagttatggtttatgtgtttgggggtgttagggggtggttttgggtagtttttagatattgtgtatttgcggtgggggtggggaggatttagaagtatattttattgtatttttttaagttttttaggttgtttgtttttgggagttagggttaaagtttttgttatttttggttatttttattagatattagtattttttggttttgatgatagagtgatggtgaaggggggtgtatttaggttttgatatgttttttttttgtttttttttaatttttattattagaggtttcgagttggttttatttaatttttttgtttttttgttttttgggatatttttggttttttgatttattattttattttttttaatttttaattattaggtttttagatgggagtagtggggagggatgtttttggtatatatagtagtagttggagatggtattagtagaggtataggagggtaaggttgggtaggaatgggtagggtagagagttttgtttttatttttattttttattttttttttttttgagataaggttttattttgttttttaggttggagtgtagtggtataattttagtttatcgtaatttttattttttgggtttaggcgatttttttgtttcggtttttttagtggttggaattatagatatgtattattatgtttagttagtttttgtatttttagtagagacggggttttattatgttggttatgttggttttaaatttttgattttaggtgatttatttgttttgttttttttattttttaaagatatagttttttttggttagattttagggagatttttagtagatatttttagagttaagaagtatttaaagatttttaagatattagaattggggagtagaggtagggggatggttgaaatgaattttaggaattggttttagtttagtttaattagttagttattatatttaggattttttggttttatttttttattttaattaggttttttttatttttattttattttttttttttattttttaaggaggaattaagaatggtgataattaattttgttgttttttttttttttttgagatagagttttgtttttgttgtttaggttggagtgtaatggtacgattttggtttattgtaatttttgtttttcgggtttaagtgatttttttgttttagtttttagagtagttgggattataggtatgcgttattacgtatggttaattttgtatttttagtagagacggggtttttttatgttggttaggttggtttcgaatttttaattttatttgatatatttattttagttttttaaagtgttgggattataggcgtgagttatcgtattcggttgataattaatttttattgtgggtttagtatgtgttaggaattgtggtaaagtagttttttttatgtattattatatttaattttttttatagtatgataaatagggataattaatattattattttatagatgaagaaattgagttaggtgatttggttagggttaaatagttggtaagtgataaaattagttaagttgattttaagttttgaattagtgaaatttatattagtttttcgaatttttattttttttaatttttattattatattttttataggaggaatagttatttatttttttttttttatttaaggttgagtttttagttttttggtttttcgtggtttttttttagattgtgttattatatttttattttgttggtatatattgaaggttagttttatgttaggtattgtattaggtattagggtgttaaggagggtgagatgattttttgttttgtaggagttagagtcgtttgagaagatagttgtatttaattaatgtaaatgtagggtagagatagaagtataaggaaaatggcggggggggggggtttttaggagggagggagtttgatgggagttttattgagatgtttttttttttaatttttatcgttggtaggggagacggtatttaggtttttggttaaaatgatcgagtttaggaaatatattaaggatggtttagttaggttttttttttagttttttttttttggtttttattttgagtttggaataaaggttttttgaggaggtggataatgttgagtttattgttttattgggttagttgtgaggttttttcgggaaatatagttcgttagtttagttagtatgtcggagaatcgttcgttttttttgattagtcgtggtcggttgagggggaagaggggggttggaatgggatttagaggtagatgagatgtttggagtttagaaatagattttcgtgttatttatttgggatttggtttatgttttgttttttttaggggtagagcgtatagttacggtttgaggttatcgggtggttatttaattttttttttattttatattttagttatggtgtttttttttttagtttttattgagtttttttcgttgttttttatttttatttttggtttgaattttatagaggaaatagtagttggtaaattttaaaagttggaatgagagagatttataaattagatgtgtttttgtagggaggggatgggggatgggataagtgaaaggaagaggagggttttaggtttttattttatagtagtatcgggggagggggttatatttttcgagggtttggttagtataaggattgtagagagatacgtgaaagaattttttgttagggttggtgttgaagggtttaggaatttggagcgagaaggttgaggtttgtttttgattttttttagggggagagggaagaaagaaataaataaattattttgggatagtttatatagttaagggaagttttatttagagttgggagagagttgagttgggagcggggtaggatttttataatttgtttagagggaaagttaattttattttttttagtagagttttttgtgtttgaatttagtatttagaaaatttatttttgtggtttgtagtttagatgagagaataatattgttttaaggttaaaagtaattaaggtttttttcgttttttggttcgtatgagagaattcggaggtttttttgatcgatgggagttaattttttttattttgttaattattagttattgattggaaatacggtgattattaatttatttagatattataattttgtgaggtgggtgtttttgcggttttttttttatatatgggggagttgaggtatagggtgattggtaattgagtaggtggtttttttataggttatgggatgtagtcgggttaagaaaggaaattaggtcgggtatggtggtttatgtttgtaattttagtattttgggaggtcgaagtaggtagattatgatgttaggagatcgagattattttggttaacgcggtgaaatttcgtttttattaaaaatatgaaaaattagttgggcgtggtggtaggcgtttgtagttttagttatttaggaggttgaggtaggagaatggcgtgaattaggggaggcggagtttgtagtgaattgagatcgcgttattgtattttagtttgggtaatagagcgagattttattttaaaagaaaaaaaaaagaaagaaagaaaggaaattagatgggcgtagtggttttcgtttgtagtattagtattttgggaggtggaggcggagatgggcggattatttgaggttaagagtttgagattagtttgggtaatatggtgaaattttgtttttattaaaaatataaaaattagtaggaggcggaggtcgtagtgagtagagattacgttattgtattttagtttgggtgatggagtgagattgtgttttaaaaataaaataaaataaaaataaaaaataaggaagggaaattgtagggagaacgttgtcgttttttggttttggtagtggggagaggattttaaggggtggtttttagggttttttagagaggagggaagggtataggggagatagagaggagtaagaatgggatagaagaaggggaagataggtaggagaagaagaaggagagatttagagaggaaggagagagagcgagtttggaggaagaatattaggatataggggtcgtttgttttcggttttgtttgaagatgaatgtgattgttatgttaatttggttaatattttgttttatttttttaaatttaggtatttagtttagttacggtttttagggttattaagttggagttagggtaggaggtgtagagttgggtgtgcgtttagatataatatagattttattgttttgtttgatttttggttgttattttgtgttttattttgggattttgggggtggggaagtggggtgagaatgtttggttagagagggtgatagcgaagtttaattttgaaggagttttttttagaggaggggaatttattttttgatatttttttgagggagcgagagtaaggaagagagttaagattttagaggtgttttttaaaggataaggagatttagggattgtaaaagtatgatagggatttttggggttttttttaagagtggatatagtagaaggagagataggtttttttttgagttaggtgagaggggggttttttaaagggaattatatgatatagttaagggaatagagtgggaggaggatgtttaaggtgcggggggtggggtgggggggcggcgcggggatagagtttgtaggaatttgaattttcgattttatgggggtggggtagtaagggttttttaaatttaaatcgagaggtttttattgaattttttgtattttgggtgttgtttagtggtttttttttgaggtttagatatatttttgttatttttgagtttgggtttttgttttgcggtttggatagatagatagatagggtggtttggatagttaggggaggggaagggttttcgtttttattttgagttaatattgatgtagtaggatattagtttgattcgtgattttttttattagttttttttttttttataaataaaagttagatttttagaaggtttttagaggttattatattatttattaggtatttttaagttttttttttttttttttttattttagttatatatatagtttatgtttattagagtaaaagttttaagtttttgatttattttttatatttttttttagtttttaggtttttggttaggaggaagttttgttagaagtttaatttttttttttttttttgaaatatttttttttttttttttagtttataaagggtattaagttttttttttttagaaatattttttttaaaatttattttttaaattagtggagggggaagaagaaagaggaagtcggaggaaagtggagaggaaatttttggtgttgaattggatattgggtttggttaggaagggggaaaaatagttaaaatagaggggagggagttagggggtgagtgggaaagtttagagagatttttgtttttaagaagtttttgggatattaagaggtttggatgggggtaaatggagataggtagagaaaaataagataagtgatagagacgtagaaagtagggtagagaatgttataaaggttcggtagtaagagatgaattgagagggtgagagatagagaggttttaaaaagttaagatagcgtatattaatgatagatagatagaaagatagatagatagttagaaaagttaggaagggggtttagtttagagattgttaaggggatgatatagttgttttgggatgaatttagagaatgattatttcgttgagtttagagtagggtgggagtaagatttgttttattttggagagatagagtttcggttttaggtagtgtttgatttaagggagatttagaatagggattattattatttttggagttaggagggtagaaaggagggaggaaaatggagttttttagttagggaagttaaggtttggtgggagagggagaggtttttattttttttaggggagtaagagggataattttttatatatattttttattttttttttagggagggtttatattggtgtttgaggttattgtatcggaaatattttaaagttaattgtttttttttttaaataatgtaggattttgttaattaggttgaaatttgggatagaagagggaggtaggttttttatcgtttatatttagtattattaagttaggggtttttttgtagtattatttagttgtatttagatgttttaagagtaatgagtttatacgtagagttggaggatttgaaaggtaaagagtttgaggagtgaggaggattttgagaagagagtattgggcgggaataaatttaggtttgggggttttgatgtgtaagggtttatattgtagtaggaggaaagagagatagatttgagtaaggaagggttttttaaaaggtaaggaaggggttttgaagaatgggggtatttggataggaattgattttggttaggatttgggttgttattttttgggaggtttagtggtggaagggtggttgagaaaatgaagagaggagagagaataagattagaagaaaaagatgtttagtgaagtagttttaaatattaaaatatttttttaattttaaaatgaattttttatatatttttgttttaaaagataacgaggtaaagggagacgtttaggatgtgagtttgattagggagaaaggagtttagaatttttttttagggatttaggaagttaatattttagttttataatttatttttattgtatttattttagtaattggtaatatgtcggtttaagggggtgtgtggaggaaggttaggaaaaagggagggaggaagttagttttattttgtgagttgtatttgtttgggggtgttttttttattagaaaatgttttttaattttagtagggtttttaatagttttattttttattttatttttttgtaatttttttagtagtaggtatatttaattttgtcgttagtggggagtgacgttattttttaaagggtaggggattttagaggtagttttaggtatagaagagaaagtagaagaggtgggaaagtttttaggattgttgttttggagagaaagtagtaaggttgtgatagtaggaggaaggtaatatattaagttaggtgagttgggttatttttattttttggaaagtaaataagaaagtttaatgttgatggattttgaggtaagagggtaggggttagggataagggattttttaggttgtttttggatagagttgaatttatatttttatgtaattttttttttttattattttgtatttaagagtggggtggagttgattatttatatttttatttttaaggtagaaatattggtgtgtgtttggggaggggtttttttttggggttttggatagtttgatttgagttggagatatagagggggcgtgggtgaatattttaagaaagggtagggagatagttaaggagaatatgtttagttttttttttttattaatttggtgtggtaaatagaatttttttagagttttgggagtgatgttatttggggtttttttttgattttttttgttttttatagaaatttttttgtttttgtttaattttagttatttttttttaaggggtttttgatgggttttttttttttttaaattttttttttattttttttagaagcggttgtaattttaatttttttgtttcgatttttttttttattttatagggttgagaataagagaaaaatatatgataatgataggagttataggtagaagtcggttgtgcggtatttggaggatatttaggaaaagttttttttttttttcggggtagttaattggtggggtgggggtggggggtagagagtttttaagatggtataattgagggatattaaatatgtttttggggatatagttgttttttgattttgtaagtttttttttttaattgaagtaagttagggagagggagggagataatttggttttagagaaaaatttttttaattttaatttggtaagatagaggagggggtgtatgatggtatttagtttagttttgtttttggatgagagggttaagatgataggaggggatgagattttatttttttttaaattagggatttagtttagtttaattttatgattttagtttaatgtttaaagtttgggtaagatttgaattagtgatttataagtaggagaaaaaaatagttgataaaaaaagggaagagaggtattttatttttttaaaaggatgtagttttagtttaagtttaattttgtaatatataaagtgtgtgtgtatggggttttgggtttggaggggtgtagggaataaatagatttattaaaggagtgtgggggtatagttataatttttatttaatttttaattttttttttaatttaaattgtgatgaagttagaagttaggaagaaggtagttttttttatttttttattttagtattttaggttattttttagtttttttttttagtgatgatatttgacgtttttttattttaaagtttttaggaattaagaaggaaaatttaaagttatatagtatggcgagttttttttttttgttttttaatatagttttattttaggttattgatagaggttttgagagggggaagagtttattttagtatttaggtttttagtcggggttttggggtcgattttacgtttaagtagggggttttttttttttttatttatagttttttcgggtttgtttgttttttgttcggtagggtatttttggtttggtttttttttcgagttatagaggttagtgtaaaagttattttttttatttttatttttttttgtagtcgaatattgtaaattcggatttttttataatttagatggggggtggggggttgtgaggatgtaggggaggcggaggtttttttcgaatagagataggaaaagaaggttttttttttttaggattagaaaaatggggagtttttttttttttatttaggtttttggtttttgtttgtgttggggggtttcggaagtattatttgtttagggtttttattttttaaatcggattttattttcgtttttagtcgggtcgttgttgtgttagttggattgggataataaaaggtattttttttcgcgttttttttttttattcgtatgtaggagtgggggttggggagagggtgtttttaggggtttaagggggacgcggaattttatttatcgtcgatagtcgtcgcgattagagttgagagtaggggtagtagtaggagtaacggcggggttagtatggtgtgggttgatgtaagtagtagtttttttttttttggttttgttattttttttttttattttttttagttggggggtttttttttttttttttttttttttttttttttttgtttttattttttttttcggtaaagcgtattaggggcgtgggtgaagaggtagagtttcgagttttttggggagggtttgttgacgggggtgcgttttttgtttcgaaatttaaattttttattttattttttcgttttatttttcgttgtttttttttttttttcgggcgaagtttatagttttatttcggagtcgttttcggttgtaaaaatgtataattgggaggaggcggggagggggggtggggggcgtggatcgggtaggggagtttttggagggggtttgatggagttttgggggttttttttgttttcgtttttttagtgtatgggtttggagttcgtatcgttgtttttcggattgaagtgtcgaggggggggttgatgggggagagggaggggacgggttgaggagggagggagggaaggggcggggaaagaaaaaaggttggtgggtggggggagaaagagttacgcggtaatttagtgagtgcgtatgcgtcgatttgacgcgttgttcgggggagggcgacgcggattcgcgatagggttcggagttttggaaagcggtttaagagtgagggtttcggggattcgttggttagtttggggtttggggcgtttttttttttggttgggtttttttttttggtgttttagagagtagaaggggtcgagggtgggattgggtagtgggcggagagttgagcggtttttttttgaaatttagtgttatattttaggattttaggtttttttcgggggcgttcgggatttagtggtttgggtcgaggttcgattttttaggggaattttgaaggtgttttttttgttcggggtggggatagggatcgttagttcgcggggaaggtgtagtaatgnngtttgttatttgggttgggattggtgatttttagtttttttttttagtttttttagatttttttagagtttttattagggagttgggattgagtgattgtagtttttttagattttttttattcggtttttttttttgtaggagtatcggtagtattagtgtgtgaggagagtaggtagcggttttagttagttttttgattttgttagattatttagttttcggtatagagttgttttataggtaggtaagtgggagaatgttggatggattagagttggtattagggggttgttattttttgattgttttttttttttttttttttttatttgtgtattgttaggtagttattaattgttaatttagaagttgttgggtttagattagggttttaataaattatatttttatagaagtttgcgggtattgggtattgatttttttagtgtttttgagtattttagtttgttattgttttgattgtaattaatgttagtatttatttttatttttttaatttttatttatttatttatttattttttgagatagagttttatttttgttatttaggttggagtataatggcgcgattttagtttattgtaattttcgttttttaggtttaagtgattattttgttttagttttttgagttgggattataggtatgcgttattatgtttagttaatttttgtatttttagtagagatagagttttattatgttggttaggttggttttgaatttttgattttaagtgattcgtttatttcggttttttaaagtgttaggattataggtgtgagttattgcgtttagtttattttttttttgagatggaattttgttttttcgtttaggttggaatgtagtaagtatgatttcggtttattgtaatttttatttttcgggtttaagttattttttagtttcggtttttttagtagttgagattataggtatatgttattacgtttggttaattttttatatttttggtaaagatgtggttttattatgttgtttaggttggttttaaatttttgagtttaagtgatttattcgttttggttttttaaagtgttaggattataggtgtgagttattgtattcggttttatttattattttttgaatatttattatgtattaagttttttatatgtattaattttaatatttttaataattttgtgaggtaggttttttttttttttttattttgtagttaaaaagttaaggtttagagaggttaaataatttgtcgggggttttatagttgtaagtggtaaagttgggttataaattatttgattttagagtttttaattattgtttaagattgttttttattaatagaggtttgggtaatttatggttttaggtagatttgggggtaggagggttgtataggaaagggtagaattttttagttttagaataaataataaaaagaagaaagtttttagaggttttatattaattggaataaaggggattatgatagatgtttaggtatgtttgttgaattattaataaataaaattagattagggattggggattttagttttggaggtttttataggtttagattttaaatttattaaatttattagatttgtagtggaagttataatgagtttggatagtttttgtagttaatagtaatatattatgtattttgtttttttttatttaaattttttaatttgatattttagtaaaatttttttataaaaattttagatatttggaagtgttaaaaattaagttattttttatatttttagtaattttgtgttataaataaataggttgttaggtgttttatgggatgtaaaattttggttaggtaaggtgatttatttttgtaattttagtattttgggaggttgaggcgggaatattgtttgagtttaggaatttgtgattagtttgggtaatatagtgagatttagattttataaaaaaaatttaaaaattaggtgggtgtggtggtttatatttgtagttttagttatttggaaggttgaggtgggaggatcgtttgagtttaggaggcgggtaaggttgtagtgagttgtgatggtggtattgtattttagtttgggcgatagagtaaaattttgttttaaaaaaagaggtaaaaataaaaatttaagaatttttgttttagattggggtagattaaagagttagttgttatggatgaagtttgattggattttggaaaaggaaaaataaagttttaaaggatatgtttagaagtttataaaggatatgtagagaaatttgagagtggatcgttgttggatgagtgatgttgatttttttaggtgtggtgatggagttatgattgtgtaagagaatgttttagtttttgggagaggtatgttgatattttagggtaaaatgttatgatatttataatttattttaggatggtagggtagtaaggatttgtgtaaatgtgtatatgtatgtatttatatgtatatatatgtgtgtgtgttagagtatatagatagtgtaaggtgttaatattattagttggtgtatttagatgaggaatatatagtatatagatgttaattgtatttttttttaatttttttgtaagttaaaaaaatttttaaaataataagttatattgaatttttaaaatattatattatgttatttttttgtataaattttttaatggtgttttattttattttttattatagtttataaggtttattatgatttgtttcgatttattttttgattttttttttttttgtttaagtgattttggttattttttttttttttttttttttagatagttttgttttgttatttaagttggagtgtagtggtgcgattttggtttattgtaatttttatttttcgggtttaagcgatttttttgttttaatttttagagtagttgggattataggtatgcgttattatgtttagttaatttttgtttattttggttttttaatgtttttggaatatgttgttatttatttttgttttagggtttatttttttgtattatagtagatgttattatttgatattatattatatatttatttgtttgtgtagttggtttttttttttattttatagtagaatgtaagtttagtgaaaatgaagattttgtttattgttatgttttagtatttagaatagttttaggtattaagtagatatttaataaatgttgattagtgaaaaaaaatgtgagatttgggattttgttttataaggatttagtgtttagaaaagggagttgttttttatgtaaataattgtagtataaagacgagtgtaggtaaattgttatggggttttaaagaaaggagaggtaattcggggtttggggaattagggagggttttgagttgattttttaggttggtagagttgagttaagagagtatcgagagttaaggtatatagtgattatgtatgggttgggtaggggtatgggaaagagttttgttcgggtggtgtgtttagggaatgtaggggttttgcgatatgaggttgggtttttaagtgttagggaggaaatttaggagagaaaagtatttttagtgaaattttgggaaaggttagagagaaggaggaagagtatgggattttggatagaggttggagtaaattgtaattgattttcgttgattggatttttgatcgtggttaggattttgattattgtttatttagatatgagatatatttgtttatagtttttttttgttgttcgagggtttggattttttagtttaagagaggaatgggggttttgaagttttgggtttttttattgtttttttgaatttatttgtttttttttttttgtttttttatttgttttttttttttttgaatggaggttgatatgtttggatttgattgatttgagaggaggggaaatttggtatttagttaatagttgatatagatagtggttgttatttgtaggtaattgtgaatagaaggaatagaaagttataggagtaaaattttgagattagtttttatattggttttttttattttattgttttgggtagtaggtttttggttggaattaatcgttttttttttttagttttttatttatgtttttatttttcggttttaagtttgtattttttgttgaaaaagatttaagaggtgatttttttttatttttttagttttattttttgttttttattgtgggttaatttttttttttgaagtggtaggatttgggtgttagtttgtttgttaggaagtgttttttattattttatttttaatttttttggttttaaattaggtatagaaatttttattggggttgaagaa

SEQ ID NO: 1169 - DNA, 6183 bp, Artificial Sequence
  chemically treated genomic DNA (Homo sapiens)
ggaggtttttttttttttttattgattggaatagttttagaaggaatggtattagtttttttttgtatttttggtagaatttggttgtgaattaatttggttttggattttttttggttggtaggttattaattattgttttaattttagagtttgttattggtttatttagggatttaatttttttttggtttagttttgggagggttatttacgtattttaattttatttttaaggttgcgaaagtacgtagtatatgttcgaagaattaagtggaggttagggtggttgaattgttaagtaaagtttgagatattgttaaaggtttaattatgtaagggtttgtaggttatgttaaaaattttttattttattgtggaaaaatggaaaagtgattgaaaggttgtaattaggtaagtgtatggttggtataatgattaaaaaagattattttggttgtagagggagaagaattttgagaaggttatgggaatataataaatgtgataagtgttgggttgagggaagtaaagagagttttgagggtatgtatatttgattttttttataatattttttagagatattttttttttagtttaagatttattttagggttatgtattgtatatttttaaattgtatattttagtttttttttattttttatgattttgttatttttgaagtatataaaatatattgtaaatattgtattttagtatttaaatgttttttagtttggatattttaaaaaatgagaaaatattggtttgattgatgtttttttatgtttagatttggggtatgtatagtaatattatagaagtgttgttgtgttttttagagtgtgttatattaggaggaatatgatgttagtttgttttatattagttttgattgttgtgttgattttgattttttggtttaatgtagagtttattgtatttattatatttttagtttttataaatataatgttttaatatatataggggagagagagataggtttttattggagtgtagtgatgtgattatagtttattgtagtttttaatttttaggtttaagttttaagtgatttttttgttttaattttttaatgtgttgggattataggtataaattattgtgttgggtttaaattttatgtttaatatttgttttgtatgtatatgttatatatattttgttttagataatttgttaatatgtttgatatattagttattttgttttgattttttgtttgttttataaatataaattagttagttttaaatttgtttattttgttttgtttgtttttttaggtggaaattatagtaaaggagtttgtttatatttttttttttgttttttgtttttttgtgtggttttttgaggtaagatgtgtatttttttttttgggatttgtgaatataataaattatatttttaatggtagttattttttggtttgttgattttattatatttaaataataatgaaatatattaaaatatttgatatatttttttgtttaaagttattttttttttttttaatgaataagtaatttgtggggagatattttaaatttttttggttgagatgtatatgagaaatatattttatatggcgatatagtgtgtgtgtgtgtgtgtgtgtgtgtgtgtgtgtgtattggtttgggttttattttgttgagtttgaggttttaggatattggattggagttgtttagggggtagttggtttttaggaggaaatttaggaggtatttaggaggaaatatatatatatatatatatatatatatatatagaaatagtagtgttataaagttatatatattttttttatatgaaagttattttggtttttatgttgttatattttatttgaatataatttttgttttgatttgttaaattgattttattattttttaaaaagtaattatttttgtttgtaagtattagtttgatagaattattaagttgaattgtttggttgttaaatggaaagtagatgggagggggtaaaattgatagtaaggagtttattttaaggttttttttataatttagattgatgagtggattgataaatttgaggtaatagaattttatgattgattggtaatgggggtggaaaaaagaaggagttaagaatgatgtaaattttagtttggtttttggggtaatggtggtgttgaagttttttggttttatttttatttgtttttttcggttgattgttttgaaaagttttatatatatatatggagagagaaatgtgaaaattaaagaaattatttttttgtattatagagaaatattgttggtttaaattgtaattgaattaatttgggtttttttagatattggtttatagatttaattattttaatttagtaataggtatttttaggtatggatgttagagataaatacgtgtatggtgtaggttgtttttaaacgttacgaattggggattgtattgagaaaatgggttattttagtggaaaagtgtgtgggtttatatatagagtgttgcgaatgatgggttgtgtttcgttaggtggttttttatttttattttttttttgtttttttatttttcgtttttttttttttttttttttttttttgcgttattttgggattaacggcggggtcggttttatatataaacgtagttggttagtacggttagtttgagttttgttgtgtaattacgttaggaattttagtaagttggtaatattggagtataaagataataataattgaggaattttttagtatagaaaggaatgtttggagttttggttgttatagtgaaagggtatatatatatatatatatatatatatatatatatatatatatatatatatatatatacgttcgcgtttgcgcgtttacgggcgtattggagggagtttagtttttttcgtattcgcgtttttttttttcgttagtcggcggtcgttttttgtaagtcggaggtgcggggacgtttattgattatgtagcgcggttttagcgggcgtcggatcggtttgatttcggcgcggtttcgtattatcgtttcggtcgttcggaatcggtataaattattcgcgaagattggagtgtagtattaagttttttcgtcgttttttttttttcgtttcggttcggtcgttttttttttttttagatttcggtttttttgtttttagttttgtttttttcgcgtcgtatagcgtttaatattatgtagggaggtaaatagagaattagtgattttggttagagtatagatttttggattttttaatttaggaattttttttatttttttttataacgttgttcgttttatttttttttttttaagtttaagttttttttttttgtgtttatttatttttttttgtttttttaaagtaatatttatttttttttttttttagtttttatatttaaagttgcgtttattattgtagtttacggaagttacgcgattcggattgttggggttagtagagtttcggacgatttgtgtttcggggaaaggggttggtagtaattggtaggttttcgtttttggggaagggaggtagcgggaatttgtttagcgattacgtgcgtttagggttgttttttttatgcgttacggttttttcgttggagggaaagggtttttgattttttggattaggattcggagtttgggattagttgtcgcgttggtttaggggttggagttggagatgatgggatggttttaggttcgtaaatagtttttttttatatagggtttttattatcgggaaataatttgtattaattttttttttttatttttttttgtgggttttgatgttacgtataggttgaggacgtgcgttgagggcgggtgtaaggttatttgtgtttttggttttcgggttttttgttagtttgtttaaagcggttttaaagaagggaggttaggggttttttgaatttttcgtgttttttttttttataaaagggtatcggaattatggagaagacgttcgtttttttttaattttgttttaaaatgagtagatttgtaagaagtacgatttggttatgatatttgtagatgtggtgttgaataattgttaaataaggatttaatttttttaataaagatttatttttttttttaatttgtaaaaatataaagtattttattttagtagtttgtattttattaggggaaattaagatattcgaaggagtttagagagattaggttaggaatgaaggttatagatttttatttagtaggttttttatttttttttttttttattttcgttttttttttttttttttttttttttttatttttatttgtttggttgtgttttttttttttattttttatttttttttttttttttttatttttgattttttttttcgtttatttttttttattgtttatttagtaaaattgcgttcgtgtagattttttcgtgagtcgtttcgtcggtttttgtgcggggtaaattttgcggagaggcgagggtagcgcgtgtgtacgtgtgagtgtgtttgtgagagtgtgcgtataggagtgtgtttttgtatgtacgcgtaaaggggattgtgtatgtcggcgttgaagtgtgattgtggaatgtgcgcgcgtgtgtgattggcgtgtatgagtgaatttgtgttagttggtgtgatatttaggagtgtatgcgtttgtatgagtgcgtgtgtgagtgtgtatacgtttgtgtgagtgtttttgtgtgagtacgcgtgtgttcgagtgtttattttttttcgcgttgtaaagtgtagggggcgggtcgggcggtagggggtttgttcgttggattttcgtatgtttgtttcggggcggtcgggtttaaagggttttatgtattgtttggagggtggggattggcgcgggtagaaaacgggatgtttcgggcgtgggggtaggtttttggttattaggagttggcggaggtgtagatttaaaggagcgttcgttagtagaggcgttgtcggtgcggtgtgttacgcgcgtttatttttcggggaaggaacggcgaggtcggggatcgtcgcggagatggatcgcgggtcggtagtagtggcgtgtacgttgtttttggttttcgtcgtttgtttagcgtcggttagtggttaaggtaagagtttagttagagtttttcgtggagtttttattttttcggttgtggtagggtcgggttcgcgggaggtcggaggggagagcgttcgggtaggggttagggtcgggcggcggcgcgggagttgttttcggtggggcgtttaggttgtttcgcgaagtcggagcgggagcgttttttttcgttcgttaggaattgagcggtagtaaatttgagaaagtagtttcgttagtttcggtgatagcgtattttacggagattttgtttttgtttttacgggcgttggttcgatgtttttggaaagtattttgcgggagaacgaggtttttcgtcgtttgtagtttgttttttttagcggagttttttgttgggcggcgcggtttcgggttttgtttagagcgtagttttttatttgtagcgtttttttcgggattttttcgcgcgtttagggtcgcgggttagagtattttttttattatcggcgaaatttggtttcgcggtgatttttagagatcgtttttattatatagattatttacgagttaagataaggtcgggaggtgggattggtcgagagagtggttgagggattggagtttttttttgaagtttttttttttagttgggagttgggggtttttgtgttgatgaatggggttcgtttgtatggttagagttttggggatcgaatgtagaaagtttttagtatgaagtgttttaaattttttttaagttgttcgatagtttatgttttaatagaaatagagaagagggaaagagagggagaaagaagcggagagaataaaattagtaagaagggaagaggagagagcgtaagagaagtaaataggaataaggaaagaaggagggaagagaacgattggggcgggagaagagagagagagaggagagagaggagagagatagagagagagagagagagggagagagagagagagagagagagagatagagagagatagagagagatagagagaga

SEQ ID NO: 1170 - DNA, 6183 bp, Artificial Sequence
  chemically treated genomic DNA (Homo sapiens)
tttttttttgtttttttttgtttttttttgtttttttttttttttttttttttttttttttttttttttttttttgttttttttttttttttttttttttttttttttttttcgttttagtcgtttttttttttttttttttttttatttttatttgttttttttacgttttttttttttttttttttattagttttatttttttcgttttttttttttttttttttttttttttttgtttttgttaaaatataaattatcggataatttgagagaagtttaaagtattttatattagaaattttttgtattcgatttttaaaattttggttatgtagacgggttttatttattaatataaaagtttttagtttttagttggaaaggaaaattttaagaaaagattttagttttttagttattttttcggttaattttatttttcggttttattttggttcgtaaatgatttgtatggtgagagcggtttttgggggttatcgcgggattaagtttcgtcggtggtgggaggagtgttttggttcgcggttttgggcgcgcgaagggatttcgggaggggcgttgtaggtggaaagttgcgttttgagtagagttcgggatcgcgtcgtttagtagagaatttcgttagggagggtaggttgtaaacggcggagaatttcgttttttcgtaaagtgttttttaggagtatcggattaacgttcgtgggaataaagatagggttttcgtggggtgcgttgttatcgaaattggcggggttgtttttttaagtttgttgtcgtttagtttttggcgagcgaagaggggcgttttcgtttcggtttcgcgaagtaatttgagcgttttatcgggagtagttttcgcgtcgtcgttcggttttagtttttgttcggacgttttttttttcggtttttcgcggattcgattttgttatagtcggggaagtgggggttttacgagaggttttggttgggtttttattttggttattggtcggcgttaggtaggcgacgagagttaggagtagcgtgtacgttattgttgtcggttcgcgatttattttcgcgacggttttcggtttcgtcgtttttttttcgggaggtgggcgcgcgtagtatatcgtatcggtagcgtttttgttagcgaacgtttttttaggtttgtattttcgttagtttttagtggttaaaagtttgtttttacgttcgaggtatttcgttttttattcgcgttagtttttattttttagatagtgtataaagttttttagattcgatcgtttcggaataagtatgcgggaatttagcgggtaggttttttgtcgttcggttcgttttttgtattttgtagcgcggggaggagtgggtattcgaatatacgcgtgtttatatagggatatttatataggcgtgtgtatatttatatacgtatttatataggcgtatgtatttttaagtgttatattaattgatatagatttatttatatacgttagttatatacgcgcgtatattttatagttatattttaacgtcgatatatatagttttttttacgcgtgtatataagagtatatttttgtgcgtatatttttataggtatatttatacgtgtatacgcgttgttttcgttttttcgtagggtttgtttcgtatagaagtcggcgaggcggtttacggggaaatttgtacggacgtagttttattaaatgagtaatggaaagaaatggacgaggaggaaagttaagaatagagaagagaaagaaaaaataagaaatggaaaaggaaagtataattagataagtaaaaatgaaggaaagagaaagaaagggaaagaggcgggggtagggaagggaaggagtaaagagtttgttggatggagatttgtgatttttatttttggtttgatttttttaggttttttcggatattttggttttttttgataggatataggttgttgagatggggtgttttgtgtttttataaattagagagggaggtggatttttgttggggaggttggatttttatttagtaattatttagtattatatttataggtgttatggttagatcgtgttttttataagtttgtttattttgaagtaaaattgaaaaagagcgaacgttttttttatggtttcggtatttttttataagaaggagaaatacgagaggtttagggaatttttagttttttttttttggggtcgttttggataggttggtaaggggttcggaagttaaaagtataagtggttttatattcgtttttagcgtacgtttttagtttgtacgtgatattagagtttatagggaggggtaaaaaaggagggttgatgtaagttatttttcggtggtgggaattttgtgtgagaaggggttgtttgcgggtttgaggttattttattatttttagttttagtttttgaattagcgcggtagttagttttaggtttcggattttggtttaagaagttaggagttttttttttttagcgaaggggtcgtgacgtatggaggagatagttttgaacgtacgtggtcgttggataggttttcgttgttttttttttttaggggcgagaatttgttaattattgttagttttttttttcggggtataggtcgttcggggttttgttgattttaatagttcggatcgcgtagttttcgtgggttgtagtggtaggcgtagttttaggtgtgggggttaggggagggaaaggataggtgttattttggaaagataaaaagagataaatagatataaaaagagaaaatttaggtttaaagaaaaaaaggtggagcgggtagcgttgtgggaaagagtgggagagatttttggattgggaaatttagaggtttgtgttttggttaaagttattggttttttatttgtttttttgtatagtgttgggcgttgtgcggcgcggaggagataggattggggataggagagtcggggtttggggagggagggggcgatcggatcggagcgggaggagggaggcggcgagggggtttgatgttgtattttagttttcgcgggtgatttatgtcggtttcgggcggtcgaggcgatggtacgagatcgcgtcggggttaagtcggttcgacgttcgttggggtcgcgttgtatagttaatgagcgttttcgtattttcgatttataaagagcggtcgtcggttggcgggagggaggagcgcgagtgcgggaggggttgggttttttttagtgcgttcgtgggcgcgtaggcgcgagcgtgtgtgtgtgtgtgtgtgtgtgtgtgtgtgtgtgtgtgtgtgtgtgtgtgtgtgtgtgtttttttattgtagtagttagggttttaaatatttttttttgtattgaagagttttttaattgttgttgtttttgtgttttagtgttgttaatttattggaatttttgacgtggttgtatagtagggtttaggttgatcgtattagttagttgcgtttgtgtatggggtcgatttcgtcgttaattttagaataacgtagaagaggggaaaggagggagggagaacgggaggtaggagagtagaaaaggggtagggatgggggattatttagcggagtatagtttattattcgtagtattttgtatgtggatttatatatttttttattagaataatttatttttttaatgtaatttttaattcgtgacgtttgaaaatagtttgtattatgtacgtgtttatttttggtatttatatttgagaatgtttgttattagattggggtgattaaatttatggattagtatttgggaaagtttaggttaatttagttgtaatttaagttagtagtgtttttttataatgtaaaaagataatttttttagtttttatatttttttttttatatatgtatataggattttttagagtagttaatcgaaagagataggtgaaagtgaaattaagaagttttagtattattattgttttagaagttaagttgaaatttatattatttttgatttttttttttttttatttttattgttaattaattatgaaattttgttattttaaatttattaatttatttattaatttaaattatagggagagttttagaatgagttttttgttattagttttgtttttttttatttattttttatttggtaattagataatttaatttggtagttttattaaattagtgtttgtaaatagaggtaattattttttagagggtaatgaaattaatttagtaggttaaggtaagaattatatttaaatgaaatataataatatagaaattaaaataatttttatgtggaaaagatatgtataattttataatattattgtttttgtgtgtgtgtgtgtgtgtgtgtatgtgtgtgtttttttttgagtgttttttgagtttttttttgagagttaattgttttttgaatagttttaatttaatgttttaaggttttaaatttagtaggatggagtttaaattaatatatatatatatatatatatatatatatatatatattgtgtcgttatgtaaaatatattttttatatgtattttagttaaaaaagtttaaagtatttttttataaattatttatttattaaaaagggaaaaagtgattttaagtagaaaaatatgttagatattttaatatgttttattattatttaaatatgataaagttaatagattaaaagataattgttattgaaaatatagtttgttatatttatagattttaagagaaggagtatatattttgttttaagggattatatagggaagtagagggtaaggggagaagtgtgggtaagtttttttattatggtttttatttaaaggaatagataaggtagagtaagtaggtttaggattgattaatttgtatttataaaataagtaggaggttaaagtaagatgattaatatgttaggtatattaatagattatttagaataaagtgtatatggtatgtgtatgtaggatagatgttaaatatgaagtttaggtttagtatagtggtttatgtttgtaattttagtatattgggaggttgaggtaggagaattatttgaggtttgagtttaggagttggaggttgtagtgagttatgattatattattgtattttagtgagaatttgttttttttttttttatatatattaaggtattatatttatagaagttagaaatgtggtaaatataataggttttatattgaattaaggaattaaagttaatataataattaaaattaatatgaggtaaattgatattatgttttttttggtgtgatatattttgaaggatatagtagtatttttgtggtattattgtgtatgttttaaatttaagtatgagaaaatattagttaaattaatgtttttttattttttagaatgtttaaattaagggatatttaagtattaaagtatagtatttgtagtatattttgtatattttaaaaatggtaaggttataaaagataaagaaaggttgagatatgtagtttagaaatatgtagtgtatgattttagggtggattttggattgggaaaaaagtatttttagaggatgttatggggaaaattagatatgtatgtttttagaattttttttattttttttagtttagtatttgttatatttgttgtgtttttatggtttttttaaaatttttttttttttgtaattagaataattttttttagttattatgttaattatatatttgtttgattataattttttaattatttttttatttttttataataaaatgaaaaatttttagtatagtttataaatttttgtatgattgggtttttgataatattttaaattttatttgatagtttagttattttggtttttatttggtttttcgaatatgtattacgtgttttcgtagttttgaaggtgagattaagatacgtaggtaatttttttaagattaaattaggaagaagttgaatttttgaatagattaataataggttttgaaattgaggtaataattaatagtttattaattaaaaaaagtttaggattagattgatttatagttaaattttattagaggtataaggaggagttggtattattttttttgaaattattttaattaatagaaaaagagggaaattttt

SEQ ID NO: 1171 - DNA, 7327 bp, Artificial Sequence
  chemically treated genomic DNA (Homo sapiens)
aaaagggaattcggggtagagtgtggggaagtgggatggtagtatggtagggttttggaaaatgagaggtgagattgtgtttaggaagggtgtaaggagaggatggattttgatatatggatttaggattattagggttttgtttgggatattggtttttttgtttatttgtttttttttttttttttggtcggaggaggggttggtttattgttttggttttattttttagagttgtttgttgtagttatatttaggttatttttttttatttttttttttttgtcgattagtggacgtgatagagatgtgaatggggtagggatgttttttgatggtattaagattttagtttttggtgcgttgtgttttagttttgattttagttgtagtcgtgatggatagttgtatggaagttgagatttttattgatagtgaaatttttaaatgaatataatttttgtttttttgttaaggatttttgtagggttttttagtttttttattttttttttgtgttttgataaagaaatatagagtaatttgattgttttgtgatttggttagttgtattttttttgtaggtttgagtttaagttagagttttgaaaaggtatttaggttgttgtttaaaatattgaaaaaaattggttttggttttgaattaaatattttgaattttcgtaaattttatattttgatttttttgttttggatatatttaggtagaataatttttttttattgtttgttgtgaggatacgttgtagtttatttattaagtatatttttttaataaatgttttggattgattattttgttagttttttgttttgggtaatttatattttttttagaggtttttaaggtttattgaagggatttaatatatttttaatggttttttttttttttgttttattttatgtttttattttttgagttaattttttaaatataggattatttgtatttaagtttttagtttaagaatataggattatttgtatttaagtttttagtttaagttttgttttggaagaatttaaattaagatagtgtttttggtgttttttttaagtaattttaagttttggttgttatttgagtagaggttttttttttttttttttttagttttatttatttgttaggttttttttaaatttttttatttttaagttttgtttgatttttttaagaggagagggttgttttttagtatgtttttatttattttttttttttttgttttgtattttggtgtagtttggtaatggggtttttttatggttgtgtgttatgattttttaattattatgtttttatgtattttttgttttttttggaatttagtattatgttttatatggaaaagttgttattgatagttcggtgagagttttgagggtggagtgattggggtagggtttgaggtaagaggtgggaggaggtaggaggttaggggtttagtcggattaggagattggaaataggtaaggataaggtaggtgggggattgagttgtttgggttatttttgtaggttagagagattaggtaatatatatattgtagaaggtgggttgggaggattggggttagagttgggggagggatgagaatagaagtaggattaggatttagtagagtttttttatttttttttattattagggaattttattgttttattttagtttgtgttgttttttggtaaggtaggtttttatatgtttggacgtttgggtgcgttggtgatgggaaggagtagggtgagggaggggttttaggagaggtttaggatgagttttattttgtttttttttatttttgttttattttttgtaaatgtgataggtataggataggagtaggtatttcgtttattgttgtttaattttttagtttttttaggtttttaattttgtttgtttttagtttggtaagtagatttgtgtacgtttttttatattttattatttagttttgtttagatgtgttagaatggggttggataaagaaggaggggttagattagaggagtggtggtagagatagtgatagtttggggtgatgattttatgtttgtttattattgagttttgggaaggaggttaggagtggggtaggttaattgattgggagtaggggatttgggttttaagaaggagttgtgtttgaggtggggtttgggttttcgtggaagttaggatttttaggtagaaaagaggtaggttgtagggaagtaaggaggaggtatggtatttttttatcgggtattataggtggggttttgttttatttttgaacgttttttgtggcgttttttatttatttgtaggtttagaaggatgtcggtttgttatcgttttttagggaacgagatattgttgagttggaagatttcgcgggttataggtatagtttttttgttgttggcggcgttgttggggttgtttggtaacggtttcgtggtgtggagtttggcgggttggcggtttgtacgggggcgatcgttggcggttacgtttgtgttgtatttggcgttggtcgacggcgcggtgttgttgtttacgtcgttttttgtggtttttttgattcggtaggtttggtcgttgggttaggcgggttgtaaggcggtgtattacgtgtgcgcgtttagtatgtacgttagcgtgttgtttatcggtttgtttagtttgtagcgttgtttcgtagttattcgtttttttttggcgtttcggttgcgtagttcggttttggttcgtcgtttgttgttggcggtttggttggtcgttttgttgttcgtcgtttcggtcgtcgtttatcgttatttgtggagggatcgcgtatgttagttgtgttattcgtcgtcggtttacgtcgtcgtttatttgagtttggagattttgatcgttttcgtgttttttttcgggttgatgttcggttgttatagcgtgacgttggtacggttgcggggcgttcgttggggtttcgggcggtacggggcgcgggtgggtcggttggtgagcgttatcgtgtttgttttcggtttgttttgggttttttattacgtagttaattttttgtaggcggtcgtagcgttggttttatcggaaggggttttggcgaagttgggcggagtcggttaggcggcgcgagcgggaattacggttttggttttttttagttttagcgttaattcggtgttttacgtttttatcgttggagatttgttgtttcgggtaggttttcgtttttttacgcggtttttcgaaggttttggggaggttcgagggggcggtcgttttagggaagggattatggagtttcgaattattttttagttgaaagtggtggggtagggtcgcggtaatggagattcggggggtgggatggagaaggacggttcggaatgggatttttgatagtagattttataatttgttgtttttttttgtttttttttattttttatttattttttagaggttagtgttttgggatatttggggatttttttttgattagagtttggatttggttgggtaggattattatatatttggggtaggtttaggtttttttaaattgagggattatgagggtggtgatggtttttgttaaggattattgtgtgtttgtaagttggtatgtatttatgtgttagtattgtttatttgttgttaatagttgttattgtgaaatatattgggaagttattagatgatgatttaagtgtgttttttttggtggttttttatgtttgagttgtattgaagttatttagttttttgttgggttaagttaggttgggtagtgttagtttttagtggtattttgatttgttttttttagtttaggtgttttggttttataggttaatttatagaattattttggaaataaaggagaaaatggaaggagaggtatgggagtttggatgaggggtaggaatgggatttattttttgaggtttataaaagtttttgaggaggaaatggttttgaaggggaaaatgaatttgtggggtttgaaaaggaagtttttttgtttgttttgtatttggtttagtgagtatgagataggtatataaggagtggatagtggtgtaggggttttgggagtttgagatttattttgttttttgattatttgattttttttgtaaaggttatttgacgtgaaaaggagttaggagtaagtatttagttagggaagtttggaggttggttattggggtatgaggaatggtaggaatatttagaggataggaataattttttagagaagtgttatatattttttttttttttgttaagtttgggttttttttaagatgttgttagttatttttagttcgttttttaatatttttttgtttttattttttggaatttttatttaggtttaaaaacggttttagattttgatttttttgattgggggatgtagaatgggattttttttaggggatatttataagtatatatttgtggttattaaggtgattagtttattttagttggtttggaatttttttagtttaagtattgaaaattttttgttttagttttgtcggttttttaataaattgagatggttggtcgtttaagtggttattttgattattattttaggttttattttagcgattgtttatatttttttgttttttagatagaagttaaaatagtaaaagaaatttagtttttagggttatgttagggttattaaaattgggatgaattagtatttgtgaattagaatagtagggagtatgtttagagtgtttggttttgggtgtggggaagaaaggttattaaggtagatgcgggtggggaatagtttgagagaggaggtaaggataatttagtttttgtttgaaggggtttttggttgattttggagtttttgtttttaaatataggttttacgggattttttttgtttttatgtattgggtagaggttttttaattttttttgttgtatattgttatttttttatatttcgtgcggttaggaagttttttttgaattttgattttagtttttgttgcggtttttgtttattttttttatattttttgatagttgcgaggttatttttgttttggtttttttttaagtagaataagtgggggttttggaaaggttaagggattttagtggttattattatattttgtattttttttgagaagtgagagttgaaagggaagtaggaaggtttatggttagattgaaggaaggattttttagttttttttttttttttttttttttttgagatggagtttcgttttgttatttaggttggagtgtagtggtgcgattttagtttattgtagtttttattttttgggtttatatgatttttttgttttagttttttaagtagttgagattataggtatatgttattatatttagttattttttgtatttttagtagagacggggttttattatgttggttaggttggttttaaattgttaatattaagtgatttgttttttttagttttttaaagtgttgggattatcggtatgaattattataatttgttaggaatttttagtttttagtttttgtaggagattttaaggaaaggagatatttttttgtttaggaaacgggtaaggggattatttttgtattgttggtttttttttttggtagggtgggtatgaggtattattgtttttgtttttttatttttgttttttatgtttagtttgttagttcggttttaattttgtgtgtttaaagtggaattgaatagtaggttgtgagaagataggaaagaggtagtgttaatttttttgtttagattataaatttagatttagtagggtaattatatgggtaagtataaggtaggtgtttggggaaaggggaagtaattggtattttgtgtgatattaaggagattatttggattttggtttttattaaagagaatggagaattggttgatttaaatggaattagtttttttaagtaaggggaggaaagggggtgttggaagatggttttttttttattatttagattatagtttgaattgaagttaaggatagagtgttgtttttttcggtatttattgatgtgttttttttaaattatgatgttatttaatttaaatttagatttaggatttagttatagttttaatttatattttttattaattttaaaataaagtaaaataaaataaaaagatattagtattgtagtttttaatttgagtttattttttttttttggttattatattttttttttttatatgatattatttattattttgtttaattatttagtttagatttgtattttgaggttatatttagtttttttattttttatatttttttttttttttttattgtttttttttggtttttttttatttggttttatttttaaggagtttttttgttttttgggttgttttggaaaatagattatttttttttttagtgaagggagtgggtaggggttttagttttatttttaggaagatgcgttttttttgttttttgttttgtggtattttttttttggttgatttagtaaatagtatttagatttggggttaggtttttggtagtgggatagatttagggataggttatattattttgttttgattttgggattggtattagtttttaattagtttttgttaaagtttgtaagtaagttttttgggagcggtcgtggttgtggtggtggtgggatagtgtgtagttatgaaagaaggtgtaaaggaatttttaaagaaagtttgattagcgtaaaaagttgggaggttttgtttttgttatttgtttattaaattttttttttttttgttatttttggttgattttgggtatttttggggatagtaggtaggtgattgggaaagttaatgggattgaggggttgagggtttggtagggggtaaaaagattggttttttaaggggtgtagtattggtaggaattttgtttggttttgggttttagggttttttaaggggaggagattgaaaaggtttggaaatgttgttgttgttgtggttattgtatattttgtaattgggtttgtggataggaaggggtcgtatgatttagttaggaaattagtttttgtatttaattagatttttttaagttgttagtttgtagcgatgggggtagtatattttagggggatttttgatgttgttgattttggagatagattagagtttttagtttaggtgtgtttatggcgttaggaaatttttggttttttatttttatgcgtgtgttcgtttttattttttagg

SEQ ID NO: 1172 - DNA, 7327 bp, Artificial Sequence
  chemically treated genomic DNA (Homo sapiens)
tttggagagtgagggcggatatacgtatgagagtagaggattaagggttttttgacgttatggatatatttaggttgagaattttagtttatttttagggttagtagtattagaggtttttttgaaatatattgtttttatcgttgtagattgataatttaaagggatttggttgagtataaagattagttttttaattgggttatgcggtttttttttgtttatagatttaattgtaaaatatatagtgattatagtagtagtagtatttttagatttttttagttttttttttttaggagattttaaagtttagaattaaatagagtttttattaatgttgtattttttgaaaggttagtttttttgttttttgttaggtttttagttttttaattttattaatttttttaattatttgtttattgtttttagagatgtttagggttaattaggaataatagggaggggaggagtttagtggataagtgataaggataaagttttttaattttttacgttggttaggttttttttggagatttttttgtatttttttttatggttgtatattgttttattattattataattacggtcgtttttaggaaatttatttataagttttggtaggaattggttggaagttgatgttaattttagggttagggtagggtggtgtagtttatttttggatttgttttattgttaaaggtttggttttaggtttaggtgttgtttgttaaattagttagagaggaagtattatagagtagaggatagggaagacgtatttttttgagggtggggttgaaatttttatttattttttttattaggaggggggatagtttgttttttagggtaatttagaaggtaggaggattttttagaggtggggttagatgagaagagattaggaaggagtagtgagagaggaaagaggggtgtggggagtgagaaggttgggtgtggttttaagatgtaggtttagattggataattgaataaagtagtgaatggtattatataggagaaggaggtatggtagttagagaagggaaatgggtttagattggaggttataatgttgatatttttttgttttgttttgttttgttttaagattaataggaagtgtaggttggagttgtgattaggttttgggtttgggtttgggttagataatattatgatttaaagagggtatattagtaaatgtcgaagggggtagtattttgtttttggttttagtttaagttatgatttaggtggtgggaagagggttattttttagtatttttttttttttttttatttaaagggattggttttatttaggttaattaattttttattttttttggtagaagttaaaatttaaatggtttttttggtattatatagaatgttaattattttttttttttttaagtatttattttgtgtttgtttatgtggttattttgttgagtttggatttatgatttgggtaaggagattggtattattttttttttatttttttatagtttattatttagttttattttagatatataaagttgaggtcgagttggtaggttgagtatgaggagtaggagtgagggagtaggaatagtgatgttttatgtttattttgttaagaggggaaattagtaatgtagaaatggtttttttattcgttttttggatagaggaatgttttttttttttgaagttttttgtaaaagttaaaaattaaaaatttttggtaggttgtggtggtttatatcggtaattttagtattttgggaggttgaggggagtagattatttgatgttagtagtttgagattagtttggttaatatggtgaaatttcgtttttattaaaaatataaaagatagttgggtgtagtggtatgtgtttgtagttttagttatttgggaggttgaggtaggagaattatgtgaatttaggaagtggaggttgtagtgagttgagatcgtattattgtattttagtttgaatgatagagcgagattttattttaaaaaaaaaaaaaaaaaaaaaagaaattaaaaagttttttttttaatttgattatgggtttttttgttttttttttaatttttattttttaggaaagatgtaaagtataatggtggttattgaggttttttaatttttttagagtttttatttgttttgtttggagaaaagttagagtagagatgatttcgtagttgttagaggatatgaaaaaaatgggtagaaatcgtagtaagaattgaagttagagtttaggaagggttttttgatcgtacgggatgtgagagaatggtaatgtgtaataaaggaagttaaggaatttttgtttagtgtatgaggatagaaagaatttcgtgaggtttgtgtttggggatagaaattttagggttaattagaggtttttttagatagaaattgggttgtttttgtttttttttttaagttgttttttattcgtatttattttgatggttttttttttttatatttaggattaggtattttaagtatattttttgttgttttagtttataggtgttagtttattttagttttggtagttttagtatgattttggggattgggttttttttgttgttttgatttttgtttgggaagtagggaggtgtgagtagtcgttaaagtagagtttggggtgatggttagggtagttatttgagcggttaattattttagtttgttgggaaatcggtagggttgggataaggagtttttagtgtttaaattgggaaagttttaggttaattgggatgagttggttattttagtgattatagatgtgtatttgtggatgttttttgaaaagaattttattttatattttttaattaaaggggttaggatttagaatcgtttttagatttagataaggattttaaaaggtgggggtagagaagtattggggaacgggttaggaatagttagtagtattttagaaggagtttagatttggtaaagagaaaaagaatatgtggtatttttttgaaaaattatttttgttttttaaatatttttgttattttttatattttaatggttaatttttaaatttttttgattgagtgtttgtttttggtttttttttacgttaggtggtttttgtagggaggattagatggttagggggtaaggtaagttttagatttttagggtttttatattattgtttattttttgtgtgtttgttttatatttattggattaaatataagataggtaggaaaattttttttttaaattttatagatttatttttttttttagagttattttttttttagaggtttttataagttttagagaatggattttatttttattttttatttaagtttttatatttttttttttatttttttttttatttttagagtggttttatgggttggtttgtggaattagggtatttgggttgaggagggtaggttaagatgttattgaaggttggtattgtttagtttggtttgatttagtagggaattaggtggttttagtataatttaggtatgaagaattattaggggaagtatatttaagttattatttaatggttttttagtgtattttataataatagttattggtaataagtaagtaatgttggtatatgggtatatgttaatttgtaagtatataatagtttttaatagggattattattatttttataattttttagtttggaggagtttgggtttgttttaagtgtatagtaattttatttagttagatttaaattttagttaaagaagggtttttaaatgttttagaatattgatttttggagggtgggtggggggtggaaagggatagggaagggtagtaggttgtagggtttgttgttaaaggttttatttcggatcgtttttttttattttatttttcgggtttttattgtcgcggttttgttttattatttttagttgaggggtagttcggagttttatggttttttttttagagcggtcgttttttcgggtttttttagagttttcgaagagtcgcgtgaggaaacggggatttgttcggggtagtagatttttagcggtgaagacgtagagtatcgggttgacgttagaattgaagaaggttaaggtcgtagttttcgttcgcgtcgtttggtcggtttcgtttagtttcgttaaggtttttttcggtggagttagcgttgcgatcgtttgtagaaggttgattgcgtggtagggggtttagagtaagtcgaaggtaagtacgatggcgtttattagtcggtttattcgcgtttcgtgtcgttcggagttttagcgggcgtttcgtagtcgtgttagcgttacgttgtagtagtcgagtattagttcgaaaggaagtacgaaagcggttagagtttttaggtttaggtgggcggcggcgtggatcggcgacgggtggtatagttggtatacgcggtttttttataggtggcggtagacggcggtcgggacggcgagtaatagggcggttagttagatcgttagtagtaggcggcgggttagggtcgggttgcgtagtcgaggcgttaggaaggggcgggtgattgcgaggtagcgttgtaggttgagtaggtcggtgagtagtacgttggcgtatatgttgagcgcgtatacgtagtatatcgttttgtagttcgtttggtttagcggttaggtttgtcgggttaggaaggttataaagagcggcgtgagtagtagtatcgcgtcgtcggttagcgttaggtgtagtataagcgtggtcgttagcggtcgttttcgtgtaggtcgttagttcgttaagttttatattacgaagtcgttgttaggtagttttagtagcgtcgttagtagtaggaaggttgtgtttgtggttcgcgaagttttttagtttagtagtgtttcgttttttgggggacggtagtagatcgatatttttttgggtttataggtgggtggaaggcgttatagagggcgtttaggggtggggtaaaattttatttgtgatgttcgatgagaaggtgttatgttttttttttatttttttgtagtttgttttttttttgtttgggagttttgatttttacgaggatttagattttattttaaatataatttttttttggaatttagattttttgtttttagttagttgatttgttttatttttggttttttttttagagtttagtggtaaataggtataaagttattattttaggttgttattatttttattattatttttttagtttggtttttttttttttgtttagttttattttagtatatttgggtaaaattggatggtggggtgtaaagggacgtgtatagatttatttattaagttgggagtaagtaggattgggggtttggagaagttgaaaggttaagtagtagtaggcgaggtgtttatttttgttttgtgtttattatatttgtagagggtaagataagaatggggagggataagatgaggtttattttgggttttttttggggttttttttttattttgtttttttttattattaacgtatttaggcgtttaggtatgtgagagtttgttttgttaggaaatagtataagttgaagtggggtagtaagattttttggtggtggaaggaaataggaggattttgttgaattttggttttgtttttgtttttattttttttttagttttggttttaatttttttagtttattttttgtagtgtgtatgttgtttggtttttttggtttgtagaggtgatttaaataatttagttttttatttgttttatttttgtttgtttttagttttttggttcggttgagtttttggttttttatttttttttattttttgttttaggttttgttttagttattttatttttagggtttttatcgggttgttaatgatagtttttttatgtaaggtatggtgttaggttttaggaggaataggggatgtatggaggtataatggttagggagttatgatatataattatgaagaggttttattattaggttgtattaggatataagataagaaaggaaaggatgagtagggatatattaagaagtagttttttttttttggaaaagttaagtaaaatttggaaatgaagagatttgaggggggtttggtagatggatagagttgggggaagggaaaagaaaggtttttgtttaagtaatagttagaatttgaggttgtttggggagggtattaggagtattgttttagtttgggtttttttaaagtagagtttgagttaagggtttgggtataggtgattttgtatttttgagttaagggtttgggtataggtgattttgtatttgggaggttaatttaggaagtgagggtataaggtaaaataagagagaggaaagttattaagagtatgttaagtttttttagtaggttttgggaatttttgagaaaagtatagattgtttaagataaaagattggtagggtgattagtttaaagtatttattaggagaatgtatttaatgagtgggttatagcgtatttttataatagatagtgagagagagttgttttatttgggtatatttaaaataagggggttagggtatggagtttacgagggtttaaggtatttggtttagggttagggttagttttttttagtgttttgggtaataatttgaatatttttttaaggttttggtttgggtttaagtttgtaggggaaatgtaattggttaggttatagggtaattaagttattttgtgtttttttgttaggatatagaaaaaaagtggggaagttgggggattttataaggatttttggtaggaaagtagggattgtgtttatttgagggttttattgttagtgagagttttagtttttatgtaattgtttattacggttgtaattgaaattagagttgggatatagcgtattagaagttaaagttttgatgttattaaaggatatttttgttttatttatatttttgttacgtttattaatcggtaaaaggagaaaagtgagagaagatgatttaagtgtgattgtagtaggtagttttggaaaatgaagttagagtagtgagttagtttttttttcgattaaggaggaaggaaagagtaggtaagtaggaaggttagtgttttagataggattttaatgattttgaatttatgtattaggatttattttttttttatattttttttggatatagttttattttttattttttaaagttttgttatgttgttattttatttttttatattttgtttcgggttttttttt

SEQ ID NO: 1173 - DNA, 6500 bp, Artificial Sequence
  chemically treated genomic DNA (Homo sapiens)
atattaaattagagttagtattattttgagaaagtaggttggttttaggatttacgggcgtttatgtagttgatggaggggagttggatcggacgattgtgtttttttagttttagtattattttgagaaagtagtttgttttcgggatttacgggtatttatgcggttgatggagggagttgggtcggacgattgtgtttttcgtgttttatgtagaatttttaggtttgtttttgaagtttgtttgttttatgtattatttagttgttttttagtatagagtttggttttttttttttttaattgtaagaatgatgtgttttggtatgttatattgtgaaaggggattagatgatggagtttggattgaaagggtgaatggggtcgtttattttagaattttttttgttttgttttgttgggagtagggagtagggtagtttgggagaggttggagttttttaaagggtagagaagaatggtttttaggggattatagggaggaattatgttatgatagatttaaaaagttagattatgttaataaaaaggggaagatatttgtgatatataggaaatagtgttcgtggttttgttatagaaggcgtagtaaaggaggaaaatttcggagattttttgtgaatttttggttaagaatgtacgttatttgtagtgatttaaaaatataaacgagaatagaagtgagtggttttatttgtgagatgtatagtgttgagcggtatttagcgttggttgtaggatgggaggttggttgtcgtatgattgttcgtgggaagaaattttgtagaagttattaagttttttaaaatgttcgtgttgtgtttgtttggatagttgtaattttgagaagcgatttttgaaaatgattttgggtatagaaaaaggtatagtatagtggtgtttttagtatggttgtttatagtcgtagaaaatgagatgttaaattgttgttttaggggattggttaagtaaattggtgtttttattttatgagataggatgtagttatttgaaatatttatgaaggttttggatagttatttggaataatggttttgttggggtttttaatttgtaagttaatagaaaagaaatttggttaatataattttataaattatttttttatagtttatttttaaggtttttagtaatttttagaattaaaggagatatcggatggttaggttttagtagtggtaaggtttaggtagttttagatttttgtagtttgttattatttcgagtttttttaggttattagttaggtttgggggtgatggaggaggattcggtaagggatagtttatttggtaaagtttagggagtatttgttgtggttaggtattgttttagaggtaggggacgttttcgtatttcggttaatttttcgtattttttagtatagacggcgttttatcgtgttagttaggatggtttcgattttttgatttcgtgatttgtttatttcgtgttgggagtataggcgtgagttatcgcgtttggttttttttgtgttttttttttttttttttttttttttttttttttttttgttggagacggagtttcgtttttgttgtttaggttggagtgtaatggcgcgattttggtttattgtaatttttgttttttgggtttaagtaatttttttgttttagttttcggagtagttgggattataggtatgtattattatgttcggttaattttgtatttttagtagagatagggtttttttatgttggttaggttggttttgaattttcgattttaggtggtttataatttcggttttttaaagtgttgggattataggcgttagttattatgtttagtttggtataatttagtataaagtttttgaggtttttgtattattttagtaggatagttggtgaaaatttgaataagattcgtaaaatatttgattattaatttgtattaatggaaattttttggtttataattgaattttggttatataagttttttttttttttttttttttttttttttttttttttttttttttgagatatagtttcgtttcgtcgtttaggtgtgattttggtttattgtattttttgttttttgggtttaagtaattttttttttttagttttttaagtggttgggattataggtgtttgttattacgtttgattaatttttgtatttttagtagagatggggttttattatgttggttaggttgattttaaatttttaattttaggtaattcgtttattttagttttttaaagtgttgggattataggtatgacgttatcgcgtttggtcgagattgtagatttttgtaatttttttgtaagtttaaaataattttagttaagtatggtggtttatgtttgtaattttagtattttgggaggttgaggtagaggattattttagatttaggagtttgagattagtttgtaatatagtaagattttatttttggaaaaaaaaaaaaaaaatattagagtttgtggttttagttatttgagaggtttgaggtgggaggattgtttgagttcgggagtttgaggatgatagtgaggtatgttgagttattgtattttagtttgggtaatagagtacgattttgttttaaatataaataatttttaaataaatttttttgtttaagtttagggtttgagttgtgtattgtttatgatttattttatagaagttttgattttttttttgtgtaatggttttgtcggtttttttgtcgtttagaggttttggtgagtgggtattagagattttttagggttttgtggaggtttagggaggagttttcgttttttttttgatgttggtgtttttagagttagataggaagatggaagttgggtggttcgagtaggggtgggggtttggttggtttttttgttagtttgagttggtttgagtttaggtagggttttgatagtttgggtaggtttagagggagggaggtgggaattaagagattcggggagggttttcggggttaagatttaggtttttgttttgtatatttgttaagggatttttttagaagttgttgatgttaggttttggttttttgttgtggattgaggggatgaatttcgacgggaggatatttaggttttggaggaaatgagagtttggttgataggagggtttggatttacgaagatatttggatatttataagtatagagatatgggtgtgtgataattgattaaggggtatgtaggtatgtatgcgtggtgtatatagatattttgggtatagtttattggtattagcgttaatttttgcgtggtgggttgtattttattttttaggtaggttttgtggggtaggttttagggaggaaggaggttgagtgggtagagtttgaggacgcggttattatcgttttttggtattatatttgtgttcgggatttaggaggtagttttttattattgagttttaagatgattgttatagtttggtttaaagtaggggtcgggtttgagttttggttttttgttttggaggagtttatagagtttttagttggggtatatttggttttcgggggtaggggcgatatttagaggaggaagaagggattttgagagagtttaataggtttcgagttttaggttggagttgagtttggggtagtaaggaaggattaggtgcgagggtagaattatgcggttcgatttttgtagtacggtttgtggttttttttagtttttgttcgtgtttttggttagtttggattttgttatttttgattaaaagttatcgttaaatttatttaagttaaaagaggaagtgatcgttaggtttaattgggaaggttggcggttaggggtattttaggtagggcgaggggggcggtcgggggcgttttaggcggggcgagggagatatttagaattttaggtaggagttttcgggtgttattttttttttttatttggttttgcgtgggttttgtttttagggtggttcgtcgtagtttttttttttattttgagttttttgttttaaagttttaaggaagtttttagaattatattttattattttgagttagttttggtttagtgtttattttataggtttggaaggggtaggagttagtattgtttagattatagggtttgagtgtggggagggtagtcgtttaggaaggtggtggagggttgttattttgaggtaagagggttgcggggtagaaagatatagtaggtgattgttgtgggaggtttaagagaggtttgggagagggatggtttataagggttgattttttcgttatttagggggttttggataggtttttttttggtagggtggtttttgtgtatggaatttttataacgattaaggttggtaggtatgaggttttttgaaggagaaagagtttgtggggtttagtgtggttgggggggcgttgggattttattttgaagttaaaggtattgggaagggttttcgtagaggagggtttggtaggggttgttaggaatagtttggatggggatagggaatagataaggtgggtggaggagttagtcgggagtttggggttggttttagtatgatgtgggggtttgtaaggttttggagaaagtggggtggtgtagtagggggtatatttatagttggagttgatttagatggatagtttgggttttgttacgcgggattaggtaaggaaggggtacgaataagtaggaagtggtgaggcggtttttagttagttgtttttttttgtttagattttggttttttttttgttggtttggtttggttttttggttttgtgtggtatggttatattttcgtgtattttttttattgagatggggcggggagagtatcgaggttgtttttttttttttgggtcgttttttgagtagtagacggggttaagcgttttttagttcgtttttatatatagttcgtgttattatatcgacggtattatgaaggacgaggtagttttattggttgttgttatttttttgggagttttgttgtaaggtgggttggtttttatttaggaagagggtgggttttagatttttatagtttgttttttgttttttaggtttaggtggagggtagaggtggggattttagtttaggtttaagttggaagagggtggggatttttagggaattggggggtatttggttgtgagagttgtaggatttgggggtggtaagggtgttaggataaatggtaggatagttatgggtttggggaagttgatttttgttttttttagttgttttttttttgggcgttttagtaagcggtttttattttttggttttgttttaaaggtatttttatattgggattacgtggagtagggtagaggtgggatttttttttttagttttttaaaaagagtttgtttaatgttttttttagattggttttaaaggatatattttttggttagatatttttgttatttaagagatattattattttatagtgtgtgggttaggataaggtatagtttggggagggggttttgaaggggttgaatagataggttagtttgatttttagttgtttttgtattgagttggatggttattttgtgatatttatttgtagagggtttagaattaaaggtgttagggttgtaggatttagggggagatggttcgacgggaggtttggggagggagcgtatagttagtattggtttgtgtgtggtttggtttggttttatttgattaagagaagggtttttgtttatagagaaattttagggttagtttattttttgtaattattttagttttggggttttggggttaggttaggagagttttagttgtaattttttgggagtaggagagaaggtgtttgttagatttaggtttgggatcggaatgtaggaatagagaaattgaggtttggaggtatagggacgtaggttttagtgatttcggtttgaggtagggttagagggttttgttggtgggcgttggtaggtgggtgattagggattgttagttatagggagtgtgtttttttgtatttgggaggatgtagttagttttgtttttagattttcgaggtattttttggttagggatttgaaagttgtatttgtttgtgttttgagagtgaaatgatttagaaataaggatttaagtggtttttttcgcggagtaggtgtttttgtgtttgaattatttatttttttttatatatttataggttgggatagggtttttttgcgttttaggttttagttttgtttttttcgttgaatgttagggatatagggtaggttagggatgggtgagacgagaggttttttcgggcggggagggggcggggtttcgttttagggaggagaggatacggttaagtgaagggttagattgtaggattttttttatttttatttttggggtttcgggtgtttagatttgattttcgttttttttttttttttagt

SEQ ID NO: 1174 - DNA, 6500 bp, Artificial Sequence
  chemically treated genomic DNA (Homo sapiens)
gttgggggaggagggggagcgggagttaggtttggatattcgaagttttagagatgggagtgggagggattttgtaatttggttttttatttggtcgtgtttttttttttttaaggcggaatttcgtttttttttcgttcgaggagatttttcgttttatttatttttggtttgttttgtgtttttgatatttagcgaggagggtagggttgaagtttggggcgtagagaggttttgttttaatttgtgagtgtatgggggagggtgagtgatttaggtatagggatatttgtttcgcgagagagattatttgagtttttgtttttgaattattttatttttaaaatataggtaaatgtagtttttaggtttttggttaggaagtgtttcgggagtttgagggtagagttggttgtatttttttaggtgtaaggaagtatattttttgtagttaatagtttttggttatttatttattagcgtttattagtagggttttttgattttgttttaggtcgggattattaaagtttgcgtttttgtgtttttaaattttagtttttttgtttttgtatttcggttttaggtttaaatttgatagatatttttttttttgtttttaggaggttgtagttgggatttttttagtttaattttaggattttagggttggggtagttgtagagggtgggttggttttaaagtttttttgtgggtaggagttttttttttggttaggtgaggttaggttagattatatatagattagtgttggttgtgcgttttttttttagatttttcgtcggattatttttttttgagttttgtagttttggtatttttggttttgggttttttgtagatgggtgttatagggtggttatttagtttagtgtaggagtagttggaggttaggttggtttgtttgtttagtttttttagagttttttttttaggttgtgttttattttagtttatatattgtggagtagtggtgttttttaggtggtaaggatatttggttaaggaatgtgttttttagggttagtttgagaaaggtattaagtaggttttttttagggggttggaggaaggagttttatttttattttgttttacgtggttttagtatggaggtgtttttgaagtagagttagggaatgggggtcgtttgttgggacgtttagagaggggatagttggaaagagtagagattagtttttttaagtttatggttattttattatttgttttggtatttttgttatttttaagttttatagtttttatagttaggtgttttttagttttttgaaagtttttatttttttttagtttgggtttgggttggagtttttatttttgttttttatttgggtttagggggtagagggtaagttgtagggatttaaggtttattttttttttagataggaattagtttattttgtagtaggatttttaggagggtgatagtagttagtagagttatttcgttttttatggtatcgtcggtgtggtggtacgggttgtgtgtgaaggcgagttggggaacgtttagtttcgtttgttgtttagaggacggtttaggagaggaagagtagtttcggtgtttttttcgttttattttagtggagggggtgtacgggggtgtgattatattatatagagttagggagttaggttaagttagtagggaggaaattaaagtttgggtaggggagagtagttagttggagatcgttttattattttttgtttgttcgtgttttttttttgtttagtttcgcgtggtagagtttaagttgtttatttgggttagttttagttgtgggtgtgttttttgttgtattattttattttttttagggttttgtagatttttatattatgttggagttagttttaggttttcggttaatttttttatttattttatttgttttttgtttttatttaggttgtttttggtaatttttgttaaatttttttttgcggaagttttttttagtgtttttggttttagaatggagttttagcgtttttttagttatattgggttttataagtttttttttttttaggaaattttatgtttgttagttttagtcgttgtaggggttttatgtataagggttattttgttaggaggaaatttgtttaaggttttttgggtggcgggagggttagtttttgtgggttattttttttttaggttttttttgggttttttataatagttatttgttgtgtttttttgtttcgtagtttttttgttttaaggtaataattttttattatttttttagacggttgttttttttatatttaggttttgtggtttggatagtgttgatttttgttttttttaggtttgtgagatggatattgagttaaggttgatttaagatggtgagatgtagttttggaaatttttttaggattttgggataggaaatttagagtggggagggggattacggcgggttattttgaggatagagtttacgtagggttaggtggagaggaaaggtggtattcgaggatttttgtttggagttttgggtgtttttttcgtttcgtttggagcgttttcggtcgtttttttcgttttgtttggagtgtttttggtcgttagtttttttagttgggtttaacggttatttttttttttggtttgagtgggtttggcggtggtttttggttagaagtggtaaagtttagattgattagaagtacgggtaggagttgggggaggttataggtcgtgttgtaggggtcgggtcgtatggttttgttttcgtatttggtttttttttgttgttttaagtttagttttagtttgaggttcggagtttgttgggtttttttagaatttttttttttttttttgggtatcgtttttgttttcggaaattagatatgttttagttgggggttttgtgagtttttttagggtaggaggttagggtttaggttcggtttttgttttagattaagttgtgatagttattttggggtttagtgatggaggattgttttttagatttcggatatagatgtagtgttagggagcgatggtggtcgcgtttttagattttgtttatttagttttttttttttttgaaatttgttttatagggtttgtttgaagggtgggatgtagtttattacgtaggggttgacgttggtgttagtgggttgtgtttagggtgtttgtgtgtattacgtatatatatttgtatgttttttggttagttgttatatatttatgtttttgtgtttgtgggtgtttaagtgttttcgtgagtttaggtttttttgttagttaagtttttattttttttaaggtttgaatgttttttcgtcggagtttatttttttagtttatagtaggaagttaaagtttaatattagtagtttttgaggaagttttttggtagatgtgtagggtagggatttgggttttggtttcgggagtttttttcgggttttttggtttttatttttttttttttgagtttgtttaggttgttagggttttgtttgggtttaagttagtttaagttgataggagggttagttaagtttttatttttgttcgggttatttagtttttatttttttgtttagttttggaggtattagtattaggagggaagcgaaagtttttttttgagtttttatagagttttaaggagtttttgatgtttatttattaggatttttgggcggtagaaaggtcggtagaattattgtatagagaagaaattagaatttttgtggagtggattataggtagtgtataatttagattttgagtttgaataagaaagtttatttagaaattatttatatttgagataggatcgtgttttgttgtttaggttggagtgtagtggtttaatatgttttattgttatttttaaattttcgggtttaagtaatttttttattttaagttttttaagtagttgggattataggttttaatgttttttttttttttttttagagatggagttttgttatgttgtaggttggttttaaatttttgggtttgaagtgattttttgttttagttttttaaagtgttgggattataggtatgagttattatgtttggttgaaattattttagatttataaaaaagttgtaaaaatttatagtttcggttaggcgcggtggcgttatgtttgtaattttaatattttaggaggttaaggtgggcggattatttgaagttaggagtttgaggttagtttggttaatatggtgaaattttatttttattaaaaatataaaaattagttaggcgtggtagtaggtatttataattttagttatttgggaggttgagagaggagaattgtttgaatttaggaggtagaggatgtagtgagttaagattatatttgagcgacggagcgagattgtgttttaaaaaaaaaaaaaaaaaaaaaaaaaaaaaaaaaaaaaaaaaaaaaatttgtataattaaaatttagttataaattaagagatttttattgatataagttagtaattaagtattttacggattttatttaagtttttattaattgttttattggaatagtataaagattttaaaaattttatgttaaattgtgttaggttgggtatggtggttaacgtttgtaattttagtattttgggaggtcgaggttgtggattatttgaggtcgggagtttaagattagtttgattaatatggagaaattttgtttttattaaaaatataaaattagtcgggtatggtggtgtatgtttgtaattttagttatttcggaggttgaggtaggagaattgtttgaatttaggagatagaggttgtagtgagttaagatcgcgttattgtattttagtttgggtaataagagcgaaatttcgtttttaataaaaaaaaaaaagaaaagaaaagaaaaaaaaaaaaaggtatagagagggttaggcgcggtggtttacgtttgtatttttagtacgaggtgggtaggttacgaggttaggagatcgagattattttggttaatacggtgaaacgtcgtttatattaaaaaatacgaaaaattagtcggggtgcgaagacgttttttgtttttagggtaatgtttggttatagtaggtgttttttaaattttgttaagtgaattgttttttatcgagtttttttttattatttttaagtttggttggtgatttggagagattcggggtagtggtaggttgtagggatttggaattgtttgggttttgttattattgaggtttggttattcgatgttttttttgattttgaaagttattgggaattttaaaaatgggttgtagggaaataatttataggattatattagttagattttttttttattggtttgtaagttaagagttttaataaaattattattttaaatgattgtttaaaatttttataaatattttaaatggttgtattttattttatggagtggaagtattagtttgtttaattaattttttagggtagtagtttagtattttattttttgcgattgtaaatagttatattaagaatattattgtgttgtatttttttttatatttagaattatttttaaggatcgttttttagaattgtaattgtttaggtagatatagtacgaatattttaaggagtttgataatttttataaaatttttttttacgaataattatacggtagttagttttttattttgtagttagcgttgggtgtcgtttagtattgtgtattttataggtagggttatttatttttgttttcgtttgtgtttttagattattgtagataacgtgtatttttagttaagaatttatagggagttttcggagttttttttttttattgcgttttttatggtaaggttacgaatattgttttttgtgtgttatagatgtttttttttttttattagtataatttagttttttgagtttattatggtatggtttttttttgtggttttttgaaggttatttttttttgttttttgaggaattttagttttttttaggttgttttgttttttgtttttagtaaagtaaagtagggagagttttgaggtgagcggttttatttatttttttagtttaggttttattatttggtttttttttatagtgtgatatgttagagtatattatttttataattaaaaaaagggaaaattaagttttatgttgaaaagtaattaaatagtatatggagtagatagattttaggggtaaatttaagggttttatatgaagtacgagaagtatagtcgttcggtttagttttttttattagtcgtatggatgttcgtgagtttcggagataggttgtttttttagggtgatgttagagttaagagagtatagtcgttcggtttagtttttttttattagttgtatggacgttcgtgagttttggggttagtttgtttttttagggtgatgttagttttaatttagtat

SEQ ID NO: 1175 - DNA, 5760 bp, Artificial Sequence
  chemically treated genomic DNA (Homo sapiens)
attttgggtttttgtttttgtttttgagatagagtttcgttttgttgtttaggttagagtgtagtggtttgatgattttggtttattgtaatttttagtttttaggtttaagcgatttttttgttttaattttttgagtagttgggattataggtatatagtattatgtttggttaatttttttttttttttgagacggagttttgttttgttgtttaggttggagtgtagtggcgcgttcggtttattgtaattttcgtttttgggtttaagcgatttttttgttttagttttttaagtagttgggattataagtatttattattatgtttagttaatttttgtattttcggtagagatggggttttattatgttggttaggttggttttgaatttttaatttcgtgtgattcgtttgttttagttttttaagtgttgagattataggcgtggtttattatatatggttaattttatgttttttaatggttgttttttagtttttagttttttttaatatttgttttgtagtttttaattttgatttttgtgttagaaggatagatgtttgtttaggatttgatttttgtttttatgatttggttttatgtgatcgttatttatatattttatgtatgtatatatatttttatttttttttttagtacgttattttttttgttatagttgtttgtgtttttggagtgttatatagtgttttttgaagataatttggtttttttttagttttattttcggattttggttattggtgcgtttcgtttacgttggtgtttcgtgttttatgttgtggttgtggtttatgttaatagttttatttttttttaggatttatagagtttagtaagttatatttttatttttagaggaaggaagggagttagtaattgagttgtttttgggttagttggggaagaggtaagtgttaagtaaggttagtggtgggtattagttttcggtttagtgttatttttttttgttttgtttttaggatgaggttaaagttgttcgtaggagtatgttgtagaaaatatggttgttggtagatgaggtagggttagggttattaggagggtgggatattagaggattttgggggatagagattataataggattttattatttattttataagtttttttttttttttgtagggttttcggtagtattttttgtattataagttttttaattttacgtttttagagggttttgagttttatttttagttgttttttttgcgttagtattatttttagagattgattttaatagtgttttaaaatggggtattagagatttaggatagttgatatagatggaaagatgggtacgttgttttgtatttagttttttaatagatgtttggttagacgaagaatattgtgttttaatggtaggtaggagattaaggagtagaaggtttgtttttttgggagtaggttgtttgagttgttttagagtagtgagttttattattatattttgatatttggggtttttgaaggtttgtgttgggagtgaagagtggtttagttatttattcgttttttggggatagggtaaattaaatgtatttttttttatttaatttttaatttttgttttgggttgaggtatatgaatgttatagttgtgtattaaaataaatgttttttattttttggaaatttgatttggattgattttagttatgttagtttagggttagtatttgggggtgggttattttaggtgaggagtaggattgttgtgagagagatggggaagaattataagtgggaggtaaaaattttgtttatatttggagataataagaatgtggggtttgttaggtatagtggtatatatttgtagttttaattatttgggaggttgaggtaggatgattatttgattttaggaatttaattttagtttagttaatatagtgagattttatgtttgtttgtttgtttgtcggtcggtttgtttatttatttatttatttatttatttatttatttatttatttatttatttatttttgagatagggttttgttttgttgtttaggttggagtgtagtggcgtgattatagtttattgtagtttcgattttttgggtttaagttatttttttattttagttttttgagtggttgggattataggtaagtgttattacgtttggttaattttttgtatttgtagagacggagttttattatgttgtttaggttggttttgaatttttgagtttaagtaatttatttattttagatttttaaagtgttaagattataggtatgagtcgttatatttggtttattttggtagtttttatattgttttttggtttgaattttaaattttaggtttttttagattgttttttgttgtgtggattatttattgtgtttgtaagtaattagagttagagtagtgtgttaaggtttagttttgttagtaggtagagagaatttagtttttataaatggagttgttgaatatagaattatttaataggtttttttgggtttttttttttttttttttgatacgaagttttgttttgttgtttaggttggagtgtagtggggtaattttagtttattataatttttttttttttagtttaagttatttttttgttttagttttttaagtagttgggattataggcgcgtgttattacgtttggttaatttttgtatttttagtagagatggggttttgttatgttggttaggttggttttgaattcgaatttttgattttatgattcgtttattttagtttttaaaagtgttggtattataggtatgagttattgggtttagttttttttttttttttttttttgagatagagttttattttgtagtttaagttagagtgtagtggtatgattttggtttattgtaattttcgtttttgaggtttaagtgatttttatgttttagtttttcgagtagtaggggttataggtatgtattattatattcggttagttttttgtatttttattagaagcggtgttttgttatgttgtttagggtggttttagatttttaagtttaggtaattcgtttattttagttttttaaagtgttgggattataagtgtgagttatagtatgtggttttaataggttttattaagtaattattgtattagtaaatattaatgatttttaaattttgtgataaaaattatttggaggatattttaaaatagattattgggttttattattagaagttgttgatttagtatatttggggtgaaatttaagaatttgtatttttaataagtttttaggtaatattgatgttgatgtttagaataaattatataattataatttgaagagtagtggtttaaagagattttgtaaggtaaattttgtgattttatagtgtgatatttagtgttaagtagggtatagagattagggtttttttgttttttgttttttttgagatggagttttattttgttatttaggttggagtgtagtggtgtaatttcggtttattgtaatttttgttttttaggtttaagtaattttttgttttagttttttaagtagttgggattataggtatttgttattacgtacggttaatttttgtatttttagtagagacggggttttattattttagttaggttggttttgaatttttgattttgtgatttattttatttttatcgtttttttggttttttaaagtgttgggattataggtgtaagttattacgtttggttgagattagattttttataaaattattgttttgtttatattttgaattatatttagattttattaagtagttaattattataattttttttttgaagtattttgtattaaatataggttttagatttttaagttaggatttttttttttttttttttttttgagatggggcgttgtttttgttgtttaggttggagtgtaatggtgcgatttcgtttttgtaatttttgttttttaggtttaagttatttttttgttttagtttttagagtagttgggattataggcgtgcgttattatgtgtgtttgattttgtatttttagtagagacgggattttgttatgatggtttagttagtttcgaatttttgattttaggtgatttgttcgttttagttttttaaagtgttaggattataggtatgaattattgtattcggtaaatgattatttaagtaaatgatcgaagatttaagatataaaattatttgaagggagtggtttttatatttgtagggtattttatagagtaatttttttttatatgattttgtaggtggtggggaaatttttcgggtagttgtggtttgtgttatattatttattgattagaggtgttagtattagtgtttaagattaatcgatcgatcggtttatttatttattatttattgatttttagtgttattaaaaatattcggattttttaacgtttggtttagttttttattttattatagtgagaggttgtgtataggggtaatataggtaacggaattatatgaggtaaatatagagatttaggtttttgggagtagtaatgaggtttagttttgtagttataaaggtattattaaaaggtataagtaatggtaggtaatgaggttttatttggagtagtttagagtattttttacgtgtggtgacgtatgttatatatttattattattattattgttataaatgaagtgtatattttattgtttttgtttttaggaatttggaagtttttatttggtgttcgaggtgtggtttttattttaagcgtggggtatttttttttcggttttaaatttatcggagtttttagtaggttgcggtatatttgacggttggaaattagaatttttgggtggggattttttaaggtttttttcggaagcgtagggatttcgttgtttatacgtttttttttttttttttttggcgttttggggtttgaggtgggcgtggttagattagttttaggttcggggagtgtttcgttagcggtagtatatttttgtaagtggtggttagggttgtcgtggtaaaatgagttgttaattttaggttgataggggtgtggtcgcgatcgtaagggtttttgttgtcgggtggatttaatagggatgggttgttggggatagttgttggtgtggttcggagtcgcgggtaagtgttatttggcggttaggggatcgtttagtttgaggtatttttttaggtttgggggtggtcggttaataggttaggtgttagtggtttttttagaggtttcgaatttttatagttaaattttttcggttcgtgtttttggagtgcgggtcgagaagcgttaagtgcgtgcgaattttagagtttggattacgtagtttgggaaggaggaatattttttggggttttagtatcgttttggggcggggttattaatttaagttgaggaaagtattggggaggttgtaggattaaatttattgcggtttttaagttatttattgggaaaggcgttcgaggagagaaattggtagatttattagcgcgtattcgcggggtttttgcgatcggagtcgggtagtggtttttaggttgagagcgcggttgggtcgggtgacgggtgtggtcgcgatcgtaagggtagttgttgcggggtttttttttttttttatattttatttttattcgttttaacgttttgcgtttttttttaatattttttagg

SEQ ID NO: 1176 - DNA, 5760 bp, Artificial Sequence
  chemically treated genomic DNA (Homo sapiens)
tttgaaaggtgttgggagaaggcgtaggacgttaaggcgggtggaaataggatatgaaagaaagagagaatttcgtaatagttgtttttgcggtcgcggttatattcgttattcggtttagtcgcgtttttagtttggaagttattattcgatttcggtcgtagaagtttcgcgggtgcgcgttgataggtttgttagttttttttttcgagcgttttttttagtgaataatttaggggtcgtaatgaatttggttttgtagtttttttaatgttttttttaatttagattggtggtttcgttttaaggcggtgttgagattttaaagaatgttttttttttttaagttgcgtgatttagattttgggattcgtacgtatttggcgtttttcggttcgtattttagaagtacggatcggagaaatttggttgtgagagttcgaggtttttggaggaattattgatatttggtttgttgatcggttatttttaagtttaggaaagtgttttaggttggacggttttttgatcgttagatagtatttattcgcggtttcgaattatattagtagttgtttttagtagtttatttttgttgggtttattcggtaataaaagtttttgcggtcgcggttatatttttgttaatttaaagttgatagtttattttgttacggtagttttggttattatttataggggtgtgttgtcgttggcgagatatttttcggatttaaagttggtttggttacgtttattttagattttaggacgttagaggaggaaagggaggggcgtgtgggtagcgaggtttttacgttttcgggaggagttttaaggagtttttatttaggggttttagtttttagtcgttagatgtgtcgtagtttgttgggagtttcggtaggtttgaggtcggagaggaggtgttttacgtttaaagtgggagttatatttcggatattaggtgggggtttttaggtttttgaggataggagtagtggagtgtgtattttatttgtggtagtggtggtggtggtgagtgtgtggtatgcgttattatacgtgggaagtattttaaattgttttaagtaaggttttattatttgttattatttgtgttttttagtggtgtttttgtgattgtaaggttgaattttattgttatttttagaaatttggatttttgtgtttgttttatataatttcgttgtttgtgttatttttgtgtatagttttttattgtgatggggtgaaagattggattagacgttagaagattcgagtgtttttagtagtattgaaggttaatagatgataggtaggtagatcgatcgatcgattgattttgagtattagtattggtatttttggttaatgggtgatgtagtataggttataattgttcggagagtttttttattatttgtaaaattatatgaagggaaattgttttgtaaggtattttataaatgtgggagttattttttttaggtagttttgtgttttgagttttcgattatttgtttaaatgattatttgtcgggtgtagtggtttatgtttgtaattttagtattttgggaggttgaggcgggtagattatttgaggttaggagttcgagattagttagattattatggtaaaatttcgtttttattaaaaatataaaattagatatatatggtagcgtacgtttgtaattttagttattttggaggttgaggtaggagaatggtttgaatttgggaggtagaggttgtagagacgagatcgtattattgtattttagtttgggtaataagagtaacgttttattttaaaaaaaaaaaaaaaaaaaaaaattttaatttgaaagtttgagatttatgtttaatataaaatattttaaaagagaagttatagtagttagttatttggtaaagtttgagtataatttaaggtgtaaatagaatagtgattttgtaaaaagtttggttttagttaggcgtggtggtttatatttgtaattttagtattttgggaggttaaggggacggtgggggtggggtggattataaggttaggagtttaagattagtttggttaagatggtgaaatttcgtttttattaaaaatataaaaattagtcgtgcgtggtggtaggtgtttgtaattttagttatttgggaggttgaggtagagaattgtttgaatttggaaggtagaggttgtagtgagtcgagattgtattattatattttagtttgggtgatagagtgagattttattttaaaaaaaataaaaaataaaaaaattttggtttttatgttttatttaatattagatattatattatgagattatagaatttattttgtaaagtttttttaagttattgttttttaaattgtggttgtgtggtttgttttgaatattagtattagtattatttgggaatttgttagaaatgtagatttttgggttttattttagatgtattgaattagtagtttttggtggtaggatttagtgatttgttttaaaatattttttagatgatttttgttataaagtttgagaattattggtatttgttgatatagtagttgtttaataaaatttattggggttatatgttgtggtttatatttataattttagtattttaggaggttgaggtgggcggattgtttgagtttaggagtttgagattattttgggtaatatggtaaaatatcgtttttaataaaaatataaaaaattagtcgggtgtggtggtgtatgtttgtagtttttgttattcgggaggttgaggtatgagaattatttgagttttagaaacggaggttgtagtgagttaagattatgttattatattttggtttgggttatagagtaagattttgttttaaaaaaaaaaaagaaaaaaaggttgggtttagtggtttatgtttgtaatattagtatttttgaaggttgaggtgggcggattatgaggttaggagttcgagtttaagattagtttggttaatatggtaaaattttatttttattaaaaatataaaaattagttaggcgtggtggtacgcgtttgtaattttagttatttgggaggttgaggtaggagaatggtttgaattagggagggggaggttgtggtgagttgagattgttttattgtattttagtttgggtaatagagtaagatttcgtgttaaaaaaaaaaaaaaaaaaatttaaaaaaatttattggataattttgtgtttagtagttttatttatgaagattgggttttttttatttattgatagggttaggttttggtatattgttttgattttggttatttgtaaatataataagtaatttatatagtaaaagatagtttaagaaagtttaaagtttagaatttagattaaagaataatgtagaaattattaaaataggttaagtgtagcggtttatgtttgtaattttagtattttgggagtttgaggtgggtggattgtttgagtttaggaatttaagattaatttgggtaatatggtgaaatttcgtttttataaatataaaaaattagttaggcgtggtggtatttgtttgtggttttagttatttaggaggttgaggtgggagaatggtttgagtttaggaggtcgaggttgtagtgagttatgattacgttattgtattttagtttgggtaatagagtaagattttgttttagaaatagatagatagatagatagatagatagatagatagatagatagatagatagatagatcgatcgatagatagatagatagatatggggttttattatgttggttaggttggaattgaatttttggaattaagtgattattttgttttagttttttaagtagttgggattataggtgtgtattattgtgtttggtaggttttatatttttgttgtttttagatgtggataaagtttttattttttatttatgatttttttttattttttttatagtagttttgttttttatttgggataatttatttttagatattaattttgaattaatatggttgaaattagtttagattaaatttttaggagataaaaaatatttattttaatgtataattatagtatttatatgttttagtttagggtaggggttgggagttaggtaagaagggatgtatttagtttgttttgtttttaaagagcgggtaaatagttaagttattttttatttttagtatagatttttagaagttttagatattaggatgtaatggtagggtttattgttttaaaatagtttaaataatttgtttttaggaaggtaagttttttgttttttggttttttgtttattattaggatataatgtttttcgtttggttagatatttgttgaaaggttggatataggataacgtatttatttttttatttatattaattattttaggtttttgatattttattttggagtattgttgaagttagtttttggaggtagtgttgacgtagagggggtaattgagaatagagtttaaagttttttgggagcgtggaattgggaagtttatagtgtaggaggtgttgtcggagattttgtagaaaggaaagaaaatttatgaagtgggtaatgagattttgttgtggtttttgttttttaagattttttaatattttatttttttaatggttttgattttattttatttgttagtagttatgttttttgtagtatatttttgcgggtagttttgattttattttagaagtagaatagggagaggtggtattgagtcgagggttggtatttattattggttttgtttgatatttattttttttttagttggtttagaggtagtttaattgttagttttttttttttttttgaagatggagatgtaatttattgagttttgtgggttttgagagaagatgaagttattgatatgagttatagttatagtatagagtacggggtattaacgtgggcggagcgtattagtaattagggttcggaagtagagttgaaggagggttaggttgtttttaggaggtattgtgtaatattttagggatataggtaattgtgataggggaaatgacgtgttgagggggagggtaggaatgtatatatatatataaggtgtgtggataacgattatatgaaattaaattatgagggtagagattaggttttagataaatatttgtttttttagtataaggattagggttaaagattatagagtagatgttggggaaaattgggaattgagaagtagttattaaaaagtatgaaattggttatgtgtagtgggttacgtttgtaattttagtatttgggaggttgaggtaggcggattatacgaaattaggaatttaagattagtttggttaatatggtgaaattttatttttatcgaaaatataaaaattagttggatatggtggtgggtgtttgtagttttagttatttgggaggttgaagtaggggagtcgtttgaatttaggggcggaggttgtagtgagtcgagcgcgttattgtattttagtttgggtaatagagtaagatttcgttttaaaaaaaaaaaaaaattagttaggtatggtgttgtgtgtttgtaattttagttatttaggaggttgaggtaggagaatcgtttgaatttgggagttagaggttgtagtgaattaagattattaggttattgtattttagtttgagtaatagagcgagattttgttttaaaaataaaaataaaaatttaaaat

SEQ ID NO: 1177 - DNA, 7057 bp, Artificial Sequence
  chemically treated genomic DNA (Homo sapiens)
gtaaataaatagtgtaattagtgatgtttgttatagggcggttgggggtgttggataagtgggtatttttttgtggttttagggttttttttattatatagtttttgtattggttagtttgggtttttttatagtatggttgttttaaggtagttaaattttatatggtcgttgaagatttaggtagaagttgtatggttttttttagtttattttgggagtttcgtaattttattttagttgaattttgttggttgtatgtaagttattaaattgtatagatttgagaggagggtgttatagattttagtttttgatggaaagagtattaagtttttattgtggaaatatatatgggatgaaagatattgttataatatggtaaaattttatttttataaaaaaaaaaaaattaattaggagtggtggtgtatatttgtatttatagttatttaggaggttgaggtgagaggattatttgagttttggaggacgaggttgtagtgagttatgattatgttattgtattttaatttgggtgatagagtaagattttgttttaaaaagaaaaaagaaagagattgttgtagtcgtttttggaaaatagaatttgttttagttgttatgtatggttggaagaggtggttaatttttgatatttaaaagtgtggaaggatttgttaagtttaagttattttattattttagttttaatagatgtaggaaagtaaatatttatttttgttggttttaagagtgggtaatagaggtttttagatagtaggaatttttttaaatgtgggaaggagttgtagatgttaggtaatttttttcgtaaaatatgtattatagttcgtttttttggttttttttgttgtgttttgttttttagataaggttttatttttttatttaggttggagtgtagtagtacgattttggtttattgtagttttgatttttttagtttaagcgatttttttattttagttttttgagtagttgggattacgagtataaattattattattttcggttaatatgtattttttgtagatatagggttttgttatgttgtttaggttggttttaaatttttgggtttaagcgatttatttgttttagttttttaaagtgttgggattgtaggtatgagttattatagttggttttgaatgtttaatattaataggttttttgtagaagtttttatcgaaatttttttcgtataatcgttttttattgtataattaaaaaatgtatttatattgttatttaatataaaaaattttaatagttttattttttagatttgagattggaattagggaagaattatttttttttaaatatgttattttttttatattttataagttgtgagttagttgtaaagttaatcgttatatattgtgtgaaaaataatgggaaaataggttaagaaaagataagttagttaggtattgtggttttcgtttgtaattttaatatttttgggaggttgaggttggtggattaaggttaaataaataaaaggtataataacgtcgaagtaatgcgggtggttagcgtagggattagtaggtatgacgagcgagagttagcgaataacgagttgaaattcggattttaaaaatatatgaaaacggtaagatttggttaatcggtggtggttatattatataattttagtattttgggaggttgaggtaggaggatcgtttgagttagagttttagaaaagataagttttgttagttaaaatatgtgaggatatatatttgcggtcgtatggatggaattagaattttttttttttttttttttttgatattgagtttcgttttgttatttaggttggggtgtaatggtatgattttagtttattgtaatttttattttttaggtttaagtaatttttttgttttagtttttcgagtagttgggattataggtatttgtataattttcggttaatttttttattttaagtagagagggggttttattattttggttaggttggttttaaatttttgatttcgggtgatttatttatttcggttttttaaagtgttgggattgtaggtatgggttattatgattggttatttttatatttttttgtagagacggggtttcgttatgttgtttaggttggttttaaattttcgggtttaagtagttttttcgttttaggtttttaaattgttgggattatagacgtgagtttttgcggttgatttggattttagtttttattttaagtgagatagaagttatgggaggattttggggtagaagagtgatatgagttgatttatatgtaaaaggaattttttaggttgttttgtgagaataaattataggggataaaggtagatgatgttataagattagtttttgtaagtttgtaagggtttattgttgttgttttggtgtttttgattttttttttttatatatatgttatagagttttttttttttatttagaattttagatggttaggtttttttttttttttttttttttttttgagatagaattttatttttgttgtttaggtaatatcgtgtagtggtacgattttagtttagtgtaatttttattttttagatttaagcgatttttttgttttagttttttgagtagttgagattataggtatgtgttattacgtttagttaattttgtatttttaatagagatgcggttttattatgttggttaggttggtttcgaatttttgattttaggtgatttatttatttcggttttttaaagtgttgggattataggtatgagttatagcgtttagttttagttggttgggtttttgagggaggtggaagtgggggatggttgttgagagggtatgtattagggtttagtttaaatagaaggtgtataggttggggatagaagagttagggtatgggtgtcggtgtttatagtgtgtgagtttgatagtatttgggattgttttggagtgtcgtcgtattttttatgagtgagtttgtattgtatattttgggatgttttagtttggatggaatttgtacgtgagtttgtgtgttttgtaaataaattttttttgagtatttgtattgtgtttggttttgtgttgggcggggtgtttaggggaggagtttttagtttattatagtgattaagatatttttggttttgtttttataggtttatagtttattgagggagatagatttatttttagttagggatttttagagtgtgtcgggtttaggtgggggagtttagagggggaatttgatttagttagggaaggtagaggggattttttggaggaggggatggtatagttaattttaaaaggttttttttaatgtaatagttgttttgtaggatggatgtagtggtttatgtttgtaattttagtattttggaaggtaggaggattatttgagtttaagagttggagattagtttgggtaatatagtaatattttgtttttattattaaaaaaatataaaaattagttggatatggtaatataagtttatagttttagttatttgggaggttgaagtggaaggattgtttgagtttaggcggttgaggtttgaatgagttatgattgcgtttattgtattttcggttgggtaatagagcgagattttgttaaaaataaaataaataaataaaaaaaacgttggttttttgtatgattaatggataaagtaattttgattagtttaataatttttaggttgatttgtaatttaagttttttttgtatgtttgagtaggtaaagtttagttttagggttattttaatttttaggttgattagaagtttgggtaattttttttagtgtggttagcgattttttatttttttacgttttgattattgttttgggtaattagtgatatttagtgggggattttgttttagtttgatttggtttgtaggggttttgggtagtcggatttgtgatttacgttttttagtagtggttggattttttttttttttcgtaggtgttttggtttttttttttgttttttttatttgttttggttagtttgattttttttttttttataaggttgggagggaatgaaggagagagcgggaaggaggaagggagggtggtatttttgggattttttggatagggggaagagtgggagggttttttatgggtgagtaagtagagagggtatttcgtattttatttttagttttattatcgaagcggtttaggaggatttggatttgaagattattgaaaataagagattaaatcggttgattttaggttattggttagacgaggaaagtagtttagagtattgattataggggaaaatattttcgggtatattgggagtagttgttgggggttattggttaggttgcgggggttattggttggattgggagaggttagtgtaggttattcggacggtacgtttggggttattagttatattgggagaggttatcgtaggttataggttgtagtggggttttttggttaaaatcgacgatgttagtttaggttgttggttatagtggggacgagtgtttaaggtttttggttagaataacgaggagaaggttcgcgattgtttggtgagattttagttcgggttattggttatattggtcgattaggtttttcgttgtaggcgttggttagtaagttcggatagttttaggtttgggggcggacgagtttcgagtttggtttcgtgtattgggaggttcgtttcgggtagtgggaggttttggtttcgcgttcgggtatcgggggacgaggggggtttggagggcggggcggggcggggttgtcgggggcgggtttttggtttttagtttcgtagcggtcgagttgtagttcgggtttagttttcgtcgtcgtcgtgaatatggagttttcggacgtatcggtttaggcggtcggggtttcgcggttgttgttgttcgtagttttgttggcggcgtatttaggtatggttcgggttgagggtaaggtgggattggggagaggtttttggggatttcgggaaagcgaggagaaagggttttattttgattttaggaagtaaaatgtggggattttaaggaggagggatatgggagtgttggaaggtacgttttttagtgagagagatttggggatagttaggtaggagagttggggatatttaggcggtggattagagataattagagaagttagttttttttttatttagtattttggaatttgggttttatttgtttttttttttagattttggaatttgggtttttagtttttttttttttagatttaggagtttaggtttttagtggttagaatagttttttttagggtatagaggattaaaattttagggtttttttttttaaaggtttttaagttttgagaggtttagggattttttagagaagcgaggattatgtgtttttatattagcgatttatatgtatttaggagtttttagagtttagtataaagaattcgttttttttaggaaagggttggagtattagtttcgggtagtgatagtggaataaagtgtttttaagtgataggtttttttttggggttttagttatatttatatatttgtatgaggatagaaggagaggagtcgggggttggggggtggggttgggggtgttggggatagagggatagagagatgagagagattggggaagagagaggaattttttgtttttatttgtttgtagattagatttagttttaggtattagtttggatttcgttatttttttttggggataggttggggttagaggtgagcgtttgggaatttaggtttttggtatatttatggttaatagtgggtttttaggggtagggttgggttagattgagtagagaagggaagggagtttttaagaagtattgagagttgatgttaggatgttagtttagagggtgagggagggtggtggtttttttataataattattttattaggttttagtttttttttttttttgattttaggagtttaggtgtttagttttttaagattttgggttttaattttatttttttgtaagatgattcgatttatttcgtttgttgttgtattaaattgaggggggttaagaggcggttgggggttttggttttaggtcgggtaggttttagttagtttgttttttttatatttttgaaatttgtttagttttgtttttttttatcgtttttatatatttatttcgtttaagtttcgggtttagtcgtagtttatattttagttttttatttatgggagagcggaagagatttagggattgagtggtgtaggtgtagagagaggtagagatagggatagagatggagatttaagaggagagatatacgtaaaggtggagattaggatggagagaaatatttatttattattatagaggtggttttgtttagggtgttggaggtaaatggttgagttaggtttggttttgttttggggggtggcgtgtgttttgttgggataagtaaaggttggtgtagtattattttaggagtgtttagcggaggttatagggttttgtgtagtttagaggaggagttttgagttttgtaagtgtagggagagatggatttgagatttagagatgtagggagaagggatggagggcgaaaggattttagggaggaggggttggggtttagatttttgggtttgagggaggaggggttggggtttggatttttgggtttgagggaggaggggttggggtttggatttttgggtttgagggaggaggggttggggtttagatttttgggtttgagggaggaggggttggggtttagatttttgagtttgagggaggaggggataggggtttagatttttgggtttgagggaggaggggttggtatttggatttttgggtttgagggaggaggggttgggatttggacgtttgtgttttgggggagaggggattttgtttggagggttttttttgttggtgtggtggatgatagtttagttgtttttttgtaga

SEQ ID NO: 1178 - DNA, 7057 bp, Artificial Sequence
  chemically treated genomic DNA (Homo sapiens)
tttgtaagagagtaattgagttattatttattatattaataggaagagttttttagatagggtttttttttttttaggatataagcgtttaggttttagtttttttttttttagatttaggagtttaggtgttagtttttttttttttagatttaggaatttgggtttttgttttttttttttttagatttaggagtttaggttttagtttttttttttttagatttaggagtttaggttttagtttttttttttttagatttaggagtttaggttttagtttttttttttttagatttaggagtttaggttttagtttttttttttttagatttaggagtttaggttttagttttttttttttgagattttttcgttttttattttttttttttgtatttttgggttttaaatttatttttttttgtatttgtagagtttagggttttttttttgggttgtatagggttttgtggttttcgttgaatatttttggggtaatattgtattagtttttgtttattttaatagagtatacgttattttttagggtagggttaggtttggtttagttatttgtttttagtattttgggtagggttatttttgtgatgatggataaatgtttttttttattttggtttttatttttgcgtgtgtttttttttttgggtttttatttttgtttttgtttttgtttttttttgtatttgtattatttagtttttgggtttttttcgtttttttatgagtgaggggttggggtgtgggttgcggttgggttcggagtttaggcgggatgggtgtgtgggggcggtgaggggggatagggttgggtaggttttaggaatgtgggagggataggttggttgagatttgttcggtttggagttagagtttttagtcgttttttggttttttttagtttgatataatagtaaacgggataagtcgagttattttgtaaaaggataaggttgaggtttaggattttgggaagttgggtatttggatttttgggattagagggaagaggaggttggggtttggtggagtagttattgtagaaaaattattatttttttttattttttgggttggtattttggtattagtttttagtgttttttagaaattttttttttttttttgtttaatttggtttagttttatttttggggatttattgttgattatgagtgtgttaggggtttggatttttaagcgtttatttttggttttagtttgtttttagggaggggtgacggggtttaggttggtgtttaaggttgggtttgatttgtagataagtggaggtagagagttttttttttttttttaattttttttatttttttgtttttttgtttttagtatttttagttttattttttagttttcggtttttttttttttatttttatgtaggtgtgtaaatgtagttgaggttttaggaaggggtttgttatttggaaatattttgttttattgttattgttcggggttggtgttttagtttttttttgagggaggcgggttttttatattggattttggaaatttttaaatatatgtggatcgttggtgtggggatatatggttttcgtttttttaaggggtttttggattttttaaaatttgaggatttttgagggagagagttttggggttttgattttttgtgttttgggggaagttattttagttattggaggtttggatttttgggtttgaggaaagaggggttgggggtttagattttagggtttgagggaggaggtaggtgggatttagattttagggtgttgagtgggaagggggttgatttttttggttgtttttgatttatcgtttgggtatttttagtttttttgtttggttgtttttagattttttttattggaaggcgtattttttaatatttttatattttttttttttggggtttttatattttgttttttggggttagggtaaagtttttttttttcgttttttcggggtttttaggggtttttttttagttttattttgtttttagttcgagttatatttgggtgcgtcgttagtaggattgcgagtaatagtagtcgcggggtttcggtcgtttgggtcggtgcgttcgggggttttatgtttacggcggcggcggagattgagttcgggttgtagttcggtcgttgcggggttgggagttagaggttcgttttcggtagtttcgtttcgtttcgttttttaggtttttttcgtttttcgatgttcgggcgcggggttaggattttttattgttcggagcggattttttagtgtacggggttaggttcggggttcgttcgtttttaagtttagagttgttcgggtttattgattagcgtttgtagcggggggtttgatcgattagtgtagttagtgattcgagttgggattttattaggtaatcgcggatttttttttcgttattttgattaggggttttgggtattcgtttttattgtgattagtagtttgggttggtatcgtcgattttaattagaggattttattgtaatttgtggtttgcgatggttttttttagtgtaattaatggttttaagcgtgtcgttcgagtggtttgtattggttttttttagtttaattagtgattttcgtagtttgattagtggtttttagtagttgtttttagtatgttcggagatgtttttttttgtggttagtgttttgggttgtttttttcgtttgattagtagtttggaattaatcggtttaattttttatttttaatggtttttaaatttaggtttttttaggtcgtttcgatgatggggttgggggtggggtacggggtgttttttttgtttgtttatttatggaaggtttttttatttttttttttatttagggaattttaggaatgttattttttttttttttttttcgtttttttttttatttttttttaattttgtggggaagggaggagttagattggttaaagtaggtgaggagggtaggggaagaggttagggtatttgcgggaagggggaggagtttagttattgttaggaagcgtgggttataggttcgattgtttaaggtttttataggttaggttagattgggataaaattttttattagatgttattagttgtttaggatagtggttagaacgtgggagggtggggggtcgttggttatattgggagaggttatttaagtttttgattagtttgggggttgaggtagttttggagttgggttttgtttgtttagatatatagagaaggtttggattataggttagtttgggagttattagattggttaaggttattttatttattggttatataggagattaacgttttttttgtttgtttgttttgtttttgatagggtttcgttttgttgtttagtcgggaatgtagtgggcgtaattatagtttatttaaattttaatcgtttgggtttaagtaatttttttattttagttttttaagtagttgggattataggtttgtgttattatgtttagttaatttttgtatttttttggtaatagaaatagggtattattatgttgtttaggttggtttttaatttttgggtttaagtgatttttttgttttttaaagtgttgggattataggtatgagttattgtatttattttatagagtaattgttatattgggaaagattttttaggattaattgtattatttttttttttaggaagttttttttgttttttttggttgggttaggttttttttttgggtttttttatttgagttcggtatattttgggggtttttggttggggataggtttgttttttttagtggattgtgagtttgtgagggtagggttagggatgttttgattattgtggtgagttaagggttttttttttgggtatttcgtttagtataagattagatatagtgtaggtgtttagggaaggtttgtttgtaaggtatataaatttacgtgtagattttatttagattggagtattttaggatatataatataaatttatttatggggaatgcggcggtattttaagatagttttaggtgttgttaagtttatatattgtgagtatcgatatttatattttagtttttttgtttttagtttgtgtattttttgtttgggttggattttggtatatgtttttttagtagttattttttatttttattttttttaagaatttagttagttgaggttgggcgttgtggtttatgtttgtaattttagtattttaggaggtcgaggtgggtggattatttgaggttaggagttcgagattagtttgattaatatggtgaaatcgtatttttattaaaaatataaaattagttgggcgtggtggtatatgtttgtaattttagttatttaggaggttaaggtaggagaatcgtttgaatttgggaggtggaggttgtattgagttgagatcgtgttattgtacgatgttgtttgggtaataagagtgaaattttgttttaaaaaaaaaaaaaaaaaaaaagaagaatttagttatttgaggttttgggtgagggaggagaattttatggtatgtgtatgaaggagaaaagttagaaatattaaaatagtagtagtggatttttgtagatttgtagaaattagttttgtaatattatttgtttttgttttttgtaatttatttttataaaatagtttgaaggattttttttatatgtgaattaatttatgttatttttttgttttagggtttttttatgatttttgttttatttagggtaaaagttgaggtttaggttagtcgtagggatttacgtttgtaattttagtaatttaggagtttgaggcgggaggattgtttgagttcgggagtttgagattagtttgggtaatatagcgaaatttcgtttttataaaaaaatataaaaatggttagttatggtggtttatgtttgtaattttagtattttgggaggtcgaggtgggtggattattcgaggttaggagtttgagattagtttggttaaaatggtgaaattttttttttatttaaaataaaaaaattagtcgggggttgtgtaggtgtttgtaattttagttattcgggaggttgaggtaggagaattgtttgaatttaggaggtggaggttgtagtgagttgagattatgttattgtattttagtttgggtgatagagcgagatttagtattaaaaaaaaaaaaaaagaaaaagttttaattttatttatgcggtcgtaggtgtatatttttatatattttaattaataaggtttattttttttgaaattttggtttaagcgatttttttattttagttttttaaagtgttgggattatatggtgtggttattatcggttggttagattttatcgtttttatgtgtttttgagattcgagttttagttcgttgttcgttggttttcgttcgttatgtttgttggtttttgcgttggttattcgtattgtttcggcgttgttgtgttttttgtttgtttgattttaatttattagttttagttttttaaaaatgttgggattataggcggaagttatagtgtttggttgatttatttttttttgatttgtttttttattattttttatatagtgtgtgacgattaattttataattagtttatagtttgtggaatatggggagaatgatatatttggaggggaatggtttttttttgattttagttttagatttggaaaatggaattattgaaattttttgtattgggtggtagtgtgaatgtattttttgattgtataatgagagacggttgtgcggggaaagtttcgataagaatttttgtaaagggtttattgatattgaatatttaaagttagttgtggtggtttatatttataattttagtattttgggaggttgaggtaggtggatcgtttgagtttaggaatttgggattagtttgggtaatatggtaaaattttgtatttataaaaaatatatattaatcgggggtggtggtggtttgtgttcgtagttttagttatttaggaggttgaggtgggaggatcgtttgaattggggagattaaggttgtaatgagttaagatcgtgttattatattttagtttgggtgaaagagtgagattttgtttaaaaaataaaatataataaaaaaaattaaaggagcgggttatagtatatattttgcgggaaggattatttagtatttgtagtttttttttatatttaaggaaatttttattgtttgaaagtttttgttgtttatttttgaagttaataagaatggatgtttgtttttttgtatttgttggagttaaggtgataaggtgatttaagtttggtaaatttttttatatttttgaatattaggaattggttattttttttagttatgtatggtagttgggatagattttgttttttaaagacggttataataattttttttttttttttttttgagatagggttttgttttgttatttaggttggagtgtaatggtatgattatggtttattgtagtttcgttttttagggtttaagtgatttttttattttagttttttgggtagttgtgagtataggtgtgtattattatttttagttaatttttttttttttgtaggaatggggttttgttatgttgtgatagtgttttttattttatgtgtgtttttataatgagagtttgatattttttttattaagagttggggtttatggtattttttttttaaatttgtgtagtttggtgatttgtatataattaatagaatttagttgaagtgaagttgcggaatttttaaaatgagttagaaaaggttatgtagtttttgtttgggtttttagcggttatataaagtttgattattttgaggtagttatgttgtggggaagtttaagttggttagtgtagagattatatggtgggggaggttttgagattatagagagatgtttatttgtttagtatttttagtcgttttgtggtaagtattattgattgtattgtttgtttgt

SEQ ID NO: 1179 - DNA, 15767 bp, Artificial Sequence
  chemically treated genomic DNA (Homo sapiens)
taaaaaaaaaaaaaaaaataataataataataataaaaaatagtgtagagaaatagttaagttttggatgagggttagtattataagtttgtttaattttaaaagtatatagttgagtttgaaattgaaggggattagaatataatattttaaaatttattattttgatgtgttgattattttgatttgaaagtaattgagaaattgtagatgtaggagaggttttttgttttttttatttttatttaaaaataggatataaattttttatgagaaaggtgttatttttgtatttggaataagagaatatttttattattggagataaggagttaaaatagattttatttaatttttattttttattaattttttttatatatattttagttatttttttataatttattgtttttagtttaaattttttttttttttgttttgtaatatttttatagttgattgttttttgttaaaatggtatgtaattttttgggtttaatcgtcgttttgggatttttttgtttttttaggaagtttttgtgttatataaaaatattaatattaaataaaattattgtgtttttttttttgttaatttgttttttgttagtttaatttataggttttagtttgagaattaaagagggtagaggaaaagtttttttttttttataaaattaagttagatatgaggaaagttttgtttttttttaaggtgtgaaaggagtattattattatttgttttgtttagtttggtagttttataagtagtattaattataaagatagaagtaaaagtagtatgataagaaggtaggagtagaggaatagatagttttgttttggtgtatttatgaagtagtataataataatttttagagagaggtgggtttgattttgggtttttattgttttgaattttgggttataataatttgatttaaaaaataaataggttgggtatggtggtttatatttgtaattttataattttgggagattgaggtaggcggattatttgaggttaggagtttaagattagtttggttaatatagagaaattttatttgtattaaaaatataaaaattagtcgggtatggtggtatatatttgtaattttagttatttagaaggttgaggaagtagaattttttgaatttgggaggtaaggttgtagtgagttgagatcgtattaatgtattttagtttgggtgatagagtaagatttcgtttgaaaaaaataataataaaataagataaataaatatatattgggaaatataatgataaagagtaaaattgattatataatatttaaaatatttacgtaaaattttagatgtaaataaatataattatttggaggtaggaaagtaggtttgaataaaaagtagaattataattaaatgtagagaggggaaaaatataggttagtttaatattaattggtgtttataagatataatataaattattgttttaattttttaatgaaattattttaaaaatatttagttttttgttaaatttagattataaaagtatattttggtttgtatatttttgaaagaaagtatattagtttttgagttattattaggaaagagtttgaagagttaaataaagagttataggattttaaattatttttagattataaatatatggtaataaggaagtgaatgtatgggttttattagataggaaattgggtagttttgtggggttatttatggggagatagttgattataagggataaattgtatgtaaatgtagtagaataaaagatagtataataataaaaataatgatttgggatttgtatgtaaatatatgttaatatttaatataaggatgtttgaatttttgaaaatttttggggtttatagtttgttgtttttttattgaaatggatgttgattagtagaaataaatatatttttggtgtttttttttatgtttttttttttttttttatatttttgtaagaattgttttttagtatgggtgttggtagtttgattttttaatggtattatgagttaattgggaatgtagaaattatggtgtttattatttcgttaaatttttttttttaatttttgtttgttaagaagatgtgagattatttggaaaaagaaagagtagattattaataaaaattaagtgtaatttaatattattggtttaagttaaaaattttgttataaaagtaaattggaaattatagttttgaaatagagtaatggagttttaaataaagaagtattttgttgataagttagttaaattttataattttttaggtaagtaaattgagattgagagattgttttagtgatatataattagtgagtggtaaagttgggattaaaatttaagttagtgttttttttgggtaattgggaaaatatttagataaatagtttgttaggggttgtaatatatgaatttatgatatagtttgaggaattagagatttttaatttagaaagagaacgatttagggatatggtagttatttttaaatatttgaaggtagaaaaggttttgaatttattttgttagttaaaggagattttaatagtttaatataagataaaattttttaaatagttaaatttggttaaaattattggggggtgagggatgatgagttttttgttatttgaggtattttataatagattgaaaaataatttagagagtatgtttttgtttatagagaggggtgaattaggggtgtgtaggagagaatttaggtatgaatattatttggatgaggtgatttgtaagaggatgtggttttttatatttaaattttgggattaaataaggttttatttttgtttttaaattttaaaatttatttttttatttgtttgtaatagtttatattttaatttattttatattttagggtattatgttttgaatatgtgatttgaatatcgtggtagaaggttatttatatttatttattttattttatttttatatatttgtagtgagttttttgaatttattatgtaaatatatgtaaattatatgtaaatgatatagtttaagaaaatgataaaatttgatggttttaattgagttattagatttttttttaagaaggaaagtaatatgttttttaatatttttggggtaggagataattttttgagagtgatatttatacgatattggaattcgttatttagtttttgttttatattttgtatatttatgtgggattttaagataagaaaagtatttttatatatatgattttatttgatttttataattattttgtgatgtaggtagaagaggaattataatttttgttttttagatgggaaaacggatttagagaagtgaaatgatttgtttaaggttatttagttggtaagtaaggatttgcggtttattattagattttttttagtttttagttttttttaatatatattgatggatgttttatttgaagtaaggtggttcgttattggtttgggtttgtttagattgtgttttgttgatagtatttttagagatgattttgttgatgaagatggtattttaagggtgattaggaaaagtttaaatatgtgtagtaggtttagtagattgttaagtatatattttttttaattttttttgttttttagtattttttttgaaatttttagatgaataatatttttcgttttatttattttttagtttttttaggaggtaaagtttttttttaaattgtgaagagtagtagtatagtttttgtagtgagattttttggatttgaagttttaatttattattttttaattgtgtggtttggagagattatttaattttttttaagtattagtttttatatttataaaatgagggaaataataatattttttttatagaatatatggaaatattcgaggataggaaaatgtagtaaaaaattgtattaaatttgatttagtgtttgatatatagtaaggatttaataaatggtagatattatagttatttgatttattatagtaatattgtagaggtggtggtggtggtggtggtggtagtagtagtagtagtagtagttaagttattgtgaattttgatattaagaattgggtttttggaaatggagtgggagaatagtaatattaaatatattttgtatgttagagggttgaagaatagatagaataggtagttaaatgtagtttattgaggaatgtttgaattttggttttttttaattattgttatattttgttttataataagggtaattgtaattttgttttaaagttatttttaagaagaaatagagttaaggttggtatttttaattttatttttttttagttaggttgttttatttatggtagtgttttttatttttttaggttaggttaggagggaataagagagtttattttaattgttttaataagtttgaatcgttaggttaagagatgaagtaattttttttttatacgaagattagaggtggggatggataaggtggttaaggtagtagttgaggtttaaggagtagatatatttttaagtttgtttttttttgttttagtttttagtttagtaggtgttattgaagggtttagttttttagtttgtttttgtagagtgttttgtttttttatgttttttgatattttttttatttatttatttaggataattaagaaagtggtttttttggtgagtagagtttttatagtttttttcggggaaaaggattagaagttgttggagttggttaaatgtttgaagttggtataaagttaattggaattattataatgagagtttgtgtgattagtttaaaaggattgtataattgatttatgtttagtgttaggaaatgtaacgggttattttggggttgggtttttagttatttttggtaaagatgggtggtatgtaaaagggatttttttttttttttttttttttttttttagtatagagttatagaatgttgagtagttaatagtattttttgttttaagattatttttttgagtatttttttggttgttaaattgttagggtttttatagtttgattttattttttagttttaagtattaggtaaatttattaagtaattttagtttgtgatggcgtttgacgttagttgttttttttgggtggtgttgttttttgtcggttgtaaagttattattttttgggattagatgtgtattgaggtgagtttaaattgtttgtttttatgtagattaaattgtttgaaaattttgagatttagtacgtagtttaatttgagttttggtattttaatatttagtgtttttaaaaaggaaataaggtgtatatataatttttttattattgtgagaaaggagttaaagaattttgttaggggattatttggtggtattttaataggaagtaaagagaattttttttttttttaaataattttatttaaataattttaagtgggttataagatattaatagggtttgtgtgtataaagtagatttttaaatttgttttaatttaggggagttgttggtttaatatttttatttttatatggtttttattttaatgagttttttggtttttttttagggtgagaattagtaaagatagcgttgtgttaggttttcgagtattgaaaagattattttgaatgagtttggtttttttttggatttggatagttttttatttgttttattaatttataggaggaaaatttgagaatagagttaaattgtattttttgttttggattatagtaatatttattaatttgtgggaagtttttggaggggataatgagagaaaaaggagaagggttttcgttttttgttattttttaaaatgttttaaatttttttttattttttttgattttataagtgattaatattacgtggtttgttagataagggttgtatataggaggaattatgagttttggtggtttggtgagttgttggtttgggttgaggtaaaaagaagagtaagagttaggaatagttagatgtggagttgttttggggtaggattagaaggagattagaggattaggaagagtagagtaaagttagtattggggtaaggtttagagttgggtgagtagagttttgttggtttggtattaggatggaattagtagtaggttaagaggaggtattatgttaatgagaaatgaaggttgggaaggtgtgtgttgttttgtttgggttgttataataaatgttatagattgggttaggcgtggtggtttacgtttataattttagtattttgggaggttaaggtgggtgtatgttttgagattgggagttcgagattagtttgggtaatatggtaaaattttatttgtattaaaaatataaatattagttgggtatggtggtatatgtttgtaattttaattattcgggaggttgaggtaggagatttatttaaattcgggaggtagaggttgtagtgagtcgtgattgtgttatcgtattttagttttggcgatagagtaagattttgttttaaaataaataaattaaaaatatattaaaaaataaaaataaattaaaaaaattttgaatattatagattaggtgatttaaataagagaaattgattgttttatagttttggaggttggaattttaagattaaggtgttggtagagtttgttgtttttgtattttcgttttttggtatgtagatggttattttttttttgtgtttttttatggttttttttgtgtgtatgagtattggtgtttttttgtttgtttaaatgtttttattttttaaggattttagttagattggattagggtttatttatatgattttagttttttttaatgatttttttaaaggttttgtttttaaatatagttatattttgaggttttgtgggttaggattttaatatatgaatttggtggtgggggagagaaaatttagtttataatagaaggagaagagtaagatatttttattagttttagaaggttgtttttttattttttaggttggaaggtttgtaattgtttgataagttttttttgtttattgtttagataaaattaatttattgagattacggtattgtagtaaagaaagtttaattgatgtgagattggttacgttaggtgggagatagagttattatttaaattaattattttaaagttttggagattaggagtttttaaggatagtttggtgggtagggtatacgggaatggtaaatgttgattggttggggaagaagttataaggttttggaaaatggtttttagttttgagtttatttttgggtgaggtcgtaggatggggtgagttaggagtttgggtggggttagtttgaaagatattttaaaaaaaaattttagattttataatagatgttatttataggagtaattggggaagttataaattttgtgatttttggttatatgatttttgaatagtaaggagtaattatgttaatattttaggtaaatttaagttttttttataattttaacgggtgatttttttttagttttaaaaaggtgtttttgttttaagaagggttattattatttttgttttaaggttaaagtataaattaaatttattttaaatttagtttggtttatatttaggaatgattaaggagaaattggaggttagaagtaagatggagttaattatgttatattttttttgttgttataattttgtaaaggtggttttaggttaatgttatatagatatttgggaggtatgataagtgggtaggaataagggtattatttttttagtgattaggaatataggttattatttttaggagatagtttttaataggataatattattatttaattttattttattgggaagtaggttgttttaaatgttttatttttatatatttataagtttaattttgaaatttttgtattagcgggaggttttttagttttttggttgtttgttttggggtttttagtgttatttatgttttaggagtggtgtttagtgttttagggtttgtaagtttagttttgtgtggtagtaaagttttttttttttggataagttagatgaaattgaaattttttaatataataatatttttgtagttttttttttgaaagaagtttgattttaaatgattttgttagttatttagttagtattagatttgtatttttttttgttttatttattacgtgtgagtgagtttttaagaataagattcgaaggttgtttagggagtttttgttattgtgtggatattagggagggagttgggggatgtaaagaaaaatggaatttatttttgagattttggaattttttaggttgttggtaagggataaaaggaggggtggttaaaagaataaatttttgtttttgatttaagggtttggtcgttttttaagggtaaattatttcgaattttatttatttttttaagttgtttttttttttttttttttttttttttttttagtttatgtatagttaattatataatgtttgtatgtttatgtgattgttattattttattaagtttgtgaataaaagttttttgaggtggaatttgacgaaggagattttattttaatgaatagttcgtaaattgaggagatacggtttttggtacgtagtttttggaaggtgtattttagggaataaatgaggaatttggtttttatagagagaaatttttttatttagttttttaattaaatttatttacgtagtagaaggatttaaatttgtttagttttgatcggttggtgtagttggattttgattggttgataaagttgagttttgattggttggtttaggtgagattagaaagttttaaaattaaatagagatgggggtttttagaaatttagagtatatgtgtgatttttagttagtaagtggttgttcggttgtatttaaaatttaggtttagtttgttatttgggatttgatatagtttggatttgtgtttttgtttagattttatgttgtattttaatttttagtggtggaggtagggtttggtgggaggcgtgtgggggtagtttcgttatagtttggtgttgttttggtgataatgagtttttttgagtttgagatttggttattgaaaagagtggtattttttttgttatttttttttttttgtttttattatgtagcgtgtttgtttttcgtttgttttttgttatgattgtaagcgttttaagttttttttagaagttaagtagatgttagtattgtgttttttgtagagtttgtagagtagtgagttaattagattttttttttttataaattacgtagtattgtttttttttttttttttttttttttttttttttttgagacggagttttattttgtcgtttaggttcgagtgtagtggcgtgattttagtttattgtaagttttattttttaggtttacgttattttgttttagtttttcgagtagttgggattataggcgtttattattatatttggtaatttttttgtatttttagtagagacggagttttattttgttagttaggatggtttcgattttttgattttttgattcgtttatttcggttttttaaagtgttgggattataggcgtgagttatcgtgttcggttttaaagtttttaattttaatatattttaatttattttttttttgtatttttagtataattttgttttgtttaagaaatttttgtttattttaagatcgtgatattattttatgttttttttagaagttttattgttttgtatttatttgttatttttaggttttatatttagatggattaaaattgtttttgttttttatatataagtaggagttaagattaatttttaaataaaattttttgtttggaaaaatatttaaatttatttataagttttgagattattatagtgaatatttataggttatatagatttttttattgttaaatgttatatgttttttttttttgtttttttttttttttgtgaatgtttgtgtttttatatatgtgtgatttaagtaaaaatattaggattcgtattaagtttttggaagttgataaatatgtaaagaatagttggaattcgtgttttgtgatttggattgtggtattattttagatgtatttttgaaatatttatttgggaatgtgggtatgttttttttttttaagtgagtttagtttggttattttttttttttaaaattgtgatagaagtgagttttttagtttttaggtgtgggatggggattggttagtagagtttttttttgaaaggaattttaagtttatagatataagggttttttaatagttttcgataatgatgtgaggttgtgatgatttagttaaacgttaattttttttgtttagtgttgatatatattatcgtattaatttttatagtaaatttgtaaggcgaagtttttaattttaatttatatttgaggaaaagggaggtttagagaatatagtttggtggttgagagttaggatttgaatttaagtagtttgattttatagataaatagaaaataaagtgtatgtaattggaatgttttttgtttggaggaattagattgataatgaagttataggaatgtgttttttagggagtgtttgttttgtttttagagattaattgttgttttgggatttggtttagtcgatttgttttattttggatggaggtatgtttaatgaggaagcgttggaggttagtgttttagatttttgatgtatggggaggtggttgttgcgtgtgttaagcgtagatgagaaattcgaaaaggtgagaataagtatttgagtgaaatttagagttttaaattagaaaatgttttaatatttgtaaggaaagaaaatatagtgggatgagagggagttagatatatagtagaagggaggaaaataagagtttgattgagaaaatgtaaatgaatatttagagggaaaagggattgtaaatatagatgtagttttgggagtataggtttgagatagagttggagataaagtagatgatataggttttagtgtatagtgagttttaagcgaatgttttttgatttagaatagtgatgggtatgaggtaattgttatgaatattacgtggttttgttatagttttattcgttgtgtgagtttatattaagaagttttatttgtattggagttagtagaagtagagaggtgagaaagggattttggaaattaattatatttttagatttttttaggaagagaaggttgggtttataggaaatggttatgtggagattcgagaaattgtaatggtagtgggtgtttgtttggaaaaagtaatagaagtacgtggttttggcggtggttatgttgtttgttggggtttagtgttttttttttgtattttgtttttttattttttgttgtattatcgttgtgttgttttggaattttggttattagaatttatgtttaaaaatgttttatttgaatattgatagggagaatgatatatttttattaatgtagtatttttattaaaaatgtgtaattagagttaaattatgaggaatatataaatttataattgggatattttgtaaaatataggtttgtattttttaaaggatatttatgttgtgaaagataaaggttgaggaattgttttagattaaaggagtttaaggagatataataattaaatgtaatgtgtgattttggattggaaaaataaaaattattataaagaataataatgggataattggtaaaatttggatatagatagtatgttggataattatattgtattaatattaaatattttgaattttataatggtattatagttatataatatttttgtttttaggatatataaatattggtgtatagggtttaagggttatgatgttagtagtgtatttttaattaaatagaatgtgaagaatagtgtgtgtgtgtgtatgtgtgtgtattttttgttttaaaaaattataatagtttgaaaataatttaatgttttttagataattttagagtatgtggtgttttggtgtttttattatcgtggttattttgatgatataattgtgattataaaagttataagggaagggttacgtgtatgttgagttttagatattttttaaaatgtgtttggtttttaaatttttttattagttgtgttttttgttatttgttttttttttttagaaattaaaggtataggatttattgttatttttatttaattagagatgatttaatattatggtataggtttatggtggtttttttgatttttttggtagcgttatttattcgttattagttttttattgggttgaaattaagttattttatttatttgttttttatttttaaggagtttatttaggttattggtttagtagagttttttttggatttttaattttttgtattatattagggtagtaaagtgtttagtaaagtatataaaaggttgaggtatagaataatttaggtgttatgggtatttatatatttaggagaaggagggaaatgatagtattgagttttttgttgtagggtcggaatagagtgagataaattgaggaagttttttttttttaatcgtatgtgatattagttatgttaaaggagacgagaaaagtaaaatgttttttttaagttaattagtatttttgtaattattggggtagtagttgtatatatatattttttttgggtcgtttatatttatgggtattgaggataggtttggtaatacgtggtttttttttttattagttagttaaatttaagttttaaatgcgaagtgtgtattttaaggatattatgtggatttgtggtagtgtttggaggattttgggtttataaaatgaagaataaattataaggatatataaataaagtatttttattagtgatagttataatgttgttataatattaaagaaaattggtgattttttgtagatgagtatgtttgtggttataagaaagtgtatcgttaagtagaaattggagtgaaagaaaatgaggttataatggtgatattttaaaagttttttgttttaaagtaaagtaagatgtgtgtagttttgttttttattaagtagatttgtttgtaattcggtataagaaaagatattgatttggagttcgtaatagagtagattttttttagtttagggaagttttagtggggtttttggtgaatttttatgtgttaaggaaaggtaggggttggaagggtgaatgaatttatttggagtttgagatgatttgagagttggtttaaggttttgggatgtttttgtttttgtgtttttaaggttattgttttagtcggttttttgttgttttatagaatgttatagtttgggtaatttgtatagaaaagtaatttattttttatagttgggagttaggaagtttaagagtttggttttggtatttggtgagggtttttttgttgtgtgattttatggaggaaggtgaaagtaagtatgtggatagagtaaatggaggtttaatttatttttaattttttttttttttttttgaggtagagttttattttgtggttaggttggagtgtagtggtgtaattttggtttattgtaatttttgagtttttggtttaagcgatttttttgttttagttttttgaatagttgggattataggtatgcgtaattacgtttagttaatttttgtatttttagtagagacggggtttcgttatgttggttaggatggttttgaatttttgatttcgtgatttgtttatttcggttatttaataatttatttgttttattaggagtttagtttcgcgataattaatttattttgtaataatagtattaatttatttatgagtgtggaatttttatgatttaattattttttaaaggttttattttttagtattataatggtaattaagtttttaatatatgaattttggaggatatatttaaagtatagtaggaatttttttttatatttttttaaggagattttataggtaaaatatattttattagatttttatatttgttttgttagatttttttattttttttattattttttattttaaagtattagttagataaataatgattttatagttttataggtttttaaaaaattattttttatttttatttatttagtttaatatataatttgtattaggatatgattggtaggttttagaatatatgattattttggggtataggatgaggaagttatttgtatttatgtgtagggttttgtttaaaagtttattgtttggtattagtagtttataaatatagagatttaaaattaatttatattttaagattgtaaggttttaggtttatgttattttgttagtttttttaagtattgtgttaagaaaaaaatgttaaatatatatagaaatagtaataaagaattttaatattcgataattataagtatttgtttatttattttatttttgtattttttttttttttttttgttagattattttagagttaattttagtattatgttgttttatttttaaatatttaaatatgttttttaaaagaataagaatattttttttaaataattataagtttattgttatttataaaatttagaattttttaatattattgaatattgtttttatttaaaattatttgatagtttataaaatgtttttttgaattgttttatttggattaggatttaaatgaggtttattgtattatttgatggttatgttttttaagtagattttatatttttgtattttttaataagtattatttttttttttatttttttttttttttttttttttttttatatatatatatatatatatatatagatagaataaagttagttgttttatagaatgttttatttaaatttattatattattttgagatgtgaagttaaatttaaaattttgatgagtttaaagtttaattatttttttggtaagaatattttatagataatgttgtatattttatattgttttatatacgaaagtatgtaatgtttgattgttttattttggtgatgtttatttaaggtcgatttgtttgttttaaattgaaattaaatatttttatttaattaaaattaaaattgtaaaattaagtgtatttagagaagttttatatttatttttgtttttttatttggttttttttttttttttaaaggtaattagtttttgggtttttgtatggtttgttttaataaatataagaaaatttatatatattttttttatataaaaggtatattttgtatattatattatatattgtatattatatatattatatatattgttttgtattttgttttttttattttgaaatatattttagatattattttatattaatatatggagggttttttttattttttttagttttagaggattttattttgtgaatgtattatgttttgtttaagtagttttatattgatgaatagtttggttattgttaattttgttattataaaaaaagtattatagttaataatgtgtatttattattttgtttttggtaagtgtatatttggtaaagattattagaagtacgattgtcgttcggaaggtaaaatatatataattttgttagatagtttataaaattattaagtttaatattaatttattttgttttttttattaga

SEQ ID NO: 1180 - DNA, 15767 bp, Artificial Sequence
  chemically treated genomic DNA (Homo sapiens)
tttgatgggagaaataaagtaaattaatattagatttaataattttatagattatttagtaaaattatatatgttttatttttcgagcggtaatcgtatttttagtaatttttattaaatatatatttgttaaaaataagatgatgaatgtatattgttaattgtagtattttttttgtaatagtaaaattgataataattagattatttattaatataggattatttgaataaaatatggtatatttataaaatggaattttttaaaattgaaaaaaataaaaaaaattttttatatattgatatggagtgatatttgggatatattttaaggtgaaaaaagtaaaatgtagaataatatatgtagtgtatatagtatatagtatgtagtataatgtatagagtatgttttttgtgtaagaaaggtgtgtgtgaatttttttatatttgttaaaataaattatgtaaaaatttaaaaattgattgtttttaagaagagggaagagattagatagaagagtagggataaatgtgagatttttttgaatgtatttggttttatagttttgattttggttgaatggaaatgtttaattttagtttgaaataaataaatcgattttagataagtattattaaaataagataattaaatattatatattttcgtatgtgagataatgtgaggtatatagtattgtttatgaagtatttttgttaaaaaaataattaaattttaaatttattaagattttaggtttaattttatattttaaagtgatatggtggatttaagtgggatattttatggaataattgattttgttttatttgtgtgtgtgtgtgtgtgtgtgtgtgaaagagagagagagagagagagagaatgagagaggagatagtgtttgttaaaagatatagagatataagatttatttaagagatataattattaaataatatagtagattttatttagattttgatttaaataaagtagtttaaaaaggtattttatagattgttaggtaattttgaatgaggatagtatttaatgatattaaggaattttggattttgtaaatgatagtggatttgtggttatttaaaagaaatgtttttatttttttgagaagtatatttaaatatttaggagtaaaatagtatgatgttggaattggttttaaaataatttggtaaaaaaggaggagaggaatgtagagatgaagtgagtaggtaaatgtttatgattgtcgaatattgagattttttgttattatttttgtatatgtttaatattttttttttaatatagtgtttaaaaaaattagtagggtggtatagatttgaggttttgtaattttgaagtatgaattaattttagatttttgtatttgtaggttgttgatattagatagtaggtttttgggtagaattttatatataagtatagataatttttttattttgtgttttagggtagttatgtattttgaagtttgttaattatgttttaatataagttatgtgttgaattaagtaggtaaaaatgggaagtggttttttagaagtttgtagaattgtggggttattatttatttggttaatgttttaagatgaagggtagtggggaaaataggaaggtttgatagggtaggtatgaaagtttgatggagtatattttgtttgtggagtttttttggaaagatatgaaggaaagtttttgttatgttttgaatatgttttttaaagtttatgtgttgagaatttaattgttattgtaatattaagaggtgaggtttttgggaggtgattggattatgaagattttatatttatgaatgaattaatattattattgtagggtgggttagttatcgcgggattggatttttgataaagtaagtaagttattgggtggtcgaggtaggtagattacgaggttaggagtttaagattattttggttaatatagcgaaatttcgtttttattaaaaatataaaaattagttgggcgtggttgcgtatgtttgtaattttagttatttaggaggttgaggtaggagaatcgtttgaattagggatttagaggttgtagtgagttaagattgtattattgtattttagtttggttatagagtgagattttgttttaaaaagaaaaaaaaaagattgggggtaagttaggtttttatttgttttgtttatatgtttgtttttatttttttttatggaattatatagtaagaaggtttttattagatattagagttaggtttttggattttttagtttttaattatgagaaataaattatttttttatataaattatttaggttgtggtattttgtgaagtagtaggaaatcgattaagatagtgattttggaagtataagaataaggatattttaggattttgggttagtttttagattattttaggttttaggtgagtttatttatttttttagtttttgtttttttttgatatataggggtttattagaagttttattgagatttttttaggttggaaaagatttattttgttacggattttagattagtgtttttttttatgtcgagttataaatagatttgtttagtgagaaatagaattgtatatattttgttttgttttgaagtaggaggtttttgagatgttattattgtaattttatttttttttattttaatttttgtttagcgatgtatttttttgtagttatagatatgtttatttgtagaaagttattagttttttttgatattgtgataatattataattgttattgatgaaaatgttttatttatatgtttttgtaatttattttttattttatagatttaaagttttttaggtattgttataaatttatataatgtttttgaaatgtatatttcgtatttaaaatttagatttagttgattggtgggggaaaaaattacgtgttgttagatttatttttagtgtttatgaatatggacgatttagagagaatatgtatgtgtagttgttgttttagtagttgtaaaggtgttgattagtttagaggagatattttgtttttttcgttttttttggtataattgatgttatatacggttggagaaaagggatttttttagtttgttttattttatttcggttttatagtaaaaggtttaatgttgttattttttttttttttttgaatatataagtgtttatgatatttaaattattttgtgttttagttttttgtgtgttttattaagtattttattgttttaatgtgatgtagaagattgagaatttaggaggagttttgttaagttagtggtttgagtgagttttttgaaaatagaaagtaggtaaatgaagtagtttggttttaatttagtgaaaaattgataacgagtggatgacgttattaagaggattaaggaggttattataagtttgtgttataatattgaattatttttggttaggtggaaatggtaatagattttgtgtttttgatttttaggagaaagaggtaagtgataagaaatatagttgataagagaatttagaaattaaatatattttagagaatgtttagggtttagtatatacgtagttttttttttatagtttttataattataattgtattattaaaatggttacgatgatagaggtattaaagtattatatgttttggaattatttaggaagtattagattgtttttagattattgtaattttttaaggtaaaaggtatatatatatgtatatatatatattattttttatattttgtttgattgagagtatattattgatattatgatttttaagttttatatattaatgtttatatattttaaaaataaggatattatatgattatagtgttattatgaaatttaagatatttaatattgatataatgtaattatttaatatattgtttatatttaaattttgttaattgttttattattgttttttatagtaatttttgtttttttaatttaggattatatattgtatttagttgttatatttttttagatttttttaatttgagatagttttttagtttttgttttttataatatgaatgttttttgaagaatgtaggtttatattttgtagaatgttttagttatgggtttgtatgttttttataatttgattttggttatatatttttggtagaaatattgtattagtaagggtgtgttattttttttattaatatttaaatgaaatatttttgagtatgagttttgatagttagggttttagaatagtataacggtaatgtaatagagagtgaaaggataagatgtagagaaggaatattgggttttagtagatagtatggttatcgttaggattacgtgtttttgttattttttttaggtagatatttattattattgtagtttttcggatttttatatgattattttttataaatttagttttttttttttagagaagtttagaaatgtggttaatttttaaagttttttttttatttttttgtttttgttggttttagtgtagatgggattttttgatgtgaatttatatagcgagtagagttgtggtaaggttacgtggtatttatgataattgttttatgtttattattattttaagttaaggggtattcgtttgggatttattgtgtattgggatttgtgttatttgttttgtttttagttttgttttagatttgtgtttttagagttatatttgtatttgtaattttttttttttttaggtatttatttgtatttttttaattaggtttttattttttttttttttgttgtatatttaatttttttttattttattgtattttttttttttgtaagtgttgaaatattttttaatttggaattttgaattttatttaagtgtttatttttattttttcggattttttatttgcgtttgatatacgtagtagttatttttttatgtattagaagtttgggatattgatttttaacgtttttttattaagtatgtttttatttaagatagagtaagtcgattgagttaaattttagagtaataattagtttttgaaaataaaataaatattttttagagagtatatttttgtaattttattgttaatttgatttttttaggtaaagggtattttagttatatgtattttattttttgtttgtttgtaaagttagattgtttgggtttaaattttagtttttaattattaagttgtgttttttgagttttttttttttttaaatgtagattgaagttaggaatttcgttttgtaagtttattgtgaggattaatgcgataatgtgtgttagtattaaataagaagagttagcgtttaattggattattataattttatattattatcgaaagttattgggaagtttttgtgtttatgaatttggagttttttttaaaaaagagttttgttaattagtttttattttatatttagggattgaagggtttatttttattatagttttgagggaaaaggatggttaagttgagtttatttgaaaaggggaggtatgtttatatttttaagtaaatattttaagagtgtatttaaaatgatgttataatttaaattatagaatacgaattttagttgttttttgtatatttattagtttttaaagatttgatacgggttttaatatttttgtttaagttatatatatatagggatataaatatttatagagagagagagagatagagagagaaaatatgtagtatttgataatggaagaatttatgtagtttgtaggtgtttattgtaatagttttagaatttgtaggtaggtttggatatttttttaaataaaaagttttatttaaaaattaattttgatttttatttgtatgtaaaaaataaaaataattttgatttatttaaatgtgaaatttagaaatagtaaataaatataaaataataaagtttttagaagaaatatgggataatattacggttttgaggtaggtaaagattttttaaataggatagaattgtattgaaaatataggaaaaaaataagttgaggtatattaaaattaagaattttggggtcgggtacggtggtttacgtttgtaattttagtattttgggaggtcgaggtgggcggattaggaggttaggagatcgagattattttggttgataaggtgaaatttcgtttttattaaaaatataaaaaaattgttaggtgtggtggtgggcgtttgtagttttagttattcgggaggttgaggtagaatggcgtgaatttgggaggtggagtttgtagtgagttgaggttacgttattgtattcgagtttgggcgatagagtgagatttcgttttaaaagaaaaaaagaaagaaagaaagaaaaaagaaatagtattgcgtaatttataaagaaaagaggtttaattggtttattgttttgtaggttttataggaagtatagtgttggtatttgtttggtttttggggaggatttgagacgtttataattatggtagaaggtagacggggagtaggtacgttgtatggtgaaagtaggagagagagaatgatagaggaggtgttattttttttaatgattagattttaggtttaggagaatttattattattaagatagtattaagttgtgacggagttgtttttatacgttttttattaggttttatttttattattggggattaaaatataatatgagatttgggtagggatatagatttaaattatattagattttaagtggtaaattgggtttaaattttaaatatagtcgagtagttatttgttgattagaggttatatatgtattttgagtttttgaaaatttttatttttgtttaattttggaattttttgattttatttgaattaattaattagggtttagttttattaattagttagggtttagttgtattaatcgattagaattaagtaagtttgaatttttttgttgcgtaaatgaatttgattgggaagttgagtgggaaaatttttttttatggaggttaagttttttatttgttttttggaatgtattttttaaaggttacgtgttaaaggtcgtgtttttttagtttgcgaattgtttattggaataaagtttttttcgttaaattttattttagagaatttttatttataggtttaatagggtaatggtagttatatgaatatgtagatattatgtggttaattatgtatgagttgaagggggaagaagaaaagaggaaaggaaagtagtttggaagggtgagtaaagttcggggtaatttatttttgaaaaacggttaaatttttaagttaaaagtaagagtttatttttttagttatttttttttttattttttgttagtagtttggaaagttttagaattttaggaataagttttatttttttttgtattttttagttttttttttagtatttatatagtagtaagggttttttaaatagttttcgaattttgtttttgagaatttatttatacgtgatagatgaaataaaagaaaatatagatttgatgttaattgaatagttgataaggttatttaaaattagattttttttagagggagggttgtaggaatgttgttgtattggaaggttttagttttatttggtttatttaaaaaggaaagattttgttgttatatagggttaggtttgtaggttttagaatattgagtattatttttgagatatgaatagtattgaaggttttagaataggtagttaaaggattagggggtttttcgttgatgtaaggattttaaagttaaatttgtaggtgtataagagtggggtatttaaaatagtttgttttttaatgaggtggaattaaatggtgatgttattttattggaggttgttttttggaggtgataatttatgtttttgattattggggggatggtgtttttatttttatttatttgttatgttttttaaatgtttgtatgatattgatttgaaattatttttgtaaaattatgatagtaagagaaatatgatatagttgattttattttatttttaatttttagtttttttttggttatttttgggtgtagattaagttgaatttgggatgaatttagtttatattttaattttaaagtaaggatggtaatagttttttttaaaataaaagtatttttttaaaattaaagaaaggttattcgttaggattatgagaggggtttgaatttgtttaagatgttggtatagttattttttattgtttaggagttatgtggttagaggttataagatttgtgatttttttaattatttttgtagataatatttattatagaatttaagatttttttttgagatattttttagattaattttatttagatttttgatttattttattttgcggttttatttagaggtggatttagaattaaggattattttttaaaattttatgattttttttttaattagttaatatttgttattttcgtgtattttgtttattaaattatttttgaaaatttttaatttttaagattttggagtgattgatttgagtaataattttgttttttatttggcgtggttagttttatattaattaaattttttttattgtaatgtcgtagttttagtggattgattttgtttgggtagtgggtaggaagaatttgttaggtaattatagattttttaatttgaagggtgaggggatagttttttggggttgatagaaatgttttatttttttttttttgttatgggttgaatttttttttttttattattaaatttatatgttgaagttttaatttataggattttagaatgtgattgtatttagagatagggtttttaaagaggttattaagggaagttgaggttatataggtgggttttaatttaatttgattggagtttttaaaagatgaggatatttggataaataagaagatattagtgtttatgtatataggaaaggttatgagaggatatagagagaagatggttatttgtatgttagggagcgagggtgtagaagtagtaaattttgttaatattttgattttaaaattttagtttttagaattgtgagataattaattttttttgtttaagttatttagtttatggtatttagggtttttttggtttgtttttgttttttggtgtatttttggtttgtttgttttaagatagagttttgttttgtcgttaaggttggagtgcggtggtataattacggtttattgtaatttttgtttttcgggtttgagtgagttttttgttttagtttttcgagtagttgggattataggtatgtgttattatgtttagttaatatttgtatttttagtatagatggggttttgttatgttgtttagattggtttcgaatttttagttttaaggtatatatttattttggttttttaaagtgttgggattataggcgtgagttattacgtttggtttagtttgtggtatttgttatgatagtttaagtaaagtaatatatatttttttagtttttattttttattggtatgatgtttttttttggtttgttgttgattttattttaatgttagattaataaggttttgtttatttagttttgagttttattttagtgttggttttgttttgttttttttgattttttgatttttttttagttttgttttagggtaattttatatttggttatttttggtttttatttttttttttattttaatttagattagtagtttattaagttattaagatttatggttttttttgtatgtagtttttgtttgataggttacgtggtattgattatttgtggggttagagaaagtgggaggaagtttgaagtattttagaggatggtaagagacggaggtttttttttttttttttttattattttttttaagaattttttataggttgataaatattgttatggtttaaaatagaaggtgtaatttggttttatttttagattttttttttatgggttagtaaaatagatggaaggttgtttaagtttaagagagagttagatttatttagagtgatttttttaatgttcgaaaatttggtatagcgttgtttttattaatttttattttgagaggagattaaaggatttattgggatagaggttatgtgagagtggggatgttaaattaatagtttttttaggttgaggtaggtttaggggtttgttttgtgtatatagattttattaatattttatgatttatttgggattatttgggtggaattgtttgaagaggagaaaaattttttttgttttttattaagatgttattagatgattttttggtagagttttttggttttttttttataataatgaaaaaattatatatatattttattttttttttaaagatattagatattgggatgttaaggtttagattggattgcgtgttaaattttaaaatttttagatagtttaatttgtataaagataaatagtttggatttattttaatgtatatttgattttaggaggtgatgattttatagtcggtagaaaatagtattatttaaaagaagtagttgacgttaaacgttattataggttaggattgtttggtgggtttatttaatgtttggagttgagaaatggaattaaattgtgaaggttttggtaatttggtagttagagaggtatttagaagggtgattttggaataagaaatgttgttgattgtttagtattttgtggttttgtgttggaaaaaaaaaaaaaaaaaaaaaaggaagttttttttgtatattatttatttttgttaaaaataattgaggatttaattttagaatggttcgttgtattttttggtattgaatatgaattagttgtgtagtttttttgggttgattatatagatttttattgtgatggttttaattgattttatgttaattttaagtatttggttaattttaatagtttttggttttttttttcgagagaggttgtggaagttttatttattaaggaggttatttttttagttgttttaggtgagtgaatagaagaggtgttagagaatatggaagggtagagtattttgtaggggtagattgaagaattgagttttttagtggtatttgttgagttgggaattggagtaggagggagtaggtttgagagtgtatttgttttttgagttttagttgttgttttggttattttgtttatttttatttttggttttcgtatagggggaagattattttattttttgatttggcggtttaggtttgttaaagtagttggggtggatttttttgtttttttttaatttggtttggggaagtaggggatattgttatagatagagtagtttggttaaaggagagtagagttagggatgttagttttggttttatttttttttagaaatagttttgaagtaggattataattatttttattatggagtaagatgtggtaatgattaaagaaagttaaagtttaaatattttttaataggttgtatttagttatttgttttgtttgttttttaattttttggtatataggatatatttggtgttattgtttttttattttatttttaagagtttagtttttagtattagagtttataatgatttaattattgttattattattattattattattattattattattatttttatagtattattatgatgaattaaatgattatagtatttgttatttattgagtttttattatgtgttagatattgggttaggtttaatgtagttttttgttgtatttttttattttcgaatatttttatatattttataagagagatattattattttttttattttatagatgtagaaattgatgtttaagagaaattaaatgatttttttaagttatataattagagagtggtagattagggttttagatttagaaaattttattgtagagattatgttgttattttttatagtttaagaaaggattttgttttttgaaggagttgaagagtagatggggcgaagaatgttgtttatttggagattttagaaaagatgttaaaaagtagaggggattggaggaaatatgtatttggtagtttgttaggtttgttatatatatttgggttttttttggttatttttaaaatgttatttttattaataaaattatttttgaagatgttattagtaagatatagtttaagtaaatttagattaatgacggattattttgttttaaataagatatttattagtgtatattaggaagagttgagaattgggaagagtttagtggtagatcgtagatttttgtttattaattgagtgattttgggtaagttattttatttttttaagttcgtttttttatttgaaaaataagaattataattttttttttgtttatattatagagtaattatgaggattaaataggattatgtatgtgaaaatgttttttttattttaaagttttatataaatatgtagaatgtgaggtaaagattgagtaacgaattttaatgtcgtgtaaatattatttttaggaaattgttttttgttttagagatgttgaaaggtatattatttttttttttaaagaaaggtttgatggtttagttaaggttattagattttgttatttttttaagttatattatttgtatatgatttatatgtgtttgtataatgaatttaaaagatttattgtaagtatataagagtaaaataaaatgaatgaatatgagtgattttttgttacggtatttaaattatatatttagggtataatattttgaaatatgaaatagattaaaatgtaaattattgtaaatagatgagaagataggttttagagtttagaggtaagaatgaaattttatttggttttagaatttggatataaagaattatatttttttataggttattttatttaaatgatgtttatgtttgaatttttttttatatatttttaatttatttttttttgtagataaaaatatattttttgaattattttttagtttattatgaaatgttttaggtgatagaaaatttattattttttattttttaatggttttggttaagtttgattgtttaaaaggttttattttatattgaattgttaaagttttttttggttaatagagtaagtttaaggttttttttatttttaagtatttgaaaatagttattatgtttttgaatcgttttttttttaggttaaaaatttttagttttttaaattatgttataaatttatgtattataatttttagtaggttgtttatttaaatgtttttttaattgtttaagaaaagtattgatttgaattttaattttagttttgttatttattggttgtgtgttattggggtagttttttagttttagtttatttatttgagaaattatggagtttaattagtttattaataaggtatttttttatttaaaattttattattttattttaaaattatgatttttaatttatttttgtaatagagtttttggtttgagttaataatattgagttatatttgatttttgttaataatttgttttttttttttttaggtagttttatatttttttggtaaataaaaattagagaaagaagtttggcggagtgatgggtattatgatttttgtatttttagttgatttatagtgttattaagggattaaattgttagtatttatgttgagaaatagtttttgtagagatatggagagggagaagagaatatgagaaaaggtattagaaatgtatttatttttattgattagtatttattttagtgaggaaataatagattgtgggttttagaagtttttaaaagtttaagtatttttatattaggtattaatatatatttatatataaattttaaattattgtttttgttgttgtattgttttttattttattatatttgtatgtagtttgttttttgtggttagttatttttttatgggtgattttatagaattatttaattttttgtttggtgaggtttatatatttatttttttgttgttatgtatttataatttgggagtgatttggggttttataattttttatttggttttttaggtttttttttggtgataatttaaaggttaatgtatttttttttaaggatgtgtaaattaaaatatgtttttgtgatttaagtttagtaaaaagttagatatttttaaaataattttattaggggattaaaataataatttatattatattttatgggtattagttggtattaaattgatttatattttttttttttttatatttagttgtagttttgttttttgtttaagtttgtttttttgtttttagatggttatgtttatttgtatttaaaattttacgtgaatattttaaatattgtatggttagttttattttttattattatattttttaatatatgtttgtttattttattttattattattttttttagacgaagttttgttttgttatttaggttggagtgtattggtgcgattttagtttattgtaattttgttttttaggtttaagagattttatttttttagttttttgaatagttgggattataggtgtgtgttattatgttcggttaatttttgtatttttagtatagatggggtttttttatgttggttaggttggttttgaatttttgattttaggtgattcgtttgttttagttttttaaaattatgggattataggtgtgagttattatgtttagtttgtttattttttaaattaaattattataatttaaggtttagagtaataagggtttaaagttaagtttatttttttttgagggttattgttgtgttgttttatgagtgtattagaataaagttatttgtttttttatttttgtttttttgttatgttgtttttgtttttgtttttgtggttgatgttgtttgtgaggttattaggttagatagagtaagtgatggtgatgttttttttatattttgagaggagatagggttttttttatgtttggtttgattttataggggaagaaagattttttttttattttttttggtttttagattggagtttgtgaattgaattgataaaagatagattaataggagaaaaagtataataattttatttgatgttaatatttttgtgtggtataagggttttttagaaagataggaagattttaaagcggcggttagatttagaggattatatattattttaataaagagtaattaattgtggagatgttataagataaaggaaaaagggatttgagttaggagtagtaaattgtgggaaagtgattgggatatatatggggaaaattaatgaaaggtaaaggttaagtaaggtttgttttgattttttgtttttagtgataagaatatttttttattttaggtataggaatggtattttttttatgggaaatttatgttttgtttttaggtaaaaatggggagggtaggaagttttttttatatttgtaattttttagttatttttaggttagaataattaatatattaaagtggtgaattttggggtgttatgttttggttttttttaattttaagtttagttgtgtatttttgaagttggataggtttgtgatgttgatttttatttagaatttgattatttttttgtattgttttttgttgttgttgttgttgtttttttttttttttttg

SEQ ID NO: 1181 - DNA, 6725 bp, Artificial Sequence
  chemically treated genomic DNA (Homo sapiens)
tttttttttttttttatttttttttatttttttgagatattcgttatagtttatgttttattttgttttgtttttgttttttttgagttttttttttcgaaatgttttttttgatattaatgttattttgttttttataatagtgttttttattaagtattttttattgattgtgtaagagtaatataaagtattaaggagttgagtagaaaatttgtaagtttgggtacgttttattataggtaattgattaagattggttattttattgtgggttttaaatattaatatttataggtttttttttttggtttagatatttattttagagaggattttattggtttttgtttgggaggtggttttggtagttagatattaaggagtttagtttaggtaggttgagagttgggtgattggtttattgtttagaatgtagatttgtatttaatgtttttatttttattatggtattattttttgtttttagttatgttttgagttttaagtttagagtttttggtttattttttttaaagagtgatttttttattttttttttagggtgggaaaaggtagtaatttggttttttggtttgggggagaaaatttggggtttaattgttttatatatagatttttaatttgtttttttgtttatagtattgtcgtgtagttttgtttttagaattattgagtttttttttaggatttagggtataaattagtttgttttgtattgatttttttttttttaggtatttaggtgttagttttttttattattttaagttagttattatttaattattttgtattataaatttttattgatattttttatttattattattttttttgttttttttttgtttttattggtttatatttttttaaattttttttgttgatattttaatggaatttggaaagtgaatagagagaaatttgtgtgtttattttattatttttagtagaaggtttagtggtttatgattgtaattatagtattttgggaggttaagataggaggattgtttgagtttaggagtttaagattagttttggtaatataacgagattttgtttttataaaaaatgaaaaattagttgtgtgtggtggtatacgtttgtaggtgggaggattatttgagtttgggaaattaaagttgaaaaaatataattgtattgttttattttagtttggataatagagtgagattttgtgatatagtttggttatttgtgtttatttaaattttttgttgaattataatttttagtgttggaggtggggtttggtgggaggtgtttgggttatgggcgtagatttttcgtggtttggtgttgttttggtgatagtgagtgagtttttacgagatttggttgttgtaaagtgtggttttcgttaattttcggtaatttttttgtttttgttttattacgtgaaatatttgttttttttttatttttttttataattgtaagttttttgaggtttttttagaagtagatgttggtgttatgttttttgaatagtttgtagaattatgagttaattaaatttttttttttataaattatttagtgttaggtatttttttataataatataagaatggtttaatagagttgcgtgtagtagtttttgtttgtaatttaagtattttgggaggttgaggtaggaggattgtttaagtttaagagtttaagattagtttgggtaatatagtaagattgtgtttttattaaaaatttaaaaagttggttaggtgtggtggtatatatttgtggttttagttattcgtttgtggttttagttatttggaaggttgaggtaggaggattgtttgagtttaggagtttacgttgtagtgagttaagattgtgtttttgtattttagtttgggtaatagagtaagattttgtttttaaaataataaaataaaataaaattggtttaatattttatttaaaaataaaataaaatagagggttatagtatattttttagaatattttaaattatggtaaatttttatttttttaggatggttttagttttggggaatagttaaaagtgtgagaaatttttggttaaatttttttttttaggtttgaagtttttaatatttattataaataattatttttttttattttgagaaataaataagttgagtaaattatgattattgtttattgtaatataataaagtaatttagggtttgtaagtaatttttttaaaaagataaaatgtatatattgtattaaaaagaatatgtagtatatataaaatttttgaggaagaaaaattatttttgtttttaaattatgtttatttgttattttatttttaaatagattgtttattaaatttattttaaatggaatgataggattataaatggatgttataattgtttttaattttttttttaggggagataattaaggggattaaaaatattttttttttttgtagtagttatatgataatatgttattatttgggtttaggttggtaagtaaatatttgtttgttttatttttaagaaagtataaggttataattatttaaatatttgaaaataaaaattaattttattagtataaggttgaaattagtatatgtaataattggttgttttttagtattgagttgggaacggtataaaggggattaaagattaatttttttttttttttttttttttttttttttatttttgagatatagttttattttagttgtttaggttgtagtgtagtggtacgattttagttaattgtagttttaattttttgggtttaggtgattttttgatttttaatttttcgagtagttgggattatttttttatttttaaatttttttttatttttagtaaatatagggttttgttatgttgtttaggttggtttttaatttttggttttaagtagtttttttgtttcggttttttatagtgttggaaatataggtatgagttattgcgtttagttaagattaatttttttaattggtttttgtttttttgggttttgaaaatttgttttattatttattattattattattattattattatttgagatagagttttatttttttttttaggttggagtgtaatggtataatttcggtttattgtaattttcgttttttcggtttaagcgatttttttgttttagtattttaggtagttgggattataggtatttattattatatttaattaatttttttatttttcgtagagacggggttttattatgttggttaggttggtttcgaatttttgattttaggtgattagtttgttttgggtttttaaagtgttgggattataggtatgagttatcgtagttggttatttttttttttttttttttttttttttttttttttgagatagagttttattttgttgtttaggttggagtgtagtggtgtgattttagtttattataattttcgtttttcgggtttaagtaatttttttgttttagttttttaagtagttggaattataggcgtattattacgtttagttaattttgtatttttagtagagacggagttttattatgttggttaggttggttttgaacgtttgattttaggtgatttatttattttagttttttaaagtgttgggattataggtatgagttattgtatttggttttatttattattgaagaattaaaattaggtttagtttgaaaaatgagattatttttgatttttgaatagggtttttgaattgttatttaaaattaaatttggtaatttttagaggttattgatgaaaaataagggtaattataaagtgatgatattttgtgtggtttagaatttgtttttttaggtagatatagaagtgtagttttttttgagttttggtagtattgttttaaaagttgtgtatagtttttttgagattgttatttttaaaggtagtatttagttggatatatgtttgggtaggttttatttttaaaatgttgttgttttttaatgattttttatgttttaatatggaaaggggaggtaaagtattgtgaaaagtagttggtaaagtaggtcggatgtggtggtttatatttgtaattttagtattttggaaggtcgaggcgggcggattacgaggttaagagatttagattattttggttatatggtgaaattttgtttttattaaaaatataaaaattagttgggtatggtggtatatgtttgtagttttagttatttgggaggttgaggtaggagaattgtttgaattcgggaggtagaggttgtaatgaattgagattgcgttattgtattttagtttggtgatagagtaagattttattttaaaaaaaaaaaaaaaaaggtagttggtaaagttgtttatatgaattttatttataatagtaaaatattgatttataataataaaaaatttgttatagtaataaaaagagtttagagtaagaaattagttgagtaacgtggtgttatattatatatttattaagataataggtatatgtgttatgtttattttgtggaaaagatatgtaaaataattttaagtaaaaaagataaatataaaaaagtgaatgtatataaaataattttataaaattgaatgttatttaaaaattatagtttattttaagttgtataaaatagttatttttttttttataattgtttaaatttataattaaatagaagaaagtttttgttttggaagtagtgttatgttttaatttttttagagttagtattttaaataattttattttattatttttttgtagattaatttttaggatattagtatatttttttttaagtattaaaaaaatttttttagagttagtggattaatagatagtttttgttttttatataattgaaagggtggagtttttaaattataaggggaagaaggaagttaaaagatgttaaatattggggttagtttattttggttagtttagtattttgatttagtagttaatatgaaggtttttattgttttggggtttgtttttttttttgttacggtttagggtaaggtttttgaaaggtgtgagttggttagaattttgaaaagattgggaatggatggttataggggaattagtttagtaaattgtaagtttattttttataattttagagaattagttacgtatggaatagatattaggagagaaggaagaagaagaaggggttttgagtgaatagatgttttatttttttgtgggtttgtatatttataatggttaaaaatattagtttggttttttataattagagatattcgataaaggaatacgggtatggtaggggaaaattttattttaagtaaaataggatttgttgtattgttttagtgttaggaagtttgttgggtgtttgagatttaatggtatatgtaagttgattgaaagatatatttgaggatttggtagagtttttttaagtttttggtatgtgattttagttattttttattttgaatttgggttttgagagtttagagtgatgtagtattttttttgtttttaagttttttgtcgtgatgtgggatttttatttttatttttattttattttattttatttttaaagatagttttattgtgtggtttaggttggagtgtagtggtatgattttagtttattgtaatttttgttttttgggtttaagtgattttcgtgttttagttttttgagtagttgtgattataggtgtgtattattatatttagttaattttttgtatttttagtatagatggggttttattatgttggttaagttggttttgaatttttggttttaaatgatttgtttattttagttttttaaagtggtaggattataggtgtgaattattgtatttagtcgatatgggatttttaatagtgatgtttttaaagaatatattgaattttttatataagagtagtaggaatttagttttttttagttattttttgtataggattttagaaatttagtatgaaatgttttattatttttatttattttatttgattaattattttttatttttttttatataatttaagatgtgttatgaggaaaagttattttatagtttagtatatagttgtcgatgtaataatttttgtagtttttagattgaatttagatatttttttttaatagttatttttgaatgaatgagtgaagggatgaaattacggaatagttttgtttttaagattttaatttgatatttaaatttatttttagatattataagaaaatttttattagaaaatttttatgtttttttgattaaaaaaagtatttttttattagtttatgtatttgttatgaatttataaaatttatttaatagttttgttgatttttttgtttttggttgaatgttgtttgagggatgggagtacgggaagggtaaaagtaatggaataaatatgtattttaatattttaaaagtatgttatattgttcgttggtgttataagatgatttgtattataaaaggatttttttataagttttttattttaatattaaagtgttaagatattttataagtaaatttttatatttataaaataaattagtaaaatagaagtagttaagtagaattgattttgttatagagtataagttatttagtgttgttgtttattattaaaaataagttttttttagg

SEQ ID NO: 1182 - DNA, 6725 bp, Artificial Sequence
  chemically treated genomic DNA (Homo sapiens)
tttgaaaagaatttatttttagtaataaatagtaatattaagtgatttatattttatagtaaaattagttttatttagttatttttattttattgatttgttttataagtataaagatttatttataaaatattttagtattttagtgttaagataagggatttgtaagagaatttttttgtaatgtaaattattttgtaatattaacgaataatataatatatttttaaaatattaaaatatatgtttgttttattgtttttatttttttcgtgtttttattttttaggtaatatttagttaagaatagaaaaattaatagagttgttgagtagattttgtaaatttatagtagatatataggttgatggaaaaatgttttttttaattagaaaaatataaggattttttgatagaaatttttttataatatttaaaggtgaatttggatattaagttagaattttgaaaataagattatttcgtgattttatttttttatttatttatttaaaaatagttattgaggggaaatgtttgaatttaatttgaaaattatagagattattatatcgataattatgtattaaattataaaataatttttttttatggtatattttgaattgtgtgggagaaaatgaaagatagttaattaagtagagtagataaaaataataaaatattttatgttgagtttttgggattttatataaagagtgattgaagggaattaggtttttattgtttttgtgtagggaatttaatatattttttaaaaatattattgttaaaaattttatgtcggttgggtgtagtggtttatatttgtaattttattattttgggaggttgaggtgggtagattatttgaggttaggagtttaagattagtttggttaatatggtgaaattttatttgtattgaaaatataaaaaattagttgggtgtggtggtatatatttgtagttatagttatttagaaggttgaagtacgagaattatttgagtttagaaggtagaggttgtagtgagttgagattatgttattgtattttagtttgggttatatagtgagattgtttttaaaaataaaataaaataaaataaaaataaaaataaaaattttatattacggtaggggatttgaagataagaaaaatattgtattattttaggtttttagagtttaagtttaaaatgggaaataattggagttatatattaaggatttgagagagttttgttaggtttttaaatgtattttttagttagtttatatgtgttattgaattttaggtatttagtaaattttttagtattagaatagtataataggttttgttttatttagaatggaatttttttttgttatgttcgtatttttttatcgggtatttttggttataaagaattaaattgatgtttttagttattgtaagtatataaatttataaagaaataaaatatttatttatttaaagttttttttttttttttttttttttttagtgtttgttttatacgtagttaattttttggaattatggagagtagatttatagtttgttaggttgatttttttgtagttatttatttttaatttttttagagttttggttaatttatattttttaaagattttgttttggatcgtaatagaaaggaggataagttttagaataatgagagtttttatgttgattgttaggttagagtgttaggttgattagggtgagttggttttagtatttaatattttttaattttttttttttttttgtggtttgggggttttatttttttagttgtgtggaaaataggaattgtttattgatttattgattttaaagagatttttttaatgtttgaagagagatatgttgatgttttaagaattagtttataggaaaataatgaaatggaattgtttaaagtattggttttggaagaattggggtatagtattatttttaagataggaatttttttttgtttgattatgaatttgagtaattataaagaaaaaaatgattattttgtgtagtttaaaatgagttgtgatttttgagtaatatttaattttgtgaaattgttttgtatgtatttatttttttatatttattttttttatttaaaattattttatatattttttttataaaatggatatgatatatgtgtttgttgttttaatgggtgtatagtgtgatattacgttgtttagttagttttttattttagattttttttgttattatagtaaattttttattattataaattagtgttttattattataaataaggtttatgtgaataattttattaattatttttttttttttttttttgagatggagttttattttgttattaggttggagtgtagtggcgtaattttagtttattgtaatttttgtttttcgggtttaagtaatttttttgttttagttttttaggtagttgggattataggtatgtattattatgtttagttaatttttgtatttttagtagagatagggttttattatgtggttaggatggtttggattttttgatttcgtgattcgttcgtttcggttttttaaagtgttgggattataggtgtgagttattatattcggtttattttattaattattttttataatattttgttttttttttttatattagaatataaggggttattagaaagtaatagtattttaaaaataaaatttatttaaatatatatttaattaaatgttatttttgaaaatagtaattttaggagggttgtgtatagtttttaaaataatgttattagaatttaaaaagaattgtatttttgtatttgtttaagaggatagattttgagttatataaagtgttattattttgtagttatttttattttttattagtggtttttaaagattattagatttggttttaaatgatagtttaaggattttgtttaaaaattaagaataattttattttttaggttaggtttaattttgattttttaataataaatagggttaggtgtagtggtttatgtttgtaattttagtattttgggaggttgaggtgggtggattatttgaggttaggcgtttaagattagtttggttaatatggtgaaatttcgtttttattaaaaatataaaattagttgggcgtggtggtgcgtttataattttagttatttgggaggttgaggtaggagaattatttgaattcgggaggcggaggttgtggtgaattgagattatattattgtattttagtttgggtaatagagtgagattttgttttaaaaaaaaaaaaaaaaaaaagaaagaaaaaaaaaatggttagttgcggtggtttatgtttgtaattttagtattttgaaagtttaaggtaggttgattatttgaggttaggagttcgagattagtttggttagtatggtgaaatttcgtttttacgaaaaatagaaaaattagttgggtgtggtggtgggtgtttataattttagttatttgggatgttgaggtaggagaatcgtttgaatcgaggaggcggaggttgtagtgagtcgagattgtgttattgtattttagtttgggaaagagagtgagattttgttttaaataataataataataataataataataaatagtgagatagatttttaggatttaaagagatagaaattaattaaaagagttagttttggttgggcgtagtggtttatgtttgtatttttagtattatgggaggtcgaggtaggaggattgtttgagattaggagttggagattagtttgggtaatatggtaaaattttatatttattaaaaataaaaaaaaatttaaaaatgaaaaagtagttttagttattcgggaggttgagggttagaggattatttgaatttaggaggttgaggttgtagttagttgagatcgtattattgtattgtagtttgggtaattagagtgagattgtgttttaaaaataaaaaaaagaaagaaagaaggaaaaaaagagttagtttttggttttttttatgtcgtttttaatttaatattaaagaatagttagttattatatatgttggttttagttttatgttgataagattaatttttgtttttaaatgtttaaatagttatgattttatatttttttggaagtggaataagtaaatatttgtttgttaatttgaatttaagtgatagtatgttattatgtgattattgtaaagggaagaagtgtttttgatttttttaattattttttttggggaagaagttaagggtagttataatatttatttataattttgttattttatttgaggtaggtttaatgagtaatttatttaaaaataaaatagtaagtaagtatgatttgagggtagagataattttttttttttagaaattttgtatgtattgtatgttttttttgatgtaatgtatgtattttatttttttaggaaagttgtttatagattttagattattttgttgtattataatgggtaatagttatgatttatttaatttatttgttttttaagatagagaaaaataattatttatggtgagtgttgggggttttaggtttaggaaagggaatttgattaagggttttttatatttttgattattttttaaaattaaaattattttgaaaagatggagatttgttataatttaagatattttaaagaatgtgttatagttttttgttttgttttgtttttagatagggtgttaggttagttttgttttgttttgttgttttggagatagggttttgttttgttgtttaggttagagtgtaagggtataattttggtttattgtagcgtgaatttttgggtttaagtaatttttttgttttagttttttaagtagttgggattataggcgagtagttgggattataggtgtgtgttattatatttggttaattttttaaatttttagtagaaatatagttttgttgtgttgtttaggttggttttggatttttggatttaagtaatttttttgttttagttttttaaaatgtttggattataagtaggagttattgtacgtagttttgttaggttatttttatgttgttataaagaaatatttgatattgggtaatttataagaaaagagatttaattggtttatggttttgtaggttgtttaggaagtatggtattagtatttgtttttggagaggttttagggagtttataattatggaggaaggtgaaggaggaataggtattttacgtggtggagtaggagtaagagagttgtcgggggttggcgggggttatattttataataattagatttcgtgagaatttatttattattattaggatagtattaagttacgagggatttgcgtttatgatttaaatattttttattaggttttatttttaatattggggattataatttaataggagatttggatgggtataaataattaaattatattatagggttttattttgttgtttagattggagtgaagtagtgtaattatgtttttttagttttgattttttaggtttaggtgatttttttatttataggcgtgtattattatatatagttaattttttattttttgtagagatagagtttcgttatgttgttaaggttggttttgaatttttgggtttaagtaatttttttgttttggttttttaaagtgttgtgattataattataagttattaggttttttgttgaaagtggtgggatgggtatataggtttttttttgtttattttttaaattttattaaagtattaataaaaggagtttgaaaaggtataaattaataagggtaaaggaaaagtagaagagatgataatagatgagaaatgttaataaaagtttataatatagagtggttgagtagtaattaatttaggataatggagaaagttgatatttgagtgtttggaaaaagggaaattaatataaagtaaattagtttgtgttttagattttggaaaaaaatttagtaattttgaaggtaggattgtacggtagtgttataaataggaagataggttggaaatttgtatatggaatagttaagttttagatttttttttttagattaggaaattaggttgttgtttttttttattttagaagaaggatgagaagattattttttggagaggatgaattaaagattttggatttaggatttaaggtatgattaaagataggggataatgttataatgaaaataggggtattaaatgtaaatttgtattttgagtagtaagttagttatttagtttttaatttgtttgaattgagttttttgatgtttggttgttaaaattattttttaggtaggagttaataggattttttttggagtaaatgtttgaattaggagaaaagatttatagatattaatatttggggtttatagtgaaatggttagttttgattaattgtttgtggtgagacgtatttaggtttatagattttttgtttagttttttggtgttttgtattatttttatataattagtggaggatatttgatgaaagatattattgtgaaagatagagtgatattaatattaaaagaaatatttcgagaagaagaatttaaaggaaatagaggtaaaataaaataagatataagttataacgaatattttagggagataagagaaaataagagaaagaaaggg

SEQ ID NO: 1183 - DNA, 8802 bp, Artificial Sequence
  chemically treated genomic DNA (Homo sapiens)
aatgtttaataatgatagattggattaagaaaatgtggtatatatatattatggaatattatgtagttataaaaaatgatgagtttatgttttttgtagggatatggatgaaattggaaattattatttttagtaaattatcgtaagaataaaaaattaaatatcgtatatttttatttataggtgggaattgaataatgagaatatatggatataggaaggggaatattatattttggggattgttgtggggtggggggaggggggagggatagtattgggagatatatttaatgttagatgacgagttagtgggtgtagtatattagtatggtatatgtatacgtatgtaattaatttgtataatgtgtatatgtattttaaaatttaaagtataataataaaaaaataaaaaaataaaaaaaataaataaataaatagaaaaaaaagaaaataaattatttaattattttttttgaaataagaaatttttaaaaatatttgtataattaagggaaggaatgaaaagtaatagaaaatttgagaaatatgagatgagtttttaagtttttttaattttttgttaattttatttttgttaatttttatatatatttgtagttaggagatttggtttttaggtttggttttattttttataagtatgtgattatgggtaaattgttttttttttttaaggtttttgtttttatatttataaaatagggataataatattttttttgtttaatttttagaggtgttgtagggattttagtagataatgggggtaaatatattaaagtattatttgtatttagatattttttatattgttgtattttggaggttaggggatggttggggttttcgggttgtttttttgtttagtatttagttttttggatttgatttttagtagtttttataattattggttttgtgaagaattttttaatgattttaaagtatttttatatttttgagatggttgataataatagttaagatattttatttagtatatattaaatattatgttgagtattttatagtttttatttggaattattaaaataattttcgatggtaagtgttgtttatttttaattaattaaatagttttatttttatgttttgtttttatatattatattttttaatataaaatttatatgttggtattggttttatattaaggagaattagattattattaagaatttattaaagagtataagaatagttgaagtgtgaagtttaatggggaaaaatgtgttattaattataaggtgggaaattattgtttttataggtattgatgtagtgtaggttttgttatttttattttatagttaaggaagttgaggcgtagagtgttgaaataatttgttgagaaatatatagtagtgagtggtgtgaagttaaaatttgagtttaagttttattggatttaaggtttatttttttttaattatattatatatttgtttatagaatttttggttgtttttggtgtttttagattatattttttatttttgtaggtataaggttgataaaagttaaggattggataaaaatgataataagggtatcgttatttagttttttttgaaattgggtgtttggagggtgggttagggtagggatagagatttatggttggggtaggtggtgaggtttagataaggaaagaagtattgaaatggtttatatgaatatttttaggagaatatattgatattgaaatattttgggtataatttagtgttaatttaataaatattatttagtgtttaatattttggtgttggggttatatatagtgtttatatgtgtttttcgttttttataaatatatgataagtttgaaatgtttgtgttaaatattttttaaattaaaataaaaaaatataggttgggtgtggtgggattacgtttgtaattttagtagtttgggaggttaaggcgggaggattatttgaggttaggagtttgagattattttggttaatatggtgaaatttcgtttatattaaaaatataaaaattagttgagtatggtgttgagtatttgtaattttagttatttgggaggttgaggtaggagaattatttgaatttaggaggcggaggttttagtgagtcgaggttatgttattgtattttagtttgggtgataagagtaaaattttgttttaaaaataaataaataaataaataaaaagagataaagttaatatatgttattttgtagaatttggtagaaaaaggacgaagggaaaagggagaattatagttgagattgtgtttatataataaatttattgtggtttttgtgtgtgttggggaaagtttggtagaattagagaatttaagtaagtggagtttgtggggggaggggattaggaggttatttttgttttattttaatttttttagaagatattgaggttgggttttttttatttttgtttttttagtatttaatataattggaagaagtaaaggtttggatgttttagagtattagttttagtattatttatgtggggttgttttagtttggtagttaatgatattattatataaattttttagttttgagaatttttttttattagttttttttttgttagtttgggatttgatggaatggaaaatagagaattttgttagttatagaatattgtggttatttagttaatatttggaaaagtaagaagagggtatatatattttagaaataaaagtgaaatttaatatttttatagagttttagagtttataaagttttggtatttattattttatttttttgtatttgagttttagtataatttacgaaataggttgtattttgtttatttgatagatgggaggataaaagtttagaaaagttaatgttgttattttagtatgtttgagattaggaacgaatagagaggtatatttttgagtgtaatagggagggttttattagggaaggtattttggaggtgatttaagagttgagtagaaaaatagaattatgtattaaataaagaaagggagattttaggtaatgttttttcgaaagattttgaaaatatgtattgtaggagaggttgttaggagttcgatgatgatgatgatgatgatgtcgacgtcgatatcgatgatgataaatgatagtagttaatatttattcgttgtttattatgtgtagatattgttagaatagatattttttaaagtagtttatttgtattaattataaaatttattttgtaaggtaggtatttttattatttttattttatagatgataaaattaaggtatagagatatagtttgtttataatattatataggaatgattttaagggttaatataagaagtatgaattttatttggagagtcgagagtattttttttattttatttaatagagaggaggtgggtatagatttttgatttagaaagtttttttggatgtagggtggatcgaggtcggagaggggaaaagaaattagaatttgatttagatatttgtttaaggaagatttgaatagagatagtggggatagatagtagaggattattttataattttttatgtttgtggataagaaattgttttttacgcggattacgaggttaggagatcgagattattttggttaatacggtgaaatttcgtttttattaaaaatattaaaaaaattagtcgggcgtggtggtaggcgtttgtagttttagttatttaggaggttgaagtaggagaatggtatgaatttaggaggtggagtttgtagtgagttgagattatgttattgtattttagtttgggtgatagagcgagatttcgttttaaaaaaaaaaaaaaaaaaaaaaaaaagaaattcgtcgggcgtggtggtttatgtttgtaattttagtattttgggaggttgaggtgggcggattatttgaggttaggagtttgagattagtttgattaatatggagaaattttgtttttattaaaaatataaaaaaaaattagttaggcgtgatggtttatgtttgtaattttagttattcgggaggttgacgcgggagatttgtttgaatttgggcggcggaggttgtggtgagtcgagattacgttattgtattttagtttgggtaataagggtaaaatttcgttttaaaaaaaaaaaagaaaaaagaaattgttttttatatgtttttgttttttttgtttgttaaggtagaatatattttaatttttttgttttaggaattgcgtgaaaattaatgggatagaggtttagttggtttttatttgttaaataatatttttgtacgattggtggtgtatattaaatgttgaatatataaaatgtgttttgatggaggatttgggaataattatagtttgttaattattgttaattttattatagttttgaaattttagatttttttaatgatttaaaaagagattgtaatttttgtatgttatgaaattagttatatagtggtagataagtaattttttataggttttatttttttattatttatatggtttagttatttacgtgggatataggaaaagaaaagtaacgatttgttgtgttagaattaaattgtataaaaaattttttatagttttgttggttttttaagaatttgtttttgtttgtttttttatagttagtgtataaataaatattatgtgcgtgtgtgtttgtgtgtgtgcgtttgtgtgaggtatagaaaattagtgtttaatagaatttttaattttttggatattaggatatttgtgttttatttttgatatggtgagtaatagaattgtttttttaatttttttttagattttgtgttatttcgtgtttataaatattttatttaaggttttattatttttaggtagggtgttaaagattttttttagaaatatgaggaagttgatagtagtgtgattttaggtttttaagttttattagtattatttataaaacgggtttgatagtttttatttgttaggattggtgttaggatgagataatgtttgtgaattgtaaattatataaacgtgtgttattgtgagaattggataaagaagagagggagtgagagaaattaagggagggttggggttgggaaagaacgaaaagggagtcgcgtatagaggagagcgcgatagtcgcgagttatattttgtaatgaaattttttagattttttgtcgggagagcggtttagacgcgttaggtttgtagtaggaggtcgcgtcgagggcgggtttttagaagtttataggtgagtatcggttttttttttttcggttttcggttcggaggaggcgggagtagtttttttgttttgattttatcgcgggcggcgtagggtcggtttggtttttcgtgggacggggaggggggcgggatgtgttatttaaatattagtggggacggtcggtggtggaattagtcgggtaggtcgggtagagtataagagtcggagggagcggtcgggcggtagacgtttgtagattattttagacgtcggagttcgagtttcgtcgagttttcgcgttttattcgttcgcgttcggttcgcgttttttcgttttataatggttcggggtttcggtttcgcgtcgttatcgttgcggttgtcgttgttgttgttggtgttggcggcggtgatcggttatacggtcgcgtaggataattgtacgtgttttattaataagatgatcgtgtgtagtttcgacggtttcggcggtcgttgttagtgtcgcgcgttgggttcgggtatggcggtcgattgttttacgttgatttttaagtgtttgttgtttaaggcgcgtatgagcgtttttaagaacgttcgtacgttggtgcggtcgagtgagtacgcgttcgtggataacgatggtttttacgatttcgattgcgatttcgagggtcgttttaaggcgcgttagtgtaattagacgtcggtgtgttggtgcgtgaattcggtgggcgtgcgtcgtacggataagggcgatttgagtttacgttgcgatgagttggtgcgtatttattatatttttattgatttgcgttatcgttttatcgtcggcgtttttaattatttagatttggacgtcgagttgaggcggttttttcgcgagcgttatcggttgtattttaagttcgtggcggtcgtgtattacgagtagtttattatttagatcgagttgcggtagaatacgttttagaaggtcgtcggtgaagtggatatcggcgatgtcgtttattatttcgagagggatattaagggcgagtttttattttagggtcgcggcggtttggatttgcgcgtgcgcggagaatttttgtaggtggagcgtacgtttatttattatttggacgagattttttcgaagttttttatgaagcgttttatcgtcggttttatcgtcgttatcgtggtggtcgtggtggttttcgtcgtcggtatggtcgttttggtgattattaatcggagaaagtcggggaagtataagaaggtggagattaaggaattgggggagttgagaaaggaatcgagtttgtaggtattcggcggggtaggggatggggtggggtatcggatttcggtatcgttttagatttaagtgagttacgttttttgatttttcggcgtaaaggagacgtttatttttttaaatttttgtttttttttttttttttgcgtatatattaggtttaatagattttggttttagggtttttttttttttttatttttgttttgaaggaagtatttttaaaatgtattttttttcggtttaataataggaaatttgattggggtagtgaaggaagggatggtatagcgttatgtgtaaaaaataagtatttgtatgataattcgggatcgtttgtaagtaattgaatttattgcgatattgtgaaggtttaaatgagtttagatgggaaatagcgttgttatcgttttgggtttaaattatttgatgagttttatttgtattatggtttattcgaggagaagaggagtttgttaattgggtttatgtagtagttttatttattatcgtttgtattattgattatatatgtttgttattgggaaagaagtttgttttagttgtttgaacgtagtttggatgtttttgaggatagatattgttcggaaatttagtttatttattttttagtttgtttttattattattgatattggtaatgtttttttttgtaaaatgtttgtatatatgttgtttttgataatgttgttgtaattttttaaaataaaatacgaatttaataaaatatgggaaaggtataaattagaagtcggtatttgtgaaaagtttttttagatttttattatattggtttttaattttttaagatttgtattttttttttattttaaattataatattttttttttttttagaagtgggtgttttatgttgttattttggtgtgttttaagatattttaattggttagtgtaaatgttattttttttaaataagattatttggaaattttttttaaattgtaggagggtgagtttgagggaggaagttaaattagttgtttttatgaaaaagagtgttagtttttggttatttttaaataaggtttattattaatggagatagaaaattttagtttaagagttgtattttttttgaattttagttttattttgaaataggtggtattatttttatttagtttttgagtaaattatttaattttaaagcgttgtggttttaagattaaacgatttttttatataattagagttagtttgtagtgggttttatatttttgttgggtgtgtataggttgtttttttaagatttttatttattatatatattttttgagatggagttttgttttgttgtttaggttgtagggtagtggagtgagtttagtttattgtaatttttattttttgggtttaagcgatttttttattttagttttttgagtaattgggattataggtgtttattattatgtttaattaatttttgtatttttagtagagatggagttttattatgttggttaggttggttttgaatttttgtttttaggtgatttatttgcgtcggttttttaaagtgttggtattataggtgtgagttattgtatttagggatttttattattaatgtgttttaaagatatgttttatttattagttgtaaaaattagttatttgttttttttatatttatttttttttttttatttatttacgtttatttatgtgtgtgattgtggggtattttataagtaaataagttattatagtaattgagaaattgatataatattaggtgtgtataaaggaagggagtggttggtatattatatatttagtaatagttaagttagatttaggattgtagtttttttttttggaatttattttatgtttttttttttattttgtttttatagtttatgaggattttttaagattgaaatattagtaagaattggggagagatagtttttagttattggttttttaatttagggttgtggttgttatgcgttggtggagtggatattgtgggattgttagagattttaaagtttgttgttatttattaagggagaaatttttttaggttttaaatttttttttagggttaaataagatttattaaggggagagggtggatgtgagtaggtttttttatagtaggaagggtggtttaagtatttgaagttagaattggttttttaataatgagagtgagattttttatt

SEQ ID NO: 1184 - DNA, 8802 bp, Artificial Sequence
  chemically treated genomic DNA (Homo sapiens)
agtggggagttttatttttattgttagagagttagttttaattttaggtatttgggttattttttttattgtaggagagtttgtttatatttattttttttttttggtaagttttatttgattttggaaggaagtttggagtttggaggagttttttttttgatgagtggtagtagattttgagatttttggtaattttatagtatttattttattagcgtatagtagttatagttttaagttgagaagttagtagttgagagttatttttttttaatttttattggtgttttagttttgggaggtttttatagattgtagaaataggatgggaggaggggtatgaaatggattttaggggaagaaattgtagttttggatttagtttagttgttgttgaatatgtgatatattaattattttttttttttgtatatatttagtattgtattagttttttagttattgtagtaatttgtttatttgtggggtattttatagttatatatataaatgaacgtgaatgagtgaaaaggaagagataagtgtaagagggataagtggttagtttttatagttaataggtaaaatatatttttaaagtatattaatagtaaaaatttttgggtgtagtggtttatatttatgatattagtattttgggaggtcgacgtaggtggattatttgagggtaggagtttaagattagtttggttaatatggtgaaattttatttttattaaaaatgtaaaaattagttgggtatagtggtgggtatttgtaattttagttatttaggaggttgaggtaggagaatcgtttgaatttaggaggtggaggttgtagtgagttgagtttattttattgttttgtagtttggataatagagtaagattttattttaaaaaatatatgtaataagtaaaagttttaggaaaatagtttgtgtatatttagtaaaagtgtagggtttattgtagattggttttaattatgtgggaaagtcgtttaattttagagttataacgttttgagattaagtgatttgtttaaaggttaaatggaaatagtattatttattttaaagtagggttgggatttaaaggaggtatagtttttgaattagagttttttgtttttattggtgataagttttgtttagagatgattaaagattggtatttttttttataaaagtagttagtttagtttttttttttaagtttatttttttgtagtttgaaggaagtttttaaataattttatttagaaagaatagtatttatattggttagttaggatattttaggatatattagagtagtaatatgaaatatttatttttgggggaaaaaaaagtgttataatttgaaataaaaaaaaaatataagttttgggaaattagagattaatgtgatagaaatttggagggattttttataaatgtcgatttttggtttgtgttttttttatattttattaaattcgtgttttattttaaaaaattatagtaatattattaaagataatatatgtataaatattttataaaaaagaatattattaatattagtggtagtaagggtaagttgaagaataaatagattgagttttcgggtaatgtttgtttttaaagatatttaaattgcgtttaggtagttgaaataggttttttttttagtgataagtatatgtggttagtaatataaacgatggtaaatgaggttattatataggtttagttaataaatttttttttttttcgggtaggttatgatataagtggaatttattaaataatttaaatttaaggcgataataacgttattttttatttaaatttatttaagtttttataatgtcgtaatggatttagttatttgtaaacgatttcgggttgttatatagatatttgttttttatatataacgttgtgttatttttttttttattgttttagttaggttttttgttgttggatcgaaaggggatatattttagaaatgttttttttaagatagaagtgagaaagaaaggagattttgaggttaggatttattaaatttggtgtgtgcgtaaaagggagggggaaggtaggaatttgaaaggataaacgttttttttgcgtcgaggaattaggaagcgtgatttatttgggtttgggacgatatcgaaattcggtattttattttattttttgtttcgtcgggtatttataagttcggttttttttttaatttttttagttttttgatttttatttttttgtattttttcgatttttttcggttggtgattattaggacggttatgtcggcgacgagggttattacgattattacgatgacggcgatgaggtcggcggtgaggcgttttatggagaatttcgggggaatttcgtttaggtaatagatgagcgtgcgttttatttgtaggggtttttcgcgtacgcgtaagtttaggtcgtcgcggttttggaatagagattcgtttttgatgtttttttcgaagtagtaggcggtatcgtcgatatttattttatcggcggttttttgagacgtgttttgtcgtagttcgatttggatggtgggttgttcgtagtgtacggtcgttacgaatttggggtgtagtcgatagcgttcgcggaagagtcgttttagttcggcgtttaggtttgagtggttgaaggcgtcggcggtggggcggtggcgtaggttaatgaggatgtggtgggtgcgtattagtttatcgtagcgtaggtttaggtcgtttttgttcgtgcggcgtacgtttatcgagtttacgtattagtatatcgacgtttggttgtattggcgcgttttgaagcggttttcggggtcgtagtcggggtcgtagaggttatcgttgtttacgagcgcgtgtttattcggtcgtattagcgtgcgggcgtttttgggggcgtttatgcgcgttttgagtagtagatatttggaggttagcgtggagtagtcgatcgttatgttcgagtttagcgcgcggtattggtagcggtcgtcggggtcgtcggggttgtatacggttattttgttggtgggatacgtgtagttgttttgcgcggtcgtgtggtcggttatcgtcgttagtattagtagtagtagcggtagtcgtagcggtggcggcgcgaggtcggggtttcgagttattgtggggcggaggaacgcggatcggacgcgggcggatgaggcgcggggattcggcggggttcgggtttcggcgtttgggatggtttgtaggcgtttgtcgttcggtcgtttttttcggtttttatattttattcgatttgttcggttggttttattatcgatcgtttttattggtatttgggtgatatatttcgttttttttttcgttttacggaaggttaagtcggttttgcgtcgttcgcgataggattagaatagggaagttgttttcgtttttttcggatcgaaagtcgggaaggggagaatcgatatttatttgtaggtttttggggattcgttttcggcgcggttttttgttatagatttggcgcgtttgggtcgttttttcggtagaaagtttaaagagttttattgtaaagtgtggttcgcgattgtcgcgtttttttttatacgcgatttttttttcgtttttttttagttttagtttttttttaattttttttatttttttttttttttgtttagtttttatagtagtatacgtttatatagtttatagtttataaatattattttattttaatattagttttgataggtagggattattagattcgttttataggtggtattgatgaggtttaaagatttgaagttatattgttattaatttttttatatttttgagaggggtttttggtattttgtttaggagtgatgagattttaaataaagtgtttgtggatacgaagtgatatagaatttgaagggaagttagggaagtagttttgttatttattatattaagggtaaaatataggtattttggtgtttagagggttaaaagttttgttaaatattaattttttgtattttatataagcgtatatatataggtatatacgtatataatatttatttgtgtattggttataaagagataaataggaataaatttttaaagagttagtaagattgtaaagagttttttgtataatttgattttaatatagtaaatcgttgtttttttttttttgtattttacgtaagtagttgaattatgtaaataatgaaagaatggagtttgtgagaaattgtttgtttgttattgtgtggttagttttatggtatataggggttgtaatttttttttgagttattgagaaagtttagagttttaaagttgtggtaaaattaataataattagtaagttataattatttttaggttttttattaaagtatattttatatgtttagtatttaatgtgtattattagtcgtgtaagggtgttgtttagtagatgaaagttagttgggtttttgttttattaatttttacgtaatttttgaggtaggaagattgaaatatattttgttttgatagatagaggaagtagagatatgtgagggataatttttttttttttttttttttttgagacggagttttgtttttgttgtttaggttggagtgtaatggcgtgatttcggtttattataattttcgtcgtttaggtttaagtaagtttttcgcgttagtttttcgagtagttgggattataggtatgagttattacgtttggttaatttttttttgtatttttagtagagatagggtttttttatgttggttaggttggttttaaatttttgattttaggtgattcgtttattttagttttttaaagtgttgggattataggtatgagttattacgttcggcgaattttttttttttttttttttttttttttttgagacggagtttcgttttgttatttaggttggagtgtagtggtatgattttaatttattgtaagttttattttttgggtttatgttatttttttgttttagttttttgagtagttgggattataagcgtttgttattacgttcggttaatttttttggtatttttagtagagacggggttttatcgtgttagttagggtggtttcgattttttgatttcgtgattcgcgtgagggataattttttatttataaatatgaggaattgtgggatagttttttgttgtttatttttattgtttttgtttaggttttttttggatagatatttgagttaggttttagttttttttttttttttcgatttcggtttattttgtatttaagaagattttttaaattagaagtttgtgtttattttttttttgttaagtagagtgaggggggtgttttcggttttttagataaaatttatgttttttatattagtttttaagattatttttatatgatgttataggtaagttatgtttttgtgttttagttttgttatttgtaaaatggggataataaaagtatttattttataaggtaggttttatagttaatgtagataaattgttttgaagagtatttgttttaatagtatttatatatagtaagtaacggatagatgttagttgttgttatttgttattatcggtgtcggcgtcgatattattattattattattatcgagtttttggtaattttttttgtagtatatgtttttaaggtttttcgaaaggatattatttggagtttttttttttttatttagtgtataattttgtttttttatttagtttttgagttatttttaagatgttttttttaataaggttttttttgttatatttagggatatgtttttttattcgtttttaattttagatatattaggatggtaatattaatttttttgggtttttgtttttttatttgttaaatgggtaaaatatagtttgtttcgtagattatgttgagatttaaatataaagagatgagatggtagatgttaaagttttgtaaattttaagattttgtaaaaatattagattttatttttatttttaaaatatatatattttttttttgtttttttaggtattaattaggtagttataatgttttataattagtagagttttttattttttattttattaggttttaggttggtaagaggaaagttgatgagagagggtttttagggttgaggaatttgtgtgatggtattattgattattaagttagaatagttttatatgggtggtattggggttagtgttttgaggtatttaagtttttgttttttttaattatgttaggtattgagaggataggaatagaaggggtttagttttaatattttttggggaagttagagtaaggtaaagatgattttttaattttttttttttatagattttatttgtttaaattttttggttttgttaggttttttttaatatatataaagattataatgagtttattatgtaaatatagttttagttgtgattttttttttttttttcgttttttttttgttaagttttgtaaaatagtatgtattagttttatttttttttatttatttatttatttatttttgagatagagttttgtttttgttatttaggttggagtgtagtagtatgatttcggtttattgaaattttcgttttttgggtttaagtgatttttttgttttagttttttaagtagttgggattataggtgtttaatattatgtttagttaatttttgtatttttagtatagacggggttttattatgttggttagggtggttttaaatttttgattttaggtgattttttcgttttggttttttaaattgttgggattataggcgtaattttattatatttagtttgtatttttttattttaatttaaaaaatatttaatataagtattttaggtttgttatgtgtttatgaggggcgggaagtatatataagtattgtatgtagttttagtattagaatattaggtattaagtaatgtttattggattaatattgagttgtgtttagagtgttttaatattaatatatttttttaggagtgtttatgtggattattttagtatttttttttttgtttaagttttattatttgttttaattatgaatttttgtttttattttaatttattttttaaatatttaattttaaggaagattgggtaacgatgtttttattgttatttttgtttaatttttaatttttgttagttttgtgtttgtaaggatgaaggatatgatttgaggatattaagagtagttaaagattttataagtaagtgtataatgtagttgaaagaaaatggattttggatttagtgagatttaggtttaagttttggttttatattatttattgttgtgtgttttttagtaagttgttttagtattttgcgttttagtttttttaattgtaaaatgggggtaatagggtttatattgtattaatgtttgtgaaaataatgattttttattttgtaattaataatatatttttttttattgaattttatattttagttgtttttgtgttttttgataaatttttggtgataatttgattttttttggtataagattaatattagtatgtgaattttatattaaagggtatgatatataaaaataaaatataaaaataaaattgtttgattaattaaaaataaatagtatttattatcgagaattattttaatgattttagataaagattataaaatatttaatataatgtttggtatgtgttaagtaaaatattttagttattattattagttattttaggaatgtgaagatgttttaagattattaaagggttttttataaggttagtgattatggggattgttgaagattaagtttagggagttgagtgttaggtaggagagtagttcgagagttttaattattttttgatttttaggatgtagtaatatggagagtatttagatgtagatagtgttttagtatatttgtttttattatttgttgggatttttgtagtatttttgggggttaggtagggaagatattattatttttattttatagatgtggaaatagaggttttgggggaagggaataatttgtttatggttatatgtttataaaaggtgaggttaggtttagaaattaggttttttgattgtaaatgtatatagaaattaataaagatggaattaataaggggttgaaagagtttagagatttattttatgttttttaggttttttgttattttttatttttttttttaattgtataaatatttttaggaattttttgttttaagaagaatgattaaataatttatttttttttttttttatttatttatttattttttttatttttttatttttttattattatattttaagttttagggtatatgtgtatattgtgtaggttagttatatacgtatatatgtgttatgttggtgtgttgtatttattaattcgttatttagtattaggtatattttttaatgttattttttttttttttttttattttataatagtttttagagtatgatgtttttttttttgtgtttatgtgtttttattgtttaatttttatttatgagtgagaatatgcggtgtttggttttttgtttttgcgatagtttattgagaatgatggtttttaattttatttatgtttttataaaggatatgaatttattattttttatggttgtatagtattttatggtgtatatgtgttatatttttttaatttagtttattattgttggatatt

SEQ ID NO: 1185 - DNA, 6334 bp, Artificial Sequence
  chemically treated genomic DNA (Homo sapiens)
tggttttttgattcgtgagatagggtcgtggaagttggggtgagtttggagatgttttcgggagtattaaggcgttagagtagttgattagggttttaggtttcgtcgtttttttaggtagagtcggttttaagtttcgttttttttttgggcggagttagttttaagttttttttttttgggcggagatagttttaggtttcgttttttttttgggcggagttagttttaagtttttttttttttgggaggagatagttttaggtatcgttttttttttgggcggagttagttttaagttttttttttttttgggcggagatagttttaggtatcgttttttttttgggcggagttagttttaagtttttttttttttgggaggagatagttttaggtatcgttttttttttgggcggagttagttttaagtttttttttttttgggaggagatagttttaggtatcgttttttttttgggcggagttagttttaagttttttttttttttgggcggagatagttttaggtatcgttttttttttgggcggagttagttttaagtttttttttttttgggaggagatagttttaggtatcgttttttttttgggcggagttagttttaagtttcgttttttttttgggcggagttagttttaagttttttttttttgggcggagttagttttaggtttcgtttttttttgggcggagttagttttaagtttttttttttttgggcggagttagttttaagtcggtttttattatagtgtgttttttgttttatggatttttatttttttagattttttttgattagtttaggtggggttgtcgtggagattatattagtattatcgtttgaggttttatgtttaattttttcggggttgttggagattgagtattgttttagttttttattaggcggttattgattttagggaggtttgttagttttgtttaggtttagcgacgtggttagttcggttagtttgcggggagggattcgattcggataagggtttttttagggatttgtgttaggtgggttacgaagatttttttttttttttttttttttttttttttttttttttttgagatagttttgttttgtcgtttaggttggagtgtaatggtgcgatttcggtttattgtaagtttcgttttttcgggtttacgttatttttttgttttagttttttgagtagttggaattataggcgttcgttattacgttcggttaatttttttcgtatttttagtagagacggggttttatcgtgttagttaggatggtttcgattttttgatttcgtgattcgttcgtttcggttttttaaagtgttcggattataggcgttcgttattacgtttggttaattttttttgtatttttagtagagacggggttttatcgtgttagttaggatggtttttattttttgatttcgtgatttattcgtttgggttttttaaagtgttgggattataggcgtgagttatcgcgttcggtcgattttttttttttaaatttgatgcgggagttaggtttatttttatcgtgggttttatggttataattttatacgtatatacgtatatacgtatgtacgtatatagacgtatgtatatatatatatgtatgtatatggttatttattgaatttttttttgtagtttttattaattttattttttttttattttttttgcgatttttaggtttggggtttttggattgggtttaagttttgtttaataaggaggttttgtcgtgatgggggtttttattttaaagaaaaagttatgaggattttagaattgattagtgggtgggagataggagagttggtttagttgggttaagaagggtttgttagggtttggggcgtgtttcgtttttggataacggcgtttttatagttttttttttttagggtaatatagttatttggaacgttttttcggtagttgtggatagggaggttaggatgtggggtttggggttggtgggatggttgggattttttatgggaaggggggttttttggttgggattttttatgggaagggggttttttgacggaggtcgtcgaggataatgtcgggaaggggattgatgttgggggcggggtcgagttttttaaggataaaaaggaggttttcgttgtcggcggaagatacggtgtaggtttttttgtgggattaggatttagatttaggggttttagggtttttttcggtttttaggttgttggtttatttcggtttttttatttttttgtttttgtttttttgtgtttttgtttttgtttttttgtgtttttttgttttttttttttttcgttttgtttttgtttttttgtgtttttatttttttgtgtttttttgttttgttttttttttttgatttgtttttttttttttgtgtttttgtttttttatgttttttttttttattttgtttttgtttttttgtgtttttgtttttttttttttgtttttgtgttttttttattttcgttttttttatttttggtcgttgaaatttgcgggtttttttgtttttgggaattttttttttttttttttgtgtttattttatttgttttgtttttagggggattttagttttgttgttttttcgtttttataagtttgtggatgtgagggttcggtatacggggattgtgagtagcgtgattattacgcgtgatttagcgggcgggcgggggatagggttttggagagttgggatatattttgtaaggggttttagtttttttggcgtttagtggtttttttttatttgtaggaagtagggtcgggggttgggaaatagtttatttattaggtttgttgtttttcgttcgggttaagggtttagtttttcgggaagggtttgtattttcggtttggggagggttttttttcggagtttgtttttcggtgaggtttttttcggtattagtttgggtaggagggggatgggatttagggagatagggttgtgagtttatatatttgggtttttatttttgaggggattgtttttttatttcgggttttagttttttttttttaggttttagttttttttttttgtatttagttttttttttaggttttagtttttttttttagtatttagtttttttttcgagttttattttgttttttttgtatttagttttttttttaggttttagttttttttttttgtatttaggttttgttttggattttagttttttttttttggttttagttttatttttgggttttagttttttttttttgattttagttttttttttgggttttagttttttttttttggttttagtttcgtttttgggttttagttttttttttttgattttagttttttttttgggttttagttttttttttttggttttagtttcgtttttgggttttagttttttttttttggttttagttttgtttttgggttttagttttttttttttgataggtaagtcgattggtaatgtttggaattttatggattggttgttgttttttattttatggttagggaaattgaggtatagatagattttgaggttagtaggaatgttttattattttattttcgcgtgtttgcggtgtatggggtttagggttataggatcggtttttgggtggaggggagttagttattacgattgttattataggtttttattgagttaggagtagagtattttgggaattatagcggaggagggtggggggcgagggggtgagggggtgggtagaatttgggtaaggtgaggagtagttcgggtagagttttagaggttttgggagggtttcggtgatgtaggggggtaaataagttattagcggagatagaattagtgtgcggggtttggaggaataggtgggtggattttagtgcgtttggaagatgaggtttttaggattcgttgatggtagttgtgagtgggagtttagttagtattttttttagattttttttgtggatcgagatttaggttttagtgtagattaaggaatagaggtagtttttattcgggtttttaggttttagttaggtttgttaggtgggcggtttttgttcgtgtgatggaaggaagttaggtttagagatggggtgatttgttttacgttttggagggttttatagttttattacggttaggagattttagtttagggggtttttatttttagcgatttttatttgatttttaggggattttagttaataagattcggtttgtagtttcggaacgggggagggttgttttttatcgtttttgtgcggtcgttcgggaaagtgtaggcgggtcgggcgcggtggtttacgtttgtgattttagtattttgggaggtcgaggtgggcggattatttgaggtcgggagttcgaggttagtttgtttaatatggagaaattttgtttttattaaagatataaaattagttaggcgtggtgacgtatgtttgtaattttagttattggagtggttgaggtaggagaatcgtttgagttcgggagatagaggttgcggtgagttgagatcgtattattgtattttagtttgggtaataagagcgaaatttagaaaaaaaagaaaagaaagtgtaggggattcgtcgtcggggtgggggcggcgttgtttagtttttgttttatttttatgtatttgatttcgatttttcggttttcgtttgcgattttttcgtgtttgaatatgaggtttggaatagatttagatttttttgtttgttcgttttgagtggtttcgggatttcgttttatttttggtttttagtttttgtttttttgtcgtttttagggtcgggggttaggttaggaaagttttttgggaagttttcggggagtagttggagcggggtcgtcgggcggcgggaaggagtgggcgtttttatttaagcggttttttcgcggtttcgggatagaggggattgagtatggatttcggattggtttttttgttggcggggtttttggggttttttttcggtgagaaggggagggggcgcgggagagaggagtgagttaggagggggtttaggagagaggagggggtttaggagaggggagggggtttaggagagaggagagggttcgggagagaggagggggtttaggagaggggagggggtttagtagagtgggggggtttaggagagaggagggacgtaggagagaggaggggcgtaggagagaggagggggtttaggagagtggagggggtttaggagagaggaggggcgtaggagagaggagggggcgcgggagagaggagggggcgcggaggggagggggcgtaggagagaggagggggcgtaggagagtggagggggcgcgggagagaggagggggcgcgggagaggggagggggttcgggggagaggaaggggcgcggtgagcggggaggggacgcgggagagaggagggagttaggagggggtttaggagaggggagggggtttagtagagtgggggggtttaggagagaggagggacgtaggagagaggaggggcgtaggggagaggagggggcgtaggagagtggagggggtttaggagagagaaggggtttaggagagagaaggggcgtaggagagaggaggggcgcggaggggagggggcgtaggagagagtagggggcgtagtaaagtgaagaggatttaggagagaggagggggcgcgggagaggggagggggtttggaagagaaggggggttcgggagaggggagggggttcgggagaggggagggggttcggaagagaaggggggttcgggagaggggagggggttcgggggagaggaaggggcgcggtgagcggggaggggacgcgggagagaggagggagttaagagggggcgtaggagagaggaggggttcggagggggcgcgggagagacgaggggtgtttagagttaaggggtttcgagatagggggtgattggtgattttgttagaggagggggttcggaggaggtaggggttgagaggggaagttgcggggtttcgcgcggttttttgattcgtagcgaaattggttttaggtagttggggttcgggggattggggtagaggcggcggtcggggcggggtttagggatcgagtttgggagttcgggtagcggcggggtaggggttcgggggtgtagcggagggttcgggaatcgggtagaggcggggcggggttcgggggtggagcgggacgtagggtcggtggcggggcggggttcgggatttcgcggggttgagcgagagtcgcggtcgtcgtagg

SEQ ID NO: 1186 - DNA, 6334 bp, Artificial Sequence
  chemically treated genomic DNA (Homo sapiens)
tttgcggcgatcgcggttttcgtttagtttcgcggagtttcggatttcgtttcgttatcggttttgcgtttcgttttattttcggatttcgtttcgtttttgttcggttttcggatttttcgttgtattttcggatttttgtttcgtcgttattcggatttttaggttcggtttttgaatttcgtttcgatcgtcgtttttgttttagtttttcgaattttagttgtttggagttagtttcgttgcgggttagggggtcgcgcggagtttcgtaatttttttttttagtttttgtttttttcgagtttttttttttggtaggattattaattattttttatttcggagttttttaattttgagtatttttcgtttttttcgcgtttttttcgagtttttttttttttttgcgtttttttttaatttttttttttttttcgcgtttttttttcgtttatcgcgtttttttttttttttcgggtttttttttttttttcgggttttttttttttttcgaatttttttttttttttcgagtttttttttttttttcgagtttttttttttttttaaatttttttttttttttcgcgttttttttttttttttgagttttttttattttattgcgttttttgtttttttttgcgttttttttttttcgcgtttttttttttttttgcgtttttttttttttttgagtttttttttttttttgagttttttttatttttttgcgttttttttttttttttgcgtttttttttttttttgcgtttttttttttttttgagtttttttattttattgagttttttttttttttttgagtttttttttaatttttttttttttttcgcgtttttttttcgtttatcgcgtttttttttttttttcgagtttttttttttttttcgcgtttttttttttttttcgcgttttttttatttttttgcgttttttttttttttttgcgttttttttttttcgcgtttttttttttttttcgcgttttttttttttttttgcgtttttttttttttttgagttttttttatttttttgagttttttttttttttttgcgtttttttttttttttgcgtttttttttttttttgagtttttttattttattgagttttttttttttttttgggtttttttttttttttcgggttttttttttttttttgagttttttttttttttttgagttttttttttttttttgagtttttttttaatttatttttttttttcgcgtttttttttttttttatcgaggaggagttttagaagtttcgttagtaggagggttagttcgaaatttatgtttagttttttttgtttcgaggtcgcggggaagtcgtttaaatagaggcgtttattttttttcgtcgttcggcgatttcgttttagttgtttttcgggggttttttaaggggtttttttggtttgattttcgattttggaggcggtagagaggtaggggttgggggttaaagatggggcggggtttcggggttatttaggacgggtaggtaggaaggtttgggtttgttttaagttttatatttaggtacgggaagatcgtagacggaggtcggagggtcgaggttaagtgtatggaagtgggatagaggttgggtagcgtcgtttttatttcgacggcgggttttttgtattttttttttttttttttttgagtttcgtttttgttgtttaggttggagtgtaatggtgcgattttagtttatcgtaatttttgtttttcgggtttaagcgatttttttgttttagttattttagtagttgggattataggtatgcgttattacgtttggttaattttgtatttttagtagagatagggtttttttatgttgggtaggttggtttcgaattttcgattttaggtgattcgtttatttcggttttttaaagtgttgagattataggcgtgagttatcgcgttcggttcgtttgtattttttcgggcggtcgtataggggcggtggagagtagttttttttcgtttcggagttgtaggtcgggttttgttggttggggttttttgggggttaggtgaaggtcgttggggatggaggttttttggattgaagttttttggtcgtggtggagttgtgagattttttaggacgtgggataagttattttatttttgagtttggtttttttttattatacgggtagaggtcgtttatttagtaggtttggttggagtttgggagttcgagtaggggttgtttttgttttttggtttatattgagatttggatttcggtttataagagggatttggaagggatgttggttggatttttatttatagttgttattagcgagttttgggaattttattttttaaacgtattggaatttatttatttgtttttttaagtttcgtatattggttttgttttcgttggtggtttgtttatttttttgtattatcgggatttttttagggtttttgggattttgttcgggttgttttttattttatttaggttttgtttatttttttattttttcgttttttattttttttcgttgtggtttttagggtgttttgtttttagtttaatgagggtttgtggtggtagtcgtgatggttggtttttttttatttaggggtcggttttgtgattttggattttatgtatcgtaggtacgcgggaataaaatgatggagtatttttgttgattttagggtttgtttgtgttttagtttttttggttatggaataaaaagtagtagttagtttatggggttttaagtattgttaatcggtttatttgttagaggagggaaattgaggtttaggggtagggttgggattagaggagggaaattgaggtttaggggcggggttgggattagaggaggaaaattgaggtttagaggaggggttgggattagaggagggaaattgaggtttaggggcggggttgggattagaggagggaaattgaggtttagaggaggggttgggattagaggagggaaattgaggtttaggggtggggttgggattagaggagggaaattgagatttagggtagggtttgggtgtaaaggagggaaattgaggtttaggggaggggttgggtgtagaggaggtaaaatgaggttcgggggaggggttgggtgttgaggagggaaattgaggtttagaggaggggttgggtgtaaaggagagaaattgaggtttagaggagggaaattgaggttcggggtggggaaatagtttttttagaggtgagggtttaggtgtgtgagtttatagttttgtttttttgggttttattttttttttgtttaggttggtgtcgggaaaggttttatcggaaagtagatttcgaggaggggttttttttaggtcggaggtgtaggtttttttcgggaagttgggtttttaattcgggcggggggtagtaggtttggtgaatgggttgttttttagttttcgattttattttttgtaggtggggagggattattgggcgttaggagggttgaggttttttgtagggtgtgttttagttttttagggttttgtttttcgttcgttcgttgggttacgcgtggtgattacgttgtttatagttttcgtgtgtcgagtttttatatttataggtttgtgggggcggggagataataaagttggggtttttttgaggatagggtaggtgggatggatataggaaggaggagggagggtttttagaggtagagggattcgtaggttttaacggttagaggtggggaaggcgggggtgagggagatatagagatagagagagagagatagagatatagagagatagagatagagtgaggaagagagatatagggagatagagatatagagagggagagatagattaaggaagagagataaggtagagagatatagggagatagagatatagagagatagagatagagcgaggaagagagaaggtagagagatatagggagatagagatagagatatagagaggtagaggtagagggatggagagatcgaggtgggttagtagtttgagggtcggggaggattttgagatttttgggtttgagttttagttttataggaaggtttatatcgtatttttcgtcggtaacggggattttttttttgtttttgggagattcgatttcgtttttaatattaatttttttttcggtattgttttcggcggttttcgttaggaagttttttttttatggagggttttagttaggaagtttttttttttatggagggttttagttattttattagttttagattttatattttggtttttttgtttatagttgtcgagggagcgttttagatgattgtgttgttttgaggggaaggggttgtgagggcgtcgttgtttaggagcggagtacgttttaggttttgatagattttttttgatttagttgggttagtttttttgttttttatttattggttagttttggggtttttatggttttttttttggagtgaggatttttattacggtagggtttttttgttggataaggtttgaatttagtttaaggattttagatttgagggtcgtaaggagagtgggggaggaatgagattgatggaggttgtaggagggggtttaataagtagttatgtgtatgtatgtgtgtgtgtgtatgcgtttgtgtgcgtgtatgcgtgtgtgcgtgtgtacgtgtggagttgtagttatgaagtttacgatgggggtgggtttggttttcgtattaggtttaaggaggaaggatcgatcgggcgcggtggtttacgtttgtaattttagtattttgggaggtttaggcgggtggattacgaggttaggagatggagattattttggttaatacggtgaaatttcgtttttattaaaaatataaaaaagattagttaggcgtggtggcgggcgtttgtaattcgagtattttgggaggtcgaggcgggcggattacgaggttaggagatcgagattattttggttaatacggtgaaatttcgtttttattaaaaatacgaaaaaaattagtcgggcgtggtggcgggcgtttgtagttttagttatttaggaggttgaggtaggagaatggcgtgaattcggagaggcggagtttgtagtgagtcgagatcgtattattgtattttagtttgggcgatagagtaagattgttttaaaaaaaaaaaaaaaaaaaaaaaaaaaggaggaaggaaggattttcgtggtttatttggtataggtttttgaaggaatttttgttcgagtcgagttttttttcgtaggttggtcgagttgattacgtcgttgagtttgggtagagttgataggtttttttggggttagtgatcgtttggtgaggggttggggtagtgtttagtttttagtagtttcggggaaattggatatggagttttaggcgatgatgttggtgtggtttttacggtagttttatttgagttaattaggaggggtttggggggatgggggtttatggggtaggaggtatattatggtgagagtcggtttggggttggtttcgtttaggggagggggggtttggggttggtttcgtttagggagaggcggggtttggggttggtttcgtttaggggaggggggtttggggttggtttcgtttagaggagaggcggggtttggggttggtttcgtttaggggagaggcggtgtttggggttgtttttttttaggggagggggggtttggggttggtttcgtttaggggagaggcggtgtttggggttgttttcgtttaggggaggggggggtttggggttggtttcgtttaggagagaggcggtgtttggggttgtttttttttaggggagggggggtttggggttggtttcgtttaggggagaggcggtgtttggggttgtttttttttaggggagggggggtttggggttggtttcgtttaggggagaggcggtgtttggggttgttttcgtttaggggaggggggggtttggggttggtttcgtttaggagagaggcggtgtttggggttgtttttttttaggggagggggggtttggggttggtttcgtttaggggagaggcggggtttggggttgttttcgtttaggggaggggggtttggggttggtttcgtttaggggagaggcggggtttggggtcggttttgtttggggaagcggcgaggtttggggttttggttagttgttttgacgttttggtgttttcgggggtatttttaggtttattttagtttttacggttttgttttacgggttaaagggtta

SEQ ID NO: 1187 - DNA, 6249 bp, Artificial Sequence
  chemically treated genomic DNA (Homo sapiens)
atttttgcgtttttatttttgtaagtaagtattagtttgtgtgtatttgggtttatatattttgttttttttttagttattagttttttttatattattgtattgtttttaattttgttttttagttttttagtggatgtgtaaagtagatttagtttttaggtttttatatttgtttttttttttgtttgggaggttgggaatttattttttagagtgtgtattgtgtttttttttttttttttaggattttttgtagtgaggttttttttgtttttttagaaatagttattttttttatttttaatttttttttttttgtttttttattatttgtattattatttagtaaatttgcgtatttatttatttatttatttatttttttttttgagatggagtttcgttttgtcgtttaggttggagtgtagcggtacgatttcggtttattgtaatttttgtttttcgggtttaagtgatttttttgttttagttttttaagtagcggggattataggtatatgttattatgttcggttaatttttttttttttttgtatttttagtagagatggagttttattatgttggttagattggttttgaatttttgatttcgtgatttatttatttcggttttttaaagtgttgggattataggtgtgagttattacgtttggtcgtgtatttatttattatttgttttttttaatgagggtagggatttttttttgtttgttattatattttttgttagaatagtgttttatttatttatttatttaataggtatttaatatgtttttgttaaatattaggtattgtttaggtgttgagattatagtaatgaatatagaagattaaaaattttgtttttttggttaaataatacggagatatttgagtgaagatttgagggagatgaaggagtgagttatgtggatatttgtgggaagagttgtttagggagtgttatggtttgaatgtattttttaaagtttatatattgtaaatttaatttttagcgtaatagtgttgagaggtgagaattttaagaggtgattatgttatgaggattgttaaattaagtttaggttaaagttgtttttatatatatatatatacgtatatatatatatgtatatatgtatatatatatatatatatatatatatatatatatatatatatatttttttttttttttttttgagacggagttttgtttttgttgtttaggttggagtataatggtatgatattggtttatcgtaattttcgtttgtcgggtttaattgatttttttgttttagtttttcgagtagttgggattataggcgtgagttattacgttcggtttatatatattttaagttaggtttaaaggtttttttgtatatagtaaattgtaatttaattggatatgtaaatagattgtagttaatttttgtattaattatagagttttggttaattataggtagttaattgtttaaattgtgttaaaataaagtaaatatttagttttaattaatttagttttttttgtattttattttattttttgttatttttttttttttgtttataaatattatttgattttgtggtagttttagagttgttttgaaattattttggttttgggggttgtttagtttttaaattgttttttgtttaattaaattttgttaaatttaatttgtttaaagttttttttttaatagggatttgtttttatgaatggattaatggtattatgggagtgcggtttggtattttaggaggggattgttgatataagtatgagtttggtttttttttatttttttttttatgtttttttttttgttatgtgatgttttttgttatgttgtgatgaaggaagaaggtttttattagatgtagttttttgattttggattttttagtttttagaattatgagttaaattaatttttattgtgtataaattgtttagttggtggttgtattggtttatttttatattgttatgaagaaatatttaagattgggtaatttataaagaaaacgtggtttagggttgggtacggtggtttacgtttgtaattttagtattttgagaggttaaggtaggtggattatttgagtttaggagtttgagattagtttggttaatattataaaatttcgtttttattaaaaaatataaaaaaagattagttaggcgtggtggtgtatgtttgtagttttagttatttgggaggttaaggtaggagaattgtttgaattttggaggtagaggttgtagtgagttgaggttgtattattgtattttagtttgggtgatagagtgagattttgttttaaaaaaaaaaggtttaatggatttatagttttatacggttggggaagttttataattatggtagaaggtgaaggaggagtaaaggtatattttacgtggtagtaggtaagagggcgtgtgtagggaaattgttttttataaaatcgttagatttttatgagatttatttataattacgagaatagtatgggaagaatttatttttatgattcgattattttttattaggttttttttatgatatatggaggttatgggagttataatttaagatgagatttgggtggggatatatagttaaattttattagtggtattttattatagtaatataaaatgaatttagaaagggagggaatagttagtatatagatattgaggtgagaatgtgtttagattgttttagaagagtgaggatgttagtgtgatttggggaagtgagtaagaggaagagtagaagtgtaggttagagtgttaaaggaggggaaggaaagattatgtagagttttgtgtttattatgggaatttttattttgagtgaaatgaggatttaagggaggattttttaaaaatttaataaaatgatattaatatatagtttatatttaggtttttataatggttttattaatgtttttttaaaaagaatatttaaatttttattattatttaaggaaataatttgtataatgggtaaaattaaattttattgtatatataataatattaatagttattatttaagattattaggattgtattaagaaaggttatttaggttgggcgcggtgggttatgtttgtaattttagaattttgagaggttgagacgggtggattatttgaggttaggagtttgagattagtttggttaaaatggtgaaatttcgtttttatttagatgggcgtggtggtgtgtatttgtagttttagttattcgagaggttgaggtaagagaattgtttgaattcgggaggtagaggttgtagtaagtcgagatcgtgttattgtattttagtttgggcgatcgagcgagatttcgttttaaaattaaataaatgttatttttgatttttttaaaaattaacgattttaaaatgatagtttatagttttttttttttatttaggatttaattaaggttatatattgtattttattgttatgttttttttttaatagtttgaggtaaaatttatatattaaatgattgatttatttaaagtgtgtaatttaatggtttttggtatatgtatagagttgtgtaattattattagaaattagttttagaataattttgttattttataatttttagttgttattttttaggttttttatttttttaattttatgtaaattattaatttattttttgtttttatagttttgtttattttgagtattttatatatgtggaagaatataatgtgtggtttgttttttttttttttacgttttgaaaggttatttatgtagtatgtattagtattagtattttatttttttttatggttgaataatgtttttttgtatgggatattttatattatttattaagggagggtttttaatagaggagtggtttgattcgagtggtatttaataaggtttatttttttgttgttttaaggagtagagaatgattaattgcgttaaacgttgtttttagggaaaataagatgaggtttacgaattgattagtaagtgtttaaataggttaagggaaaaaggaatttaattagaagatatattttgatatatattgttgggagtgatttttttttttttttttttgttttatgtgaaatttattttttaaaaaaaaattattttttttaaacgtaatttaatattatagtaattatgtaagattttatgtagttttaagagttagttaagagaaaagttgatttttgtaagaagatatttttaatgtttatgtagattaggtaggtaagagttaagtgcgggggagttggtattatttaaaagattgtagaaattggattaaaaatgtggagttttaaagtagtatttttttatggtatgttattatttggagtaataaggttatttattcgaattattggattttgagttgatataaaacgtatttgttgatttagggtttgtataattacgtgtagtatttattaggttatttaattttgggtacgtataatttttggggtttgtaaattattggagagtgagtgaggggtaacgaaagatagatataaaagggcgcgtttcgaaaggtaattgttaatatgtattttacgtttatagaacgatttagtgggcgcggtggaagcgttaatgaatattttagaaaataaatatatggaatatcgaaatttatttgtagataatggattaagttcgttttatcgggattaaaaaggtagggttaggaaagtttgaacgtcgttatattgttttttttttaggaagaaacggggcgtggggttgtcggtagaagggggtggtttcggtcgttttttcgcgtcgtttttcggtttcggtcgcgttgcgtttacgtcggtcgggtcgggaatttggagaggatttttggtcgcgcggtagcggcggcggcgcgcgggtgagcgggtgagcgtgtgagcgggcgggcgggtaggcgagtgcgtcgggtattggtagttgaggagtggaggttgggtagtttcgattttttgacgttagcgcgattagattaatttaggttttaggagaaagtaggcgggcgggcggagaaaggagaggtcgagcggtttaattcgggtcgaggttcggggagcggagagtggcgtagcgttcggtcgttcggattcgggtcgcgagatttcgttcgttcggttattcgtgtttttatacggacgggcgcgtcgttaattcggtaaaacgaaatagattcgaatcgaattttttttttatgtcgcgttttagtttttttttcggcgtttcgggttttttagcgtcgtcgtcgtcgtttttgtacgcgtggggtcgtcgcggtcgtgttgggttgggggcgcgggtagcggcgggaagggggttttttttgcgcggggcgggtcgcgattttttttttttatgatggcgtttttcgtttgttcggaggagcgaatttgttattacgttttttcgcgtttagttcgtcgggtttttttggtgtttttgttgggttttttgttgtgggaagtttagttttcgggttttcgagtttcggttttcgggtttgatcgcgttgggattttttcggtcgcgtttttttttcgcgcgttttttatatttttttcgtgttgtcgtcgggtcgaggttcgttcgcgtggttcgcggatttattgtgtttttcgcgtcggcggggcgatttttgcgggagttggaggacgatcgttggcgttgttttttaaggcgtttggtggagcgggtttcgcgggcgggggatttcggcgtttcgggtttttttatatttcgtacgggtttttttttcggttttagtaagtttttttggggtcgaggttaaggaaagttcgtatcgagattttttttaatttatttaaaggtttggcggcggcgcgtaattttttttttttttttcgtttatattcgttgcgttttttggtgtttcgtttttttttttttatcggagtcgattgttttattgtatgtgtattcgtgagttcgcggttgaataattgtttttttattttgttttttgtttttgttagtgtttttcggggttgtttttgtaggaaggtgggggtggtgggcgtgagagatagatgtgggtttgtttttttagttgttgaaattgtatgaaggttttaaagggagaacgtttttttgatgtgttttaggaggggaggaggaataaatgtttgttagattttata

SEQ ID NO: 1188 - DNA, 6249 bp, Artificial Sequence
  chemically treated genomic DNA (Homo sapiens)
tgtgagatttggtaggtatttgttttttttttttttttaaagtatattaagaaaacgttttttttttaaagtttttatatagttttagtaattagaaaaataagtttatatttgttttttacgtttattatttttatttttttatagaaataatttcgagaaatattaataaagatagggagtagagtaaaggaatagttgtttaatcgcgaatttacgaatatatatgtagtgaggtaatcgatttcggtaaagggaaaggaacgagatattaggagacgtagcgggtgtaggcggaagagggggaaaaaattacgcgtcgtcgttaaatttttgaataaattagaggggatttcggtgcgaattttttttgatttcgattttaaagaggtttgttggggtcgagaagaaaattcgtgcgggatgtggaggggttcggggcgtcggggtttttcgttcgcgagattcgttttattaggcgttttggagagtagcgttagcggtcgttttttagttttcgtaggggtcgtttcgtcggcgcgggggatataatgggttcgcgggttacgcgaacgggtttcggttcggcggtagtacgggagagatgtgaggagcgcgcggaaggggagcgcggtcggggagattttagcgcggttaggttcgggagtcgaggttcgggggttcgggaattgggttttttatagtagaagatttaataaagatattaggggagttcggcgggttgggcgcgagaagacgtggtagtaggttcgttttttcgagtagacgggaggcgttattatggggggggggggtcgcggttcgtttcgcgtagaaagagtttttttttcgtcgttgttcgcgtttttagtttagtacgatcgcggcggttttacgcgtgtagagacggcggcggcggcgttggaaagttcggggcgtcgaggggagggttgggacgcggtatgaagggaaagttcggttcgggtttgtttcgttttatcgggttggcggcgcgttcgttcgtgtgggagtacgagtggtcgggcgagcggggtttcgcggttcgggttcggacggtcgggcgttgcgttatttttcgtttttcgagtttcggttcgggttgagtcgttcggtttttttttttttcgttcgttcgtttgtttttttttggagtttggattgatttggtcgcgttggcgttagggagtcggagttgtttagtttttattttttagttgttaatattcggcgtattcgtttgttcgttcgttcgtttatacgtttattcgtttattcgcgcgtcgtcgtcgttgtcgcgcgattagggattttttttaaattttcggttcggtcggcgtgagcgtagcgcggtcggggtcggaggacggcgcgggggagcggtcggagttatttttttttatcggtagttttacgtttcgtttttttttggagaaaaaatagtgtggcggcgtttaggtttttttaattttgtttttttagtttcggtggagcggatttagtttattatttgtaagtgaatttcgatgttttatatgtttattttttgaaatgtttattaacgtttttatcgcgtttattgaatcgttttataaacgtggagtgtatgttgatagttatttttcgagacgcgtttttttatgtttatttttcgttgttttttatttattttttaataatttgtaggttttagaagttgtacgtatttagaattggatagtttagtaaatattgtacgtggttatataaattttgagttaatagatgcgttttgtgttaatttaggatttagtgattcgagtaggtaattttgttgttttaaataatggtatgttataaggagatattgttttagaattttatatttttggtttaatttttatagttttttagatgatgttaattttttcgtatttaatttttatttatttgatttgtatagatattgaaaatatttttttgtaagagttaattttttttttggttaatttttgaagttgtataaaattttgtataattattataatgttgagttacgtttagaaaaaatgatttttttttgaggaataaattttatatgaagtaaaaaaaaaaaaaaaaaaattatttttagtaatgtatattagaatatgttttttaattaaattttttttttttttaatttatttgagtatttattggttaattcgtgggttttattttattttttttaaaagtagcgtttgacgtagttgattattttttgttttttagaataataggaaagtgaattttgttaaatgttattcggattaggttatttttttgttgaaaatttttttttgataaatagtataaagtattttatataagagaatattatttagttataaaaaggaatgaagtattgatattgatgtatgttatatggataattttttaaaacgtgaagggaaagaagatagattatatattgtatttttttatatatgtgaaatgtttagagtaggtaaggttatggagatagaaagtagattggtggtttgtatagggttggggaaatgaggaatttggggagtgatagttaaaggttatggggtgataaaattgttttaaaattagtttttggtgatggttgtataattttgtgtatatattaaaagttattaaattgtatattttaaatgggttaattatttggtatgtgaattttattttaagttattaaaaaaaaagtatgataatgaaatgtagtatatgattttgattggattttgaatggggaggaggagttataaattgttattttaaagtcgttaatttttaaaaaaattaaaaatggtatttatttaattttgagacggagtttcgttcggtcgtttaggttggagtgtaatggtacgatttcggtttattgtaatttttgtttttcgggtttaagtaatttttttgttttaatttttcgagtagttgggattatagatatatattattacgtttatttaagtagagacggggttttattattttggttaggttggttttaaatttttggttttaagtgatttattcgttttagttttttaaagttttgggattataggtatgatttatcgcgtttagtttagatggttttttttagtgtagttttagtagttttaaatgataattattaatattattatgtatgtaataaaatttgattttgtttattgtgtaaattatttttttaaatgataataaaaatttggatattttttttaaaaggatattgatgagattattataaaaatttaaatatggattgtatattaatattattttattaaatttttaaaaaatttttttttgggtttttattttatttagaataaaagtttttataataagtataagattttatataatttttttttttttttttttagtattttgatttgtatttttatttttttttttgtttatttttttaagttatattggtatttttatttttttggaataatttgggtatatttttattttagtatttatgtgttagttgttttttttttttttgagtttattttgtgttgttgtaatagaatattattgatagagtttggttatgtatttttatttaaattttattttgaattgtagtttttataatttttatgtgttatagaagggatttggtgggaggtaatcgaattatgggggtgggttttttttatgttgttttcgtgattgtgaataagttttatgagaatttgacggttttataaagggtagtttttttgtatacgtttttttgtttgttgttacgtaagatgtgtttttgttttttttttattttttgttatgattgtgaggtttttttagtcgtgtaaaattgtgagtttattaaattttttttttttgagatagaattttattttgttatttaggttggaatgtagtgatgtaattttagtttattgtaatttttgtttttagggtttaagtaatttttttgttttggttttttaagtagttaggattataggtatgtattattacgtttggttaatttttttttgtattttttagtagagacggggttttgtggtgttagttaggttggttttaaatttttgagtttaggtgatttatttgttttggttttttaaagtgttgggattataggcgtgagttatcgtatttagttttaaattacgttttttttataaattatttagttttgggtatttttttatagtagtatgaaaatggattaatataattattagttgggtagtttatatataataaaagttaatttagtttatggttttgggggttgagaaatttaaaattaaggggttgtatttggtgagggttttttttttttattataatatagtagaaggtattatatagtaagagagagaatatgagaggaagggtagaaaagggttaaatttatgtttatattagtaatttttttttgagatattaaatcgtatttttataatgttattaatttatttatgaggatagatttttgttaaaagaaaaattttaggtaaattaaatttaatagagtttaattgagtaaagagtaatttgagaattgagtagtttttagaattagaatagttttagagtaattttggggttgttatagggttagatgatgtttatgggtagagaaagaaaagtgatagaaaatggagtgaggtatagaaaaaattggattggttagagttaaatatttgttttattttaatatagtttgaatagttggttgtttgtgattgattaaaattttgtgattggtataagagttggttatagtttgtttgtatatttagttaggttatagtttgttgtgtatagagaaatttttaggtttaatttaaaatatgtatgggtcgggcgtggtagtttacgtttgtaattttagttattcgggagattgaggtaggagaattagttgaattcggtaagcggaggttgcggtgagttaatattatgttattgtattttagtttgggtaataagagtaaaatttcgttttaaaaaaaaaaaaaaaaaaatatatatatatatatatatatgtgtgtgtatatatatgtatatatatatgtatatatgtatatatacgtatatatatatatatggaggtagttttagtttaaatttaatttaatagtttttatgatataattattttttgaagtttttattttttaatattgttgcgttggggattaagtttataatatataaattttggggaatgtatttaaattatagtattttttggatagttttttttatagatgtttatatggtttatttttttattttttttaagtttttatttaaatgttttcgtattatttagttaaaagagtaggatttttggttttttgtgtttattgttataattttagtatttgagtagtgtttggtatttaataggagtatattaaatatttgttgaatgaatgagtaagtgaagtattgttttagtaggggatatggtggtaagtagaaaaaaatttttgtttttattaaggaagatagataataaataaatatacggttagacgtggtggtttatatttgtaattttagtattttgggagatcgaggtggatggattacgaggttaggagtttaaaattagtttggttagtatggtgaaattttatttttattaaaaatataaaaaaaaaaaaaaattagtcgggtatggtggtatgtgtttgtagttttcgttatttgggaggttgaggtaggagaattatttgaattcgggaggtagaggttgtagtgagtcgagatcgtgtcgttgtattttagtttgggcgatagagcgagattttattttaaaaaaaaaaataaataaataaataaataagtgcgtagatttgttaggtagtggtataagtgatggaaaaataggggaagagggattgagaatgggagagatgattatttttaaaggggtagaggaaattttattgtaagaggttttgaaggaagggaaggaagtatagtatatattttgagggatgagtttttaattttttaagtaaaaggaagagtaagtgtaaagatttagaagttgagtttattttatatatttattgaaaagttggggggtagggttggggatagtgtagtgatgtaggaaaagttagtgattggagggaaggtagagtgtgtggatttagatgtatataagttggtgtttgtttgtagaggtgagaacgtagggat

SEQ ID NO: 1189 - DNA, 6191 bp, Artificial Sequence
  chemically treated genomic DNA (Homo sapiens)
atttaggtatttagaagataacgatttgttagtttttgaaatgaaggttttgtagagttttattttaggaatagggataaattagaggtagttttttttatagtaaaattgttatttagtagtgttttatgattttggtattatagaggaagtagtaaaagtatatgtatgaaaattgtgttaagtgaaggatgaataagaaaatatttagggtaattattaaaagaaaagaatgtaataaatgaatatagaaaaaaattggatatagaatatgtgataaatttagaagaagataagaaagaaaatataaaataagtaggtaattaaattagtaattatgttatatggaaatgggttaaatattttaagtaaatggtaaaaattattagattggataaataataattatttaaatataagtatttagaaagattgagagaaaatgatgcgaaaaggtatattatttaaatgttaattgaaggaaataagtgtggttatattaattaggtaaaggagattttaatataataaatagtagtagaaaaagagaattatattttatagtgtaaggggattgatttattagagttattataattttttatgtgtatttagtaaaatagtttaaatatttataaattaaaaattttattttgaattaaaagaaatagataaatatgttattataatggatgtatatatataggatatatatatattataattagtaggtttgatttaattgttatatgtagaatattgaaattattaatggtggtattaattatttttttttttgtatatggaaattgtattagaattgattataagttagggttatgaataaagttttagtaaatattattgattttaataattgaatatgttgtttgtattatagtaaataaaaataattagaaaatttttagttgtttagaaataaaatattatgtttttgaataatatatgatttaaaataagaatttatgatggttattagaaaatattttaaattgattgaaaatgaaggtgaattataatgatttagattgttgttgttgaaatgttaagatgaaatttatagttttaagtttatgtattggaaaagaaagtttttttaaggaggtagaaaaggaataggaaattaaatttaaagatagtagaagtaaagaaataatgaagataagagtagaaattagtgaatagaaagtaattttatatagagaaaattgataaagttaagaaaaagttggttttttgaaaagattaatgtaattgattatttagtaaaattgataaaaggaggatggggagggggagagagaatataaatttaaataataggaattgaaaaatgttatattattacggattttatagtcgttaaatagaggtatttatgaatagtttatggagaatatgggataggtagagtaggtagaaattttgagtagttagggttggattatttaatatgggtaggtagtatttttgtgtagttattgagtatttgaaatgtggttagttttagttgagttgttttgtaagtgtaaagtatttaatagattttgtagatttagtatgaaaattttttttatattgattgtaggttgaaatgatggtattttggatatattgggttaaatatattattaaaatgttgtttattttttttttttttttaaaatgttattagagaatttaaagtatatatgtagtttatattatatttttatagaggttgttatattggttttaagataggtattgttatttttattttatagttgagaaaattggggtgtatagaggttgttatgtagttagtaagtggtatttttgggatttgaatttggttaattggttttagaatttgttttttgaagtattatattgtttatgggtttttaaaggatattaagttattttattgttattttttgtaaatattgaaggatttttagtagtagggtgatatgtagtatgtattttagaaagttgtttgtattaaagaaggtagaaggtggtgattgaaagattagttaaatgatttgtagattgagaaaggagttggagttaaatgtgttattttaattttatttaatggattaatttgttaggtatagatagttttgttgattgtataaagagtttagtttttaatggttttttttaggtttttagattagttttagattgttatgtgtaatataatgtattgatataattaagtatttgttttttggtattatgttgtttgatataaattttagtgttggtatttaaaagttgtgttattatgttgtgttgttataaattgttttttgtatttatgatatttttttttttaattatttattttttttttatatttgataatttttttatatgtattttttagaattttttttttattgaatttggcgttttttgagtttttttatatattagtattgcgttttattattatatgatagtttgatttttttgttaagttttaaatttttgtttttagttgtttatcgggtatttttttttggaattttatagttatagtaaatttagtttgattaatataatatttatgttttttaaatatttcgtattttggcgaattgtatttttatttaattggttttttaagtaagaatttgtaatttgtaatttttttttaattaattttgttttttttatgtttttaatagttatttttttttttgtgtattgtaattttttgttggttgatttttttgtttttaaaaatttattttttttttattttttattgttaatattttgttataaaggattttttttgttttattcgttttagtttaatagtgtagtttgtagatgaataatatagattggatttgagaataaataggtaaatataggtataatagataggtaaaaaaaaaaaattgttgaatgtaaaaaggaatgaataaatggtaagttgttaaggaagtgtaaatatttttttaggaaaattttttttgacgtttaaagtaaaattagatggtgtttttttgtgtatttgtaattttttttgtaattttttttaattgttatgtgtattttaattatggtagttttttttattagttattgattattttgagaagagggaatatttaaaaaaaaaaattatttttttatgtggtgtaaattaaaataatggaattatggagaggttagagtaggaatgtagtttgtgtatattggaaatgaattttagtatataatttatgaaaattagttatgttttttgatgggaaataaatttgtattttgtgttaggattttttttaacgttaagaatatgtgtaaagtgtgtttaaaaattgttttttttttttaaaaatgttttatttagttttttgtatatatatatataaaaatatatataatggttatattatttagttttttttatttttttatttttttttttgtatattggtatatttgtaatttatattaatattttagatttttgtttatatacgtataatttagttattagttgtaatacgtggtatattgttagattatttagaataaagttgttatatttgatttttttattagtaatgtggaatgataataatttttttatattttttttagtagtaggtattttaattaatttaatttttgttagttagattgggtatgaaatgatgttttattattattttaatttgtatttttttttttacgtttaaaaattattgtttgattattatgataattaaggaataaattaatgaaaatgtaagtattattgtttttttaaagatatattttgaaaattataattttagtatttggggtgtgtgatgtaaagattatagatttttttattttttaaaaaggatgttttttgggaattttattaaatatggtaaattgaatatatttattttttttttttttatattttattaaaattgaaggtaaaggaaagaaaagcgtaagagttaagatattaagagtttttggagcgaaataatttttaaattttaattaaaggattaggaataaaagttatgtgggatttattagtattagtagtggagtttagaaaattgaggggatagtgttttttaaattttgtgtgaattgataaggaatgatttatagggaattaagtaaaaaaataaaaataaaaaaataattttaagatatataaaataaggaatattatgttatttttgtatagtaataaggtgggaatgtggttagttgtatgtatatatgtttatatttgtaaaatgacgttgaatagataaaatagtttaataaaaatgatttttatggaagagaaaagataaggtataattttttaaattgggaagagaaattatttgattttatttattatgtaaattgttatttagatgaaaatgaaaaaaatatgtgttaaaaaattttttttaagagtaggtgaaatcggattatagtttttttttacggattttgtttgttatgtttatttttttatttttgattattttatattttacgtattttttttttttgtaattgtagattttgttttttattagttatgaaagtttaaaattcgggggagagtgggtttataaatttttaatgtatttttgtatagttttttgagattagagtgaagttttaaaaagtaagagaattttttgtgaaaatattttaattgatattattaagagtttaaaatagtattggtggtgaaaaatcgttaaaagtatttgattttatttgtaaaattattgtatttttttataagaggagtttttataatatttttgtttttagaagggtttgtttttattatttatttaaatttataaagataacgtttttatgggtggagaagtttattgggaaagttataattcgaatttttattttgttttgtagtttgttttttatgataagttgaaattattatttgatgtttaaggtagtttttatattatttttttaatatttttgttaggttcgatataagaggttgtttttttagcgtggtttgttgtttttggtaagaatatgtcgtttattttgttatttacgtcgttagttgtgaagagattgttgggatggaagaagttagttggtgggtttggaggagtaggcggaggagagtagaatgggtaggaagaaaagtggtgtgagaaagtagtgaaaagtttggtgaagaagttaaagaaaataggacgattagatgagtttgagaaagttattattatttaaaattgtaatattaaatgtgttattatattaaggtaagttttgttagattttaggtttgattaattatgttaaggaatttttattaaaaaaaaattttttaaaaaaaggggttttggcgaatttttttttttttttttttttttttttgaaatagttttattttattgtttaggttggagtgtagtggtgtgattttggtttattgtaatttttgttttttgggtttaagtgattttcgtgttttagattttcgagtagttgggattagagtgggttattatatttggttaatttttgtatttttagtagagataaggttttattatgttagtcgggttggttttaaatttttaattttaagtgatttttttattttagttttttaaagtgttgggattataggtgtgagttattatatttagttttttttggtattttttaataggttataaaatgttattggagatatagttgttttattagtttagtgaaatattttttatattgataataattataataataggaaggttgaatttttgttaggtaaattttaggtttttaataattattaataattaataataaaaagtttagaagaattttgtaaattattggagagtttattgagagataagagtattagaggggtggaggaatttttgaaataaagttatgatttaaaaagtagtagagaaatatatgtgaatgtttatagtagtattatttataagagataaaaatggaaataagtaaatgtttaatatggtatatttatattatagaatattatttagttataagaagaaatgaaatattgatatatgttataatatagttggattttgaaaatatgtttagtgaatgaagttaggttataaaaaattatatattatatgattttatttttaggaaatatttagaataggtaa

SEQ ID NO: 1190 - DNA, 6191 bp, Artificial Sequence
  chemically treated genomic DNA (Homo sapiens)
ttgtttattttgaatgttttttagaaatggaattatatagtatgtggttttttgtgatttggttttatttattaagtatgtttttaaggtttagttatgttatagtatgtattagtattttatttttttttatagttgaataatattttatgatatggatatattatattgggtatttgtttgtttttatttttgttttttatgaataatgttgttgtaaatatttatatatatttttttattattttttaaattataattttgttttaaaaatttttttatttttttgatgtttttgttttttagtaggttttttagtaatttataaggtttttttaggttttttattattgattattaatggttattgaaggtttaaagtttatttggtaaagatttagtttttttgttattgtaattattattaatatagaaaatattttattgaattaatgaaataattgtatttttaatgatattttgtgatttgttaaaagatgttaaggaaggttgggtgtggtggtttatatttgtaattttagtattttgggaggttaaggtgggagaattatttgaggttaggagtttgagattagttcggttaatatagtgaaattttgtttttattaaaaatataaaaattagttaggtatggtggtttattttaattttagttattcgggagtttaagatacgagaattatttgaatttaggaggtagaggttgtagtaagttaagattatattattgtattttagtttgggtaatggagtgagattgttttaaaaaaaaaaaaaaaaaaaaaaaaaaattcgttagggtttttttttttgggaaatttttttttggtaagggttttttgatataattgattaaatttgggatttaataaaatttattttggtatggtaatatatttagtattatagttttgagtggtgatggtttttttaagtttatttaatcgttttgttttttttagtttttttattagattttttattgtttttttatattatttttttttttgtttattttgttttttttcgtttgtttttttagatttattagttgattttttttattttagtagtttttttataattggcggcgtgaatggtaagatggacgatatgtttttattaaaggtagtaagttacgttaggaaaatagttttttgtatcgaatttagtagaaatattgaaaggatgatgtagagattattttgaatattaagtaataattttaatttattatagaaagtaaattgtaaagtaagatagaaattcgaattatgatttttttaatagatttttttatttatgaaaacgttatttttatgaatttaaatgaatgatggaaataaatttttttaaaaataagaatgttgtaaggattttttttgtgggaaaatatagtaattttgtaagtaaaattagatatttttaacgattttttattattaatattattttaaatttttagtagtgttaattaaaatatttttataaaaggtttttttattttttagaattttattttaattttaaaagattatataaaaatatattgaaaatttgtaagtttattttttttcgggttttaaatttttataattaataggaggtaaaatttatagttataagaagggaaaatgcgtaaagtgtgaagtaattaagaataaagaaataaatatggtaaatagagttcgtggagaaaagttgtagttcggttttatttgtttttgagagaaattttttaatatatgttttttttatttttatttaaataataatttgtatagtgagtaaagttagatagtttttttttttaatttaaggaattgtattttgtttttttttttttataggaattatttttattaagttgttttgtttatttagcgttattttataaatataaatatgtatatatataattaattatatttttattttattgttgtataaaagtagtataatattttttattttgtatattttgaaattatttttttatttttatttttttgtttaattttttgtaggttattttttattagtttatatagaatttagaaagtattgtttttttaattttttagattttattattgatattggtaagttttatataatttttatttttgattttttaattggggtttaaaaattgtttcgttttagaagtttttaatattttagtttttacgttttttttttttttgtttttaattttagtgagatataggaaaaaggaaaatgaatgtgtttaatttgttatatttaataaagtttttaaaaggtattttttttagaaagtaaagaggtttgtagtttttatattatatattttaaatattgaaattgtagtttttaaagtgtatttttaagaaaataatgatgtttatatttttattagtttgttttttaattattataatgattagataatagtttttaaacgtagaggaggaagtataagttaaaataataataaggtattattttatgtttaatttagttggtaaaaattgaattaattaaaatatttattgttggagaagatgtgaagaaattgttattattttatattgttggtgaaaaggttaaatgtgatagttttattttaagtaatttggtaatgtgttacgtgttataattagtaattggattatacgtgtataaataaaaatttaggatattaatatgggttgtagatatattaatatgtagaaaagggggtgaaaagatgaaaaaggttgaatgatatggttattgtgtatgtttttgtgtatgtgtgtataaaaaattggataaaatatttttaaaggaaaaaaatagtttttaagtatattttgtatatatttttaacgttaaagaagattttaatataagatgtaaatttattttttattaaagaatatggttaatttttatagattatatgttaagatttatttttaatgtatataaattgtatttttgttttaatttttttataattttattattttggtttgtattatatggaagaataatttttttttttaaatattttttttttttaggatggttaatgattagtgaagaagattgttatgattaaaatatatatgataattaagagaaattgtaagggggattataggtatataaagaaatattatttgattttgttttaggcgttaggaaagatttttttgaggaaatatttgtatttttttggtagtttgttatttatttatttttttttgtatttaataattttttttttttgtttgtttattgtgtttgtatttatttgtttatttttaaatttagtttgtgttatttatttgtaaattatattgttgagttgggacgggtaggataaaagaaattttttgtagtaaggtattggtagtggggaatggagaaggggtaagtttttaagggtagagagattaattagtagagaattgtaatatataaaaggaagaatagttattagggatatagaaggaatagagttgattaagaaaaagttataaattataggtttttgtttgaaaaattagttgaatgaaaatataattcgttaaaatacgaagtatttggggaatataagtgttgtgttagttaaattaaatttgttgtgattatgaaattttagaaggaggtgttcgataagtagttagaaataaaggtttggagtttagtagagagattaaattgttatgtggtaatgaaacgtaatgttggtatatgggagagtttagaaagcgttaagtttagtgaaaaaaaaattttaagaaatatatataaaggagttattaaatgtggaaaaaaagtggatgattagggagaaaggtgttatgaatataaaggataatttatagtaatataatatggtaatataatttttaagtgttaatattaggatttatattaagtagtatgatgttagagaataagtatttaattgtgttaatgtattgtgttgtatataataatttgaagttaatttggagatttaaaaagagttattaaaggttgagttttttatataattaatagagttatttgtgtttgataaattagtttattagataggattagaatgatatatttagttttaattttttttttaatttataaattatttaattagttttttagttattattttttattttttttgatgtaaatagttttttaaaatgtatattgtatgttattttattattaaaaattttttaatatttgtaaaaagtaatagtaaaatgatttaatattttttaagaatttataaatagtgtaatgttttagagaatagattttgaagttaattggttaggtttaaattttaaggatgttatttattagttgtatggtaatttttatatattttagtttttttagttgtaaaataaggataatagtatttattttaaagttaatataataatttttataaaaatgtaatatgagttatatatgtattttaagttttttaatgatattttaaaaagggaaagaaaataggtaatattttaatgatgtatttaatttaatatatttaaaatgttattattttaatttgtaattaatataaaaaaaatttttatattaagtttataaaatttgttgagtattttatatttataggataatttaattaggattagttatattttaagtatttaatagttatataaaggtgttgtttatttatattgaatgatttagttttaattatttaaaatttttgtttattttgtttattttatattttttataaattgtttataaatgtttttatttaacggttgtaggattcgtagtgatgtgatattttttaatttttattatttaaatttatgttttttttttttttttttattttttttttattagttttgttaagtggttaattatattaatttttttaaagaattaatttttttttagttttgttaattttttttatgtaagattattttttatttattaatttttgtttttgtttttattatttttttatttttattgtttttaggtttgattttttattttttttttatttttttaaaaaagtttttttttttaatgtatagatttaaggttataaattttattttagtattttagtagtagtaatttagattattgtagtttatttttatttttaattagtttaaaatattttttaatagttattataaatttttattttaagttatatgttatttaaaagtatagtgttttatttttaggtagttaggaattttttagttatttttatttattataatataaataatatatttaattattaaaattaatgatatttgttgaggttttgtttatggttttagtttatggttaattttagtataatttttatgtgtaagggaaaagatggttaatattattattaatagttttaatgttttatatatgataattagattaagtttgttaattgtgatgtatgtatgttttatatatgtgtatttattgtgatggtatatttgtttgttttttttagtttaaaataaaatttttggtttatagatgtttgggttattttattgggtatatataaaggattgtggtaattttggtggattaatttttttatattataaaatgtagttttttttttttattattgtttattgtattaaagttttttttgtttgattggtatagttatatttattttttttagttagtatttggatggtatattttttcgtattatttttttttaatttttttaggtatttatatttaggtaattattatttgtttagtttgatgatttttgttatttatttgaaatatttagtttatttttatgtaatataattattaatttagttgtttgtttgttttatatttttttttttgtttttttttgaatttattatatattttatatttaatttttttttgtatttatttgttatattttttttttttagtggttattttagatatttttttatttattttttatttaatataatttttatatatatatttttattattttttttataatgttagaattatagaatattgttgagtagtagttttgttatgaaggagattatttttggtttgtttttgtttttaggatgagattttgtagagtttttattttaaaagttagtagatcgttattttttaggtatttagat

SEQ ID NO: 1191 - DNA, 6668 bp, Artificial Sequence
  chemically treated genomic DNA (Homo sapiens)
gatttgtttgtttcggttttttagagtgttgggattgtaggcgtgagttattgcgtttgatttaattttttattttttgtagagatagggttttattatgttgtttaggttggttttgaatttttaagtttaattgatttttttattttggtattttaaaatgttgggattataggtatgagttattgtatttggtttataatgttttttttttttttttttttttttttttttgggaagggggtttttttttttataaagggggggggggggggggggaaaaaggttttttttttttttttttttttttttttttttttttttttttttttttgtttttttttttttttttttttttttttttgttttttttttttattttaggttttgttatttaggttggagtgtagtggcgtgattttggtttattgtaatttttgttttttaggtttaagtcgtttttttattttagttttttgagtagttgggattataggtatgtgttattatgttttattaattttttgtattttttgtagagaggaggttttattttgttgttaggttggttttggtaatcgttttttgttgttaggttggttttgagtttaagtgatttaattatgtcggttttttaaagtgttgggattataggtatgagttattgtattcggatttggttgttttgttttttatttttgagattaaattttattttgttatttgggttggagtgtagtggtttagttatagtttatcgtagttttggttttttgggtttaagtagtttttttgttttagttttttgttaatttatttttttagtttaagttgtttaagagtttattatttgggaaaatttatgttattgattgtagtgttattgtgttatttgagttgttagtataatacgtttgttttggaaggtttgaatttgtagttgttatatttgtaatgattttgtatataagtgttagtatttaatttttttattatatattttaatttagttggtatgtttgagtatttataggtggaagtatatattatatattaagtttttttttttttttgttatagttagggtattgttaaatttttaaaatatgtttaagtagtttagaattttgttttagtaaagttaaggtggtgatataaattatttgttggaaaaaaaatgggatgttggtttgagagagtttagatttatttttttattatgggttttttgtttttgtatttgtagtgttttgtatatatagtgtttgttgaattggttaatttatgttttttatattttttttatgtacgttgttgtatttaattattataataaatttgtgaagttgttaggggtaggtgtttttattttatagatgagagaattgagagagatgttaatatttagttatgcggttagatttttaattagaatatataattttatttatatcgatattatgtttttgtttattatatttttataatttagaattatttaatgtaggaatatatttttttatttttgttagtattattttttatatgtataatttttaattatgttttaggtatttgtggttataggaatataataaagagagagatgagaaagttgtttgtttaagaaagcgaggttattattatttgtatttaaagtaatttggtattaaaataaattttgagatatcgttaaggttttagtatagtataaattttagaaatgatgatatttgatggtgagattgtggtgaaatagttaatatttaaatattttaattgtattgtagatttatatatattttttggaatataatattagaaaatgattttaaaagtgtttgtatttttttaatttgttgtaagataattttatagaataaaaagttatggttagtttagaaatatttgtttggtatatgttaggaattgtgtatggtgttgggaatttttaaaatgagagtgttgttgttgtttttttggatttttaatttgtggtaataatgtgagatagatatgtaattaaataattaatgtgttatattgtaatttatatatgtaatttataattaaattgtaatcgtaattgttaaattgtaatttaacgtatttttttttttttttttttttcgattttttttttttttattgagttttattttgttgtttaggttggggtgtagtggtataattataatttatagtagtttttaatttttgagtttaagtagtttttttgttttagttttttgaggagttgggattataagtttatattattatgtttggcgaattttttatatttttttagatagattttaatagaaaatgtagaaaaatgcgtaatgtattttaggaaaaatttttttgtaaaattattattatttttttgagatagggttttattgtgttatttaggttgtagtgtagtggtataattatagtttattaaggttttgattttttaaggtttaggtgattttttagttttagtttttcgcgtagttaggataataggcgtgtgttattatatttagttaatttttttattttgagtaaagattaggttttgtcgtgttgtttaggttggttttaaatttttgggtttaagcgatttatttgcgtcggttttttaaagtgttgggattataggtgtgagttatcgtgtttggttataattaagtatgttaatattttaatagtagtttttttattgaatattatgtattagatacgttatgtagaattttttttttgagtttttgtatattttttttttaatttagatttagagtaattttattttttgattattatgaaaattggaattttaatttaaattttttgattttaaaattttttatgtaggttatttttggttatttggaaagtgtatttttagtatgtgtattaatgtgggtaagtgttttaagatatatgaaaaattgtttttttgtatggggtttatgagttgagatagatatttatgtgaaagagataataatagagggaggagtaagtttttaatattaggtgattgatgtatattttgaagaggtttaaaattataatagtggtagggagaatgggaggagagatagaaaagattgaggtaaagaattttgtaattgtaacggaatgtagggatagtgaaggaaagaggtacgttagagattttttgtaaagttttttaaggttaggtaattgagtggaattgatattttaataaaggtttttagaagaggaagagattttggtagaatgatgagttttattaattttgtgggaggatattttaaggatttaagtatgtagtaaaagaaaatgaaagtaagataagtttggaatgtaattttagtgaataaataaaatataaataagtatataaagtataggttttagttttgttttattttttttatttttaagttaatggtttttttttattttttgtggggttttgggattagataagttagttttttatttgttgaatggattttttattaatttttagtttttgttattttaatttttttgaaaataatttattttgttgtttttataggtaaaattttttgaggaatttagtgatttttttaaagaatagttgtattgagatataatttttatattataaaatttattatttgaaagtgtataatttagtggtttttattatagttagagttgtgtaattattattattattaatttttaggatttttttattataataaagaaatattatatttattagtagttattttttattttttttttttttaggttttggtaattattgatttattttttgtttttgtggatttgtttattttgtatattttatataaatgggattatataatgtgtgattttttgttattgattttttttatttagtatgtgttttcgaggtttatttatgttataatttgttagtattttatttttttttatggttgaataatatttcgttgtatggaattttatttatgtatttattagttgatggatatttgagttgtatttattatgaataacgttgttatgaatatttatgtataggtttgtgtggatatgggtttttattttttttaagtagaagtgtgaagagtagaattgttgggttatatttattttgtttaatattttgtattaatattagattgttttttaaagtatttgtgttattttgtaattttagtattaaggagtgagggtttaatttttcggtttttttaatatttattattgtttttttgatatatttattttagtaggtatgaagtagtagtttattgtggttttgatttttatttttataatgtttaatgtcgagtattttttatgtgtttattggttatcgtttttggagaagtgttttttagaatttttttgtttatttttaaattggggtttttttttttttttaattggttttttttaataaaggtgagtgttaattgttaggtagaattttatattaggcgatggtaaattttttataaatattagtaatagatttttaggtttaattagtgttgatttttataagtaattttttaaaaaagtgttggtaagatttttttttagggtgattagtaaagttagtaagatttgattgagtatgttattattataatgagaagatttaattttaatatttttggaatgttaaaaatagtgatattttaattaagtaattttatttttaaaaattatttttaatggttaatattttgtaagaattttaagtaatttttaattttgagtattaaattttaattatgtgtattgaatttttgatttaattagagtaattttatttttttttaagtagttagatttatttcgtaaaatgtgttttgatgtgtgtttttttttttttttttttttaggttattttgaatatatgtttaataattttttttgtaacgttagttgttgttttttattgtttttaaaggattaaaattgttttagaaattggagatatatttgatttaaaaggaaaaatttgaataaatggataatatgtttattacgaatatattaataagtaatgatgtttgtttgagtattgtgtatagtttgatgtgttatagataaggtggagagagtgaaatatttgtaaaaagagtaattgaaagtttggtaaagaagttgaaggagaaaaaagatgaattggattttttaataatagttataattataaatggagtttattttagtaaatgtgttattatatagagaatattggatgggaggttttaggttagttttataagagtttttttatattttttatggtggtagatttaaaaatttgttacgtttttttttaagttattatagggtaatttaatttgtgttttatttttttagatattgtgtattttgtataaatatgtattatgggaatttttggaagaatatgtaaaagataaaattttaaagttttttaatgttttatttagaaaaatgtttaatggagaaaatttggaaaataaaaataaaaagtagaaaatttatatttcgtaagaattatttttagtattttggtatttatttttgtagtttgttgttttttttttttttttttttttagacggagttttgttttgttatttaggttggagtatagtggcgtgattttggtttattgtaatttttattttttgggtttaagtaatttttttgttttagttttttaagtagttgggattataggtaagtgtaattatgtttggttaatttttgtatttttagtagagatggggttttattatgttggttaggttggttttgaatcgttgattttaggtgatttattcgttttagttttttagaattttggtattataggcgtgagttattgtgtttagtcgtgttgtttttttttttgatattgtatgtatatttaaataatcggattatatttagtttttttataatttagaaatttgatatgttttattgttagtaaatgttttattggttatattttttaggtagaattttataatatagtttttttgtttaaataaattttatagaaattttgtcgtagattttaaagttttattttaagattttatatatagtttttgtaatatagtttttttgtatatttatttattttattttatttttttgagatatggttttatttttgtttaagttggagtgtagtggtgtaaaatatggtttattgtagttttgatttattgggtttatgtagtttttttgttttagttttttgagtagttaggattataggtatatattattatgtttgggtaattttttattatttgtggagataagggttttgttatgttgtttaggttggttttgaatttttgggtttaagcgatttttttgttttggttttttaaagtgataggattataggtgtgagttattatgtttagttattttttatatttttaaaatttgagtataggttttgaaattatattaaggtttaaattttaggtttgatgtatgatatggttaagttagttattgtgaattttagtttttttatttatgaaatggggattgtaatattgagttggtaggattgtgaggattaaattagaatatataaaagtgttttgtataatgtgatatatgaataaatggtcgtttatttttttagg

SEQ ID NO: 1192 - DNA, 6668 bp, Artificial Sequence
  chemically treated genomic DNA (Homo sapiens)
tttagaaaaataaacgattatttatttatgtgttatattatgtaagatatttttatatattttgatttaatttttataattttattaatttagtattataatttttattttataaataagaaaattaaaatttataataattaatttggttatgttatatattagatttagaatttaaattttggtataattttaaggtttgtgtttaggttttaaaaatgtaaaaagtgattgggtatggtggtttatatttgtaattttattattttgggaggttaaggtaggaggatcgtttgagtttaggagtttaagattagtttggataatatggtaagatttttgtttttataaataataaaaaattatttaggtatggtggtatgtgtttgtagttttagttatttaggaggttaaggtaggagaattgtataagtttagtaggttaaggttgtagtgagttatgttttgtattattgtattttagtttgggtaaaagtaagattatgttttaaaaaaataaaataaaataaataaatatgtaaaaagattgtgttgtagaaattatgtgtaaagttttgaaataaaattttaaaatttacgataaaatttttgtaagatttatttaagtaagggagttgtattatgaagttttatttgaaaaatgtgattaatgaaatatttgttaatagtgaaatatattagatttttaaattataaaaggattaagtgtaattcggttgtttaaatgtatatataatattaaaaaagaaaataatacgattgggtatagtggtttacgtttgtaatgttagaattttggaaggttgaggcgggtggattatttgaggttagcggtttaagattagtttgattaatatggtgaaattttatttttattaaaaatataaaaattagttaggtatggttgtatttgtttgtagttttagttatttaggaggttgaggtaggaggattgtttgaatttaagaggtggaggttgtagtgggttaagattacgttattgtattttagtttgggtgatagagtaagatttcgtttagggaaaaaaaaaaaaagaaaataataggttataaaaatgaatattaaagtgttaaaggtagtttttgcgaagtgtgggttttttgttttttatttttattttttaaattttttttattgaatatttttttgagtagaatattaaaaaattttaagattttattttttgtatatttttttagaaatttttataatgtatatttgtataggatgtatagtatttgaagagatggagtataaattaaattattttgtagtagtttgaaaggaaacgtagtaagtttttaaatttgttattatagagggtatagaaaaatttttataagattaatttgaagttttttatttaatgttttttgtatggtaatatatttattaggatgagttttatttgtagttatagttgttattaaagaatttaatttatttttttttttttttagtttttttattaaatttttaattgttttttttgtaaatgttttattttttttattttgtttatggtatattaaattatgtataatgtttagataggtattattatttgttggtgtattcgtaatagatatattgtttatttgtttaagtttttttttttaaattaaatatgtttttaatttttgaagtaattttgattttttggaaatagtgaaaaataatagttaacgttgtaaggaaaattgttagatatgtatttaggataatttaaaaaagaaaaaaaaaaaagatatatattagaatatattttacgaagtagatttgattatttgggaaaagatgaaattgttttggttaagttagagatttaatgtatataattaaaatttgatgtttagagttgaaaattatttaaaatttttataaaatattagttattaaaaataatttttaaaaataaaattatttaattaaaatgttattgtttttgatattttaaaaatattaaagttaggtttttttattatgatagtggtatgtttaattaagttttattgattttattagttattttaaaggaaaattttattagtatttttttaaaggattatttatgaggattagtattagttaaatttaaaagtttattattaatatttatgaaaaatttattatcgtttggtatgaaattttatttagtagttaatatttatttttgttaaaagagattaattaaaaaaaaaaaaaaattttaatttagaaatgaataaaaggattttaaaggatatttttttaaagacgatggttaataagtatatgaaagatgttcgatattagatattatggaaatgaaaattaaaattataatgagttgttattttatatttattgagatggatatattaaaaagataatagtaagtattgaagaagtcgagaaattggatttttattttttggtgttgggattataaaatggtataggtattttggaaaatagtttggtattaatataaaatgttaaatagagtaaatatgatttagtaattttattttttatatttttatttgagggaaatgaaaatttatgtttatataaatttgtatatgaatgtttatagtagcgttgtttataatggatataatttaaatgtttattaattgatgaatgtatagataaaattttatataacgaaatattatttaattataaaaaagaataaagtattaataaattataatatggataagtttcgaaaatatatgttaagtgaaagaagttagtgataaaaggttatatattatataattttatttatatgaaatatatagaataggtaaatttatagagatagaaagtaaattagtggttgttagggtttgggaggaaggggaatgaggaatgattgttaatgggtatggtgtttttttgttataatgaaaaagttttaaaaattgataatggtgatggttgtataattttgattatagtaaaaattattgaattgtatatttttaaatagtgaattttatggtatggaaattatattttaatatagttgttttttaaagagattattaaattttttaaaagattttatttgtaaaagtagtagggtaaattatttttaaaaaaattaaaataataaaaattgaagattaataaagaatttatttaataggtagaaaattaatttatttgattttaagattttatagagaataggaaaaggttattagtttaagaataaagaagataaagtaggattggagtttgtattttgtgtgtttgtttgtattttatttgtttattgaagttgtattttagatttattttgtttttatttttttttattgtatatttgaatttttaaagtatttttttataagattaataaaatttattattttattaaaattttttttttttttgaagatttttgttaaagtattaattttatttaattatttagttttgggaagttttgtaaaagatttttgacgtgttttttttttttattatttttatatttcgttatagttataagattttttattttagttttttttatttttttttttattttttttgttattgttgtagttttgagtttttttagaatgtatattaattatttgatattgaagatttgtttttttttttgttgttattttttttatataaatgtttgttttaatttataaattttatgtagagaagtagttttttatatgttttagagtatttgtttatattaatatatatgttgaaggtatattttttaaataattaaagataatttgtatgggagattttggagttaagagatttgaattagaattttagtttttatagtagttagaaaatgaagttattttgaatttggattaaaaggagggtatatagaagtttaaaggaaaaattttgtataacgtgtttgatatatagtgtttagtaaaaaagttattgttgaaatattaatatgtttaattgtggttaggtacggtggtttatatttgtaattttagtattttgggaggtcgacgtaggtggatcgtttgagtttaggagtttgagattagtttgggtaatacggtaaaatttgatttttatttaaaataaaaaaattaattgggtgtggtggtatacgtttgttgttttagttacgcggggagttgagattggaagattatttgagttttgggaggttaaggttttggtgagttgtgattgtgttattgtattatagtttgggtgatatagtgagattttattttaaaaaaataataatagttttataagaagattttttttaaaatgtattacgtatttttttgtattttttattaaaatttgtttaaaaaaatgtaggaggttcgttaggtatggtagtgtgggtttgtagttttagttttttaggaggttgaggtaggaggattgtttgagtttaggagttgaaggttgttgtgagttatgattgtgttattgtattttagtttgggtaatagagtgagatttagtagaaaggaaaggaatcgggaaagagggaaaaggaaagatacgttaaattataatttaataattacgattataatttaattgtaaattatatgtgtaaattataatgtaatatattagttatttgattatatatttgttttatattgttgttataaattagaaatttaagaaaatagtaataatatttttattttagaaatttttagtattatgtatagtttttgatatatattaggtaagtgtttttggattgattatagttttttattttgtggaattgttttataataaattagaagagtgtagatatttttgaagttattttttgatattatattttaaaagatgtgtatgaatttataatgtaattaaaatgtttaagtgttaattattttattataattttattattaaatgttattatttttaaaatttatgttatgttggggttttaacggtattttaaagtttgttttaatattaagttgttttgaatataaatgataatgatttcgtttttttaaataaatagtttttttatttttttttttattgtatttttatgattataagtgtttgaaatataattaaaagttatgtatataaaaaataatattagtaggaataaagagatgtatttttatattaaatggttttagattatggaagtatggtaggtaagagtataatatcgatataaataaaattatatattttaattaaaggtttagtcgtatgattgaatgttaatattttttttaatttttttatttataaaatggaaatatttgtttttgataattttataaatttattgtggtaattagatgtaataacgtatataaaagaaatgtgggaaatataaattgattaatttaataaatattgtatatataaagtattatagatataaaaataggaagtttatagtaagaaagtgggtttggatttttttagattaatattttattttttttttaataaataatttatattattattttagttttattgaaataaaattttaaattatttaaatatattttgaaaatttaataatgttttaattataataaaaaggaggaaaagtttaatatataatgtgtatttttatttataaatatttaggtatgttaattaagttagaatgtataataaagaagttagatgttagtatttatatatagaattattataaatgtgatagttataaatttagattttttaagataaacgtgttatattggtaatttaaatagtataatggtattgtagttagtaatatggatttttttaaatggtgaatttttaaataatttgaattaagaaaatgaattaataagaggttggggtaggaggattgtttgagtttaggagattaaggttacggtgagttatgattgagttattgtattttagtttaagtgatagagtaagatttggttttaaaaataaaaaataaaataattaagttcgggtatagtggtttatgtttgtaattttagtattttaagaggtcgatatggttggattatttaagtttaggattagtttggtaataaaggacggttgttaggattagtttggtaataaagtgagattttttttttataaaaaatataaaaaattagtggggtatggtggtatatgtttatagttttagttatttagaaggttgaggtgggaggacggtttgagtttgggaggtagaggttgtagtgagttaagattacgttattgtattttagtttgggtaatagagtttgaagtaagggagggaggtagggagggaggaaggaaaaagaaagaaaatagagagaaagagagagggagagagggagggagggagggagggagggagtttttttttttttttttttttttttttttgtgaaaagggggattttttttttaaaaaaaaaaaaaaaaaaaaaaaaaaaaaatattgtaggttaggtgtagtggtttatgtttgtaattttagtattttggaatgttaaagtgggaggattaattgagtttagaagtttagggttagtttgggtaatataataagattttgtttttataaaaaataaaaaattaggttaggcgtagtggtttacgtttgtaattttagtattttgggaggtcgaggtaggtaggtt

SEQ ID NO: 1193 - DNA, 1452 bp, Artificial Sequence
  chemically treated genomic DNA (Homo sapiens)
ttaggatttatatggtttaagatgtgttttttttatgaggattggggatattttcggtttagaaagaagggattttatatagtttggttgtttttttttagtagttttagggggattagattagggatggcggtatgttttatttttatttgtattataggtaggaagttggggggtttttagggagatggggttttggggtaaaggggggatgtttatttatgttagggaattgggggttgaggaagtataggcgttggtaggaataaagatgagtgagatagataaggttattggaatttttattttagaattaaaggggttagttttggatattttatttaggatgtggtttttttttatttttgtttttagatttggggtaggtgaggattttatttttagagggtgatttaggttaacgtagggatttttatttggtttaaagatagagcggttttaggatttgttatgcgttcgggtgaggaatatgagggaggattgagggtattttaggattagaatattgagggagattgtatagaaattagttttgtttttgttgttattttagagagtatgggttgggtcgtttgtcgaggttttttcgttattttgggattattgatgttagggacggggaggttttggtttgagaaggttgcgtttaggttagtagagggagcgttttaggttttgttaggagttaaggtgaggattaagcgggtattttatttaggatatattaattttaatgaattttgatattttttgttgtttttttttaaggatttaggtacgtgtggttagatgtttgtttttttttgtttttttattttttattatggatgtgaatttttgatttggattttttagattagtaaaagggtaggatttaggttttgttaggaaaaatataagggttttgcgtgagaatagagggggttatttattgtatgagagtggggatgttatagagtttagtttatttttttggtagtattgagaagttagggttgtgtttgcggtttgtattttgagggttcgtggatttttttttttggagttttaggaattaggtagtgaggttttggtttgagatagtatttttaggttatagagtagaggatgtatagggtgtgttagtagtgaatgtttgttttgaatgtatattaagggttttatttgttataggatatataggattttatagagtttggttttatttttttattgttagttttgtagaatcgatttttgttggtcggttgtattttgagtatttttttatttttttttttaggtttttaggggataggttaatttagaggataggattttttggaggttatagaggagtattaaggagaagatttgtaagtaggtttttgttagagtttttaaggtttagtttttagttgaggttttttatatattttttttttttttagg

SEQ ID NO: 1194 - DNA, 1452 bp, Artificial Sequence
  chemically treated genomic DNA (Homo sapiens)
tttggggagagagggagtgtgtgagaggttttagttgagaattgaattttggagattttaataaaggtttatttatagattttttttttggtgtttttttgtggtttttagggaattttgttttttgggttggtttgttttttgaaaatttgaaggaggaagtgagagggtatttagggtatagtcggttagtagaggtcgattttataggattgatagtagggaggtgaggttagattttgtggagttttatgtgttttgtggtaggtggggtttttggtgtgtatttagggtaaatatttattgttggtatattttgtgtattttttgttttgtgatttgaggatattgttttagattaaggttttattgtttggtttttggagttttaggaagaggaatttacgggtttttagggtgtagatcgtaagtatagttttggttttttagtgttattaggagggtgggttggattttgtgatatttttatttttatgtagtggatgattttttttgtttttacgtagggtttttatattttttttggtagggtttggattttgtttttttgttggtttgagaaatttaaattaagagtttatatttatgataaggaatggaaggataggaggggataaatatttggttatacgtgtttaggtttttggggaagggtagtaagagatattaaaatttattggaattaatgtgttttgggtgaggtgttcgtttggtttttattttgatttttggtagggtttgggacgttttttttattgatttgagcgtagtttttttagattaaggttttttcgtttttgatattaatgattttaggataacggaaggatttcggtagacggtttagtttatgttttttggggtgatagtaggggtagggttgatttttgtgtagttttttttagtgttttggttttggggtatttttagtttttttttatgttttttattcgaacgtatggtagattttgggatcgttttgtttttagattagatgggggtttttacgttgatttgagttattttttgagaatgaggtttttatttgttttagatttggaaataggagtgaaaagaagttatattttgggtgaggtgtttagggttgatttttttggttttggggtgaggattttaatagttttgtttgttttatttatttttatttttgttagcgtttgtgtttttttaatttttaattttttgatatgagtagatattttttttttattttaagattttatttttttgagggttttttaattttttgtttgtggtataagtgagaatggaatatatcgttatttttgatttggtttttttagagttattaaaaggggatagttagattgtgtggagttttttttttttgagtcggggatatttttagtttttatgaagggggtatattttgggttatatggattttgg

SEQ ID NO: 1195 - DNA, 7560 bp, Artificial Sequence
  chemically treated genomic DNA (Homo sapiens)
tagttttataaaatagagtttattaaatttattttatagataaaaagtttgaagtttatagtttattaatatgtttaattttatatggttggtaagtgataggattgggataagatttttagtttgaattagtgtaaagtatattttgttttatgttttttaatttgagattgattgtgtttttttatttatttttttttttattatttttaaacgtatattaagtgatgaaaagattttgtatttaatttgttggattgaaatatagaattagagtaaggaaattattaaaatggttaagaggtgtgaattaaggagagaaagataatatttggtgataataagattatatatgtaaagttagataaatttaaaagattatggggttatattttgttattttggattgtttttttttttataggaagttaaattttttttaagagaaatatataagagggtagtaaagagaagaaatagattaatgttttttttttttttttttttttttttgatagtatgatttttattttcgggtttttgttttgtgttatagtttttttattttatattatttttgggatagggatgtattgtttgtaagatttattatagggaaattgattaagaatttttagggatgcggtattttttaggaagttattaattaagggataagagttaagataaagatttttatataggaggatttagtagaataatatgttagatagagtttttagtttgagtatttttttatttattttttaaggtttttagggatttgtgagtttttgtatttcgggttagtagagggaggagtgttattttttgatatatattaagttgaggattttgaatgaagaatgagggaagtatttatttaaatagttttaataggatgtggttgaatttgatttttatttcggaggttttaagaaggtaaagattatgatttgaggttggttgatttaggtttatagaggaaggatttttaatgtgtgttaggagtaaagtgagtattttgaagagtgtaggaattattaaatttttattagtggggattttatagaattttttttattgttatttttgagagatttaggtatgaatgttagaaagaggtatttttatatttttagtagtaatagagaagtgaaggttttgttttgaggtgggtaattttagtttagtaaagggaggaatattaagtttttttgtgagtgagatttaggattttgagttaggatttgagtaggataatttattataagattttaatttgtttattatagttgttatttttgggagattatggttagttgtggttagataaggttatttttttttttttatttgattttagggaggtgtaggttttttaaatggagaggtttttaggttaaaaaagaggggagttttaggatttgttaggagttaaattaaggaaatcgagtgagaattgaggggattgtttatttttgaatagagagagtaatagagtttatttttttgtataatttttaaattgttagggtaatatgtaaggttgaggatttattattattttttttttttaataattgatttttttttttagaatagttttacgtttatagtaaaattgagtagaaaggagagttttataggtattttgtttttttatagatatagttttttttatattaattttttaagttagggtgatatatttgttataattgagaatatatggatatattattattatttaatgttcgtagtttaggatttatttttgttgttgtatattttgtggttttaatatttaaaaatgtataatgatatatgtttattattatagaattatttagaattgttttattgttttaaaagttttttgtgtttgatttatttattttttattttttttaatttttggaaattattgaattttgtattgtttttatatttttgttttttttagaatgttatatagatggaattatgtaatgtatagattttttaaattggttttttttattttgtaatatgtatttaagttttatttatgtttttttgtggtttgatagtttatttttttttagtgttgaataatattttattttgttaatttatttattttttttttgaaggatatattgtttgttttttagtttgggtaattatgaataaagttattataaatatttgtgtgtaggttttttttgtggatatatcgtttttaatttatttggttaaataataaggagcgtatttgttagattatatgatgaaagtatgtatagttttgtaagaaatttataaattgtttttaaaagtggttgtattattttttatgtttattagtaatgatagtgtgtttttgttgttttatatttttattagtatttggggttattagggtttttgattttgattatttttataggtatgtagtggtattatattattgttttaatttgtaagtttttaatgatatgtgatgttgattattattttatgtacgtatttgttttttatatatattatttgttgaggtgtttgtttagattttttgtttatttttaatagggttggttagtttttattgtttagttttaagatatttttgtatgttttggttaatagttttttattagatatgttttttgaaaataatttttttttaatttgggagttattttattttttttgtggtatttttagtagagtagaagttttaatttagcgaagtttagattattaattatttttttttatagatgtttattatattttatattagaattagaaaagatgaaatttttggtttgaagttgtagttattagttagtagaagagatagtttataattttgtttggagtttagatgaggattttgagtgtaaatttgggatttaaagagtttaggatagagagagtattaaatgtttttaggtaggggtggtgggttgaggggtttttagattttttttatttgggttttagaaaattaaagagttaattttataatattaatagagggaggtttaggttttgttaagagttgatatgataattttaaaggtaattagagtggattttttttaagttagaatatagaaagttttattgcgagttttgttgttatttagttagttttaggtagggttggtaagttgtagtttaaggtatattgtaatttttttagttggttttttaggggatagaatgattaagaataatagtttagtgaatatttagagtagtgtttttaaggaattttgtagaggcggtttttgaaaagttaaggtagtatttgtttgttgaaggtgtttttaggattttatttgtttttttttaggaattatattatttgtttttttgtttatatttttgtttgttgtgtttaattatagttattatgtttcggggttagaagagtaagtttcgtgttcgtgagaaacgttagcggattcgtggttagatttaggattttaaggttggttagtttattgtagtagagaaagaagagtttttttttttttttttatttgttttgagggatattgtttttagtttttttgtttttggtattttttaggagttttagagagagttatttattatttttgttgttgtagttatgttatgtattggatttgataaaggcgacgagagttaagatgaggaaaatgtaagttttttttaggttttaatatttattgagagattatttaaagattttttaattaggaagacgaagatgttagtgtagtttttgttgtataagtataaaatgaaagagtttattataaaggtagaaatgttgaagattattagtaaaaagtataaggagtatttttttgagatttttaggaaagttttttagcgtacggagttggtttttggttttgttttgaaggaggttaattttattatttatttttatattttcgttagtatgttaggttttaacgatggaaattagagtagtgtttggatttttttaaggaatgggtttttgatgtttttattgagtgtgatttttttaaatggtaattgtgttcgtgaagaggaaatttgggaatttttgaatatgttggggatttatgatggaaagaggtattttatttttggggaatttcgaaagtttattatttaagatttggtataggaaaaatatttggaatattagtaggtgtttaatagtgattttttacgttattaatttttgtggggtttaagagtttatgtagaaattagtaagatgaaagttttggagtttttggttaaggtgaatgatattatttttaataattttttattgttttatgaagaggttttgagagatgaagaagagagagttggagttcggtttagagttgtagttaggcgtggtattatagttatgattagtgcgtattttagggttatatttagtagttttttttaatttatgtgagatttaaggtaaattgtttattttgtggttgaaagatttgttgttttttttgtttttgtgatgtatgaataatttattgatttatttttttgttgtattttttatgatgttttttaaaatagaaagtttatttagatttagaatataaatttagaaatggtatgtattatatatttattgttgtttattaggttggtttagtgataataattttgtttttgaaatataaatagaaaattttgaaataatttttgtgatatagagtaaaataatacggtatgggagtaaggttatttttagaaatttaaaataattttatagtaaaataggtagaatttgaagatagaaagggaagaaaagtaaaagttgttttattcgtggtttgttttatttagtttagtttttttttgtttataaatttaaaagttatatatttggtttgtttagattatttaagaatgtggaggtttgggttaaggttaatgatagtgtttttattgttttttttttattaagagaagattttaagagatgagggagagagagttagagatagtgttgtaattgggtttggtatgttttagtgtggtgtttagtagtgttttttattttttgtgaagtttgaggtatattttttatttttgattaagaaaatatttaattttttaattaatggagagttaaaggggagttggtgggaatattatgtataatatatttgtatgtaaaatgatttatttttttttttttttgttttttagtgttttttttttaaattgtagatttatttagttttagaatttaagtttatgaatggtatgaattatttatttattaaaatatattaggttggagagtgagaatttttgtattatgtaaaataatttaaaaattttttaagtttttttttgtgatttagaataagataatatggtattggaatatggaatttgtgaaaaggaaattattttgtaataaagttggtgggattaggaagtagagaaaaaaaaagtaaaatgtggttaatttttgttttgttttattttttttagtttttttttgtaaaattgaagtatatgtattcggatttgtttagtttttttaggaatgtgggggaaattaaatagtaatatatttgattttttggttatttatattttaattgtttaaatattaattgagtagttgtattttggagggtttttggttagtatcggataagttaagaaaataaaaaataaataaataataaaaaaattttaatttttgtttatagaattttagaatttaatagtagttattatataacgaaggtaatgagatattttttaagatttaaagataggtgaaaaggggataaaaaagaaggtgggggtattattagtagtggaatttagtgtaaatgttttaagtaaggtaattgagatttcgggaaattgaatatattgtaataggaggtaattttatgttttggtatagtgtttatatggggcgtattgagtaggggttatatatttagatggtggattttatatttgagagatggagattggaatgaaaaattgtttttaatagttattttgggattgtggaaaaattagaggggatttttgtttggagtagggattgaaagtggtcggtgtttttgttttagtgtaagtgaagtgaatttagtatataaattaggtgttttatgagcgtagtttttagggtgtttttgagaaataaaggtgatatttttttaagattggaaatttataagttattgggttaatattttgttattagttggggagttagaatttattttattaaaaggaattttttttttttttatgtgtttttgtaaattttaagggagatttagatttttgatggtggtaaaatgaatgaaaataagattggtttggatgaaaggttagagttggtttttgaattaaagtttagaaggtttgagttgtttttagttgagaaagataattttatatttaaaatatgatttaatatggaaaagttatttagagtttttttgtaagttgcgttttgggttgattttattgttttatgttttagaatgttgtatattttttgttattttttggatttaaagaaaattagtagggtggatgattttttttgtagttgaaataattttagtaataataagtattgtttaaagttttaatgtatattagggttttgtatatttttattatattttattagttttataagataaggtttattaagtttattttatagatgtagagtttgaggtttatagagtttattaatgtgtttaagtttatatagttagtaagtgatagggttggaattagattgttggtttgaatttttttagagtttatattgttttattttttttaaattgaagtttattgtgaattgtttaatttatttttttttataattttaaagtgtgttttaggtaagaaagaagaggtttttgtattttaaatattggattggaatatataattagagtaagaagaatattaaaataattgatagatgtgaattaaagagaaaaagaaataatattcggtgataatatgattatcgatagaagtaaaattggatagttttaaaagattaaaagattataaaaattatttggttttatttttttttgtagaaagtaaaatttttagaattattttttggttggtgaagtgaaggaatagattagtatgtttttttttttgagagtataatatttgttttaggttttttatttttcgttttagttttttaatattatattatttttgggatagggattttttttttgtaaggtttgtaaagaggaaattggttaaatttttgtagggatgtgatatttttttggaagagtttgattaagagatagaagttaatatgagaatttttatgaatgaatggtggggagaaaattattttaaaatgtaagggtttatttagatttttaggagagtgattttagtttagtagatagaggagttttaggttttgatatatgtaaaggcgaggagtataaatgaagattgatggaaggatttagttaaaattgtggggttttatggagttttttttttattatttgtttttgtagg

SEQ ID NO: 1196 - DNA, 7560 bp, Artificial Sequence
  chemically treated genomic DNA (Homo sapiens)
tttgtaaaaatagataataaggaaaggattttatagaattttatagttttggttgggtttttttattagtttttatttatgtttttcgtttttatatgtattagaatttgggatttttttatttattgaattgaggttatttttttgagggtttggatgaatttttatattttggagtggttttttttttattatttatttatgagggtttttatgttggtttttgttttttgattaaatttttttagggaaatgttatatttttgtaaaaatttgattagttttttttttgtaaattttgtagagaagaggtttttgttttagaagtgatgtgatgttgggaaattgaaacggaaggtggagagtttaggatagatgttgtgtttttagggaaaaaaatatgttgatttatttttttattttattaattaaagggtagttttaaaagttttattttttatagaaaagggtggagttagatgatttttgtaattttttgattttttgaagttatttaattttgtttttgtcggtgattatattgttatcgagtattatttttttttttttttaatttatatttgttaattattttggtattttttttgttttggttatgtattttaatttagtgtttggggtatagagatttttttttttttatttgagatatattttggggttgtagaagaaaatgaattaagtaatttatagtaagttttagtttgggaggagtggaatagtgtgggttttagaggaatttagattagtagtttagttttagttttattatttattagttgtgtgaatttgggtatattaataaattttatgagttttaggttttatatttgtgaaatgagtttgataagttttgttttgtaggattggtggaatgtggtgaaagtgtgtaaagttttggtgtgtattgagattttaaataatatttgttattattaagattattttaattatagaagaaattatttattttgttgattttttttaagtttaagagataataaagaatatatagtattttaagatatggaataataaaattagtttaaaacgtagtttataaagaaattttaaataatttttttatattaaattatattttgagtgtggagttgttttttttagttgaaagtaatttaaattttttaggttttggtttaaggattaattttgattttttatttaaattagttttatttttatttattttattattattaaaaatttagattttttttagaatttgtaaaaatatatgaaaggaaaaaaaattttttttaatggaatgggttttggttttttagttgatagtagagtattagtttagtggtttatgagtttttagttttaaaggagtattatttttattttttagaaatattttggggattacgtttataaaatatttagtttgtgtattggatttattttatttgtattgggataagagtatcggttatttttaatttttgttttaggtaaagattttttttggtttttttataattttaaagtaattgttaaaggtaattttttattttagtttttattttttaagtgtgagatttattatttgagtgtgtgatttttgtttagtgcgttttatataggtattatgttaggatataaaattattttttattgtagtatgtttagtttttcgaagttttagttattttgtttaggatatttatattagattttattgttggtaatatttttatttttttttttattttttttttatttgtttttaggttttaaggagtattttattattttcgttatatgatagttgttgttggattttaaaattttgtgggtagggattggggtttttttgttgtttgtttgttttttgtttttttagtttattcggtattagttaggagttttttaaagtatagttgtttaattaatatttggataattgaagtgtaagtgattaggaagttaaatgtattgttatttaattttttttatatttttgaaaaagttaagtagattcgggtatatatattttagttttataaagaaagattaaaaagaataaaataaagtaagaattgattatattttattttttttttttttattttttggttttattaattttattgtaaggtaattttttttttataaattttatattttaatgttatattattttgttttagattatagaaaaagatttaaaagatttttaaattgttttatataatgtaaaaatttttattttttaatttgatatattttaataaatgagtgatttatgttatttataaatttagattttgaaattaaataaatttataatttaaaaaaagaatattgaaaaataggaaaaagaaaagataaattattttatatataaatatgttatatatggtgtttttattaatttttttttggttttttattaattagaaggttaagtgtttttttaattaaaagtaaagaatatattttagattttataaggagtgggagatattgttggatattatattgaaatatgttaggtttagttgtaatattgtttttggtttttttttttttattttttaaagtttttttttaatggagggaagataatggagatattgttattgattttggtttaggtttttatatttttgaataatttaagtaaattaggtatgtaatttttaaatttatgagtaaaaaaagattgaattgagtaagataaattacgaataaagtaatttttattttttttttttttttatttttagattttatttattttattgtggagttattttaaatttttaaggataattttatttttatgtcgtgttattttgttttgtattataaaaattattttaggattttttatttgtattttaaaaataaaattattattattaaattaatttgataaatagtaataaatgtgtgatgtatgttatttttaaatttatattttgaatttaaataaattttttattttaagaaatattatggaaaatataataaagagataaattaatgagttatttatgtattataggaatagagaaagtagtaggttttttaattataaagtgaataatttgttttagattttatatgggttgggaagagttattggatgtggttttggaatacgtattagttatggttgtagtgttacgtttggttgtaattttgggtcgggttttagtttttttttttttattttttaaagtttttttataaagtagtgggaagttattgggggtggtgttatttattttggttaaaaattttaggatttttattttgttggtttttgtatgagtttttggattttataggaattgatagcgtgggggattattgttgggtatttgttggtattttagatattttttttgtattagattttgggtgatgagttttcggggttttttaaagataaggtgtttttttttattatagatttttagtatatttaggaatttttagattttttttttacgggtatagttgttatttaagaagattatatttagtagaggtattagaagtttattttttggaagggtttaggtattgttttggtttttatcgttggggtttagtatgttgacgaggatgtaggagtgagtggtggggttgattttttttaaggtaaggttaaagattagtttcgtgcgttgagagatttttttgaagattttagggaagtgttttttgtattttttgttgatgatttttagtatttttgtttttgtagtgggtttttttattttatatttgtatagtaggaattgtattaatattttcgtttttttggttagagaatttttgagtgattttttagtggatgttgaggtttgggaggaatttgtattttttttattttggttttcgtcgtttttattagatttagtgtatgatatagttgtagtagtagaggtggtgggtggttttttttgaggtttttggggaatgttaaaagtaagggagttggaggtagtattttttaaaatagatgaggaagaggaaggagatttttttttttttgttgtagtaggttgattaattttgagattttgggtttgattacgggttcgttggcgttttttacgggtacggagtttatttttttgatttcgaggtatgatggttgtggttaggtatagtaggtaggagtgtaggtagaagggtaggtgatgtggtttttggagaagagtaaatgaaattttgagaatatttttagtaggtagatattattttggttttttagaagtcgtttttgtaggattttttgagaatattgttttaagtatttattgggttattgtttttagttattttgttttttgagaagttagttgaggaagttataatgtgttttaggttgtagtttgttaattttgtttggggttgattgggtgataataaggttcgtagtggggttttttgtgttttggtttggagaggatttattttgattatttttagaattgttatgttagtttttggtagggtttgagtttttttttattggtgttgtgaaattgattttttagttttttgggatttagatgagggaagtttaggggttttttaatttattatttttgtttagaagtatttagtgttttttttgttttgggttttttaggttttaagtttgtatttaggatttttatttggattttaagtagggttgtggattgttttttttgttgattgataattgtaattttagattaagaattttattttttttagttttggtataaaatgtgatgggtatttatgaaagaaaataattgataatttggatttcgttaaattaaaatttttgttttgttaaagatattataaagagaataagataatttttaggttgggaaaaaattatttttaaaagatatatttgataagggattgttaattaaaatatataaaaatgttttaaaattgaataataagaattgattaattttattaaaaatggataaaagatttaaataggtattttaataaataatatatatggaaggtaaatacgtatatgaaatgatggttaatattatatattattagagatttgtaaattaaaataataatgtgatattattatatatttataagaatggttaaaattaaaaattttgataattttaaatattgatgaggatgtggagtaataggagtatattgttattgttgatggatatgaaaaatgatatagttatttttgaagatagtttgtaagttttttataaagttatgtatatttttattatatgatttagtaagtgcgttttttgttatttagttagatgagttgaaaacggtatgtttataaaaaaaatttgtatataaatgtttatagtagttttatttataattgtttaaattgggaagtaagtaatatgttttttagaaggagagtggataaattaatagaataaaatattatttagtattaaaagggaatgaattattaagttataaagagatatggatgaaatttagatatatattataaagtgaaagaagttaatttgaaaagtttatatattgtataattttatttatatgatattttggaaaaggtaaaagtatggaaatagtataaagtttagtggtttttaaaggttggggagagtgagagataaatagattaggtatagagaatttttaaggtagtaaaataattttggatgattttatggtggtaaatatatgttattatatatttttaaatattaaaattatagaatgtgtagtaataggaatgaattttaaattacggatattgggtgataatgatgtgtttatgtatttttaattgtaataaatgtattattttggtttgggaggttgatatgaaggaggttgtgtttgtgggaggataggatgtttgtgagatttttttttttgtttagttttgttgtgaacgtaaaattattttaaaaaagaaggttaattattaaaaaaaaaaagtgatggtgagtttttagttttatatgttgttttggtaatttaagagttatgtaggggggtggattttgttgttttttttatttagaggtgagtagtttttttagtttttattcggtttttttgatttggtttttagtagattttagggttttttttttttttgatttgaagatttttttatttaaaaggtttgtatttttttgagattagataggaggaagagggtggttttatttggttatagttgattatggttttttaagagtggtagttgtggtagataggttgaggttttatggtggattgttttatttaggttttaatttaggattttaaattttatttataggaaggtttaatatttttttttttgttgagttgggattgtttattttagaataagatttttatttttttgttattattgaggatatgagggtgtttttttttgatatttatgtttaaattttttagaggtgataatagggaggattttgtgggatttttattgataggggtttggtggtttttgtattttttagggtatttattttatttttggtatatattaggaattttttttttatggatttgagttagttagttttagattatggtttttatttttttaagattttcggagtagaaattaggtttagttatattttgttaaggttatttgggtgagtgttttttttattttttatttagggtttttaatttggtatgtgttagagaatggtatttttttttttattgattcgagatgtaggaatttataagtttttgagaattttgaagaataagtgaggagatgtttaggttaagaattttgtttggtatgttgttttgttgagtttttttatatgaaggtttttattttggtttttgttttttagttaatgattttttgggaaatgtcgtatttttaaaaatttttgattagtttttttataataaattttgtagataatgtatttttgttttaggagtgatataagatagggaagttgtaatataaggtagaagttcgaggatagaagttatattgttagagaaaaaaaaaaaaaaaaaaaaaatattgatttattttttttttttattatttttttatgtattttttttggaaaagatttaattttttataaaaagggggatagtttagaatgatagaatgtgattttatgattttttgagtttatttgattttgtatgtgtaattttattgttattaaatattatttttttttttttaatttatattttttgattattttggtaatttttttgttttggttttgtattttagtttagtagattgggtatagaatttttttattatttgatatacgtttgggagtagtgagaagaaaagtgaataaggggatatagttagttttaggttgggaggtatggaatagagtgtgttttatattaatttagattgggggttttgttttagttttgttatttattagttatgtgaaattggatatattaatagattgtgggttttaggttttttatttgtgaagtgggtttgataagttttgttttgtaggattg

SEQ ID NO: 1197 - DNA, 6210 bp, Artificial Sequence
  chemically treated genomic DNA (Homo sapiens)
atagaaaatatattttttttattaggcgcggtggtttacgtttgtgattttagttttttgggaggttagggtaggtggattacgaggttaagagatggagatttttttggttaatatggcgaaatttcgtttttattaaaaatataaaaattagttgggcgtggtggtacgcgattgtagttttagttattagggaggttgaggtaggagaatcgtttgaatttagaagttagaggttgtagtgagtcgagattacgttattgtattttagtttggtaatagagcgagattgcgttttaaaaaaaataaaaatttttttttatgattatttttatgtatttatttatttaatttatttatttattttgagacggagttttgttttatcgtttaggagtgtagtggtgcgatgtcggtttatagtaagttttgttttttgggtttattttatttttttgttttagttttttgagtagttgggattataggcgtttgttattatgttcggttaattttttgtatttttagtagagacggggttttatcgtgttagttagaatgatttcgattttttgattttatgattcgtttgtttttgttttttaaagtgttgggattataggtatgagttatagcgttcggtttatttttatttatttttagaaattattttatttttttttttttgagatggagttttattttgtcgtttaggttggagtgtagtggtataatttcggtttattgtaatttttaattttcgggtttaggcgatttttttgttttcgtttttcgagtggttgggattataggttttcgttattatatttggttaatttttgtatttttagtagagacggggttttattatgttggttaggttgattttaattttttgattttaagtgatttgtttattttggttttttaaagtgttgggattataggtgtgagttatcgtgttcggttagattattattattttgtagatagtttgttttttatttagtatggagtgtaatggtgtttcgaatttttggatttaagtgatttttttattttagttttttaagtagttgggattatagttgtgtgttattgtgtttagttgagagtaggttttaatttgagtatgggggtagttatgatttttcgtagtatttggggtgagattaggttttggttttatttattttgttaggatttcgtggtttgatatttttatattggatacgttatttttggttttatttagcgtttgtattggtttaggttttcgtgagcggtaattttaatagcggatattggaattaatagagtttgtgaggttagtatgatggtgaggttaggtttggagggggagggtagtattttgggttttcgtgtttaggttttagatttatcggataggataattgtggtttttttattaaattgtatcgtgtttattttttgagaaagttattgttatttagaggaggttggattttggaggattgggataaaggtagggtttttagtgtcggttaaagtaagggcgaaggggaggtgaaaggttttgggggaatagtaaggataggggttggtgattgtttagtttggtatgcggagtgggggatcgttatttggggaagggatttttacggtgtaatgggggtggtcgtgttattatttatgcgttaatacgggttttttttatttaaatgagggtttttaggtttttatttatttttgcgtggtttcggaatttgcgtacgatttgttttgatgttatattttatagaattatcgttttgttttcgtcgtcggagtagagattattgttgttaaaggagttggagtaaaggaggaggaggattagtatcgatttcggattttagttttagcgtttttattttagtttggttttcggtttattcggtcgtatttagtatttcgtagtcgtggtcgttgtacgttcgtagtagcgtttttcgaagcgggttttatagttttagcgttttgttattgtcgtacgttaggtagtaattgttatttattggggaatattaggcgggggttattgggtcgtcgattttaggaggcgggaggaggattcggaatgaagacgaaggcgtttattattaaatcgtacggttcgtattgttttttgttcgtagtttagcgtttttaatcgtttttgcggtagttttggaggtcgcggttttggtttagggaaagttatgtttttaggattttttttttgtagttttaaatcggtttgtacggaaaatttcgcgttttagaaatttacgtttgggtgtaattttattattgttttttttgatttattttttgtttattattttcgggtttattattttggtatttcggtgatcgggttggaattattgaagttcgtttttaggtttttttttttattttttttttgaaaggaagatttttggttttttttaaattttcgttttttgggtaaggggagtttaagtttttgttatgaggaacggaaatgcgagggtttcgggtgttattttaaaattcgtttttagtttgtacgtcggaagttgcgatttttgtagcggaagaggcgtgatttggttttcgattcgttatgtttattaataatatgtcggatttacggaggtcgaataaagtgttgaggtgaggattttagcgtcgtgggtacgggttcgggttgtgggtgtggatcggggttttgggaagcgtttgtttatttcgggggtaggatttgagcgtttttgattttcgagtttgtcgtaggtataagttttcgtcgagcgaatgtaattcggttttggacgattcgacgtcggattatatgaatttgttgggtatgatttttagtatgtgcggttttatgtttaaggtgggcggggttgagtttttatgggtgtagttggatttgagaacgaggttcgggggcgggtttggaatgaagcggggtgttttgttattgttgatggggcgggatttgagatcggtcgggagtggggttgcgatgacgttgggtcgagaaagttttagtttttggtgaagttaaggattcgagttaggttggggatgtggtagattggtttgcgagtggggttaggttttgaagtaatttggagaggagttgtggaaaaagggtagggttttaagtatgtgggatgttagagttttttttggttttgagagacgtaggttagatagtaggattagaaattacgtatttagagtatgttatgagtaggtgggattgaggaatttcgggtggggtaaggttttagttgtattagatggaattagtgggtatgatttggtgtttggaaaggtggtttcggggatttattgttgtgttttttattaatttgtttatttatttatttttttttagttgaagtggtgtgtttgggtcgttgtttattgtttttttattagttttgttaattttcggagttcggaggatacgaagtaaatgatgagtagttttatgtgagatttgttttatagaataagtgatttttgagtaaggggtggggggattttagtttggttattttagattgatattttttttttgttttaggttgtttatttttgtcgtggtgatgttttatttgtagaatttttagtttatgacgtttttatggtgatattagtttagaagggttatattttggattttgtttatttattaggtttgggttttggttgttaaatttgttgtttttagttgttattttggatttttttgaatgaggtcgtttcggtgtttttagttggatagagggaatttggtttttttttagggaatattttaggtttattttttttgtttttttttttttgtttgttgttgggggagatgttgtttatgtttttaggggtatttatttgttttttcgttgaaatttgttgttaataaagttttttattttggttgttagttttttttgtttagtggggtgttttttttatttggcgggaagggttttagttttataggtttggtgtggggttttagtttggaggtttttggttgtttatttgtttattttataaattttgtgttttaagttaggtgttagggataagatagtgatttttgttttttggtaatttattagatggttttgttgatttagataatttaggttttggttttttttttttttttttttttttaagaaagaaaatggttttgatttgttatgtaggttgagtgtagtggtataatttatgtttattgtagttttaaatttttgggtttaagtaatttttttattttagtttgttacgtaattgggattataaatgcgtgttattatgtttagttaatttttgttttttttgagatagagttttgtttttgttgtttaggttggagggtaatggtatgattttgatttcggtttattgtaattttcgttttttaggtttaagtgatttttttgttttagttttttaagtagttgggattataggtatgtgttattatgtttagttaatttttgtatttttatattttgtgtaaaattataaattttgtgtttttaaattcgtttttataaaataatttatgttgtttaggttggttttaaatttttaggtttaagtgatttattagtttggtttttttaaagtgttgggattgtaggtttgagttattgcgtttgttttgggttttgtttttttattagagaatgaattggtaggaattgggaaaggtatgaaagattcggggtttttttttatttgttagattttttttttttttcggaatatttagggattttttttaattaggttggattttatttttggtattttaggggtatttatttaacgttttaatttttatagtataggattttttattagattttttttttaggtaagttaggtttttttaggattttagcgttgaaggtttatgggacggatattttggatttttatggatatattatatcggttaggaaaattcggtttttttaggaaaagtatttttgtttttatcggtattaagaggtatttcgttttggaatttcggtattaagaggtatttcgtttttatagttcgtgagacgttagtgttatttttagtttaattagtgttttgagggtggtatttttttatttttttgtaacgattttcgggattgtttagggttatagtttttttttcgtgagtttttagatcgcgttttggtttcgttttttatttcgattggttcggtcgggtttgggggcggggcgtttgttcggtttttttagggtcggggaattttaggaggaagttgttgagttatgggcgtttacgcgcgggtttcgggggtttgcgttcgcggttgtttggatttagtaggtttttggattatgtttcgcgttttgcggttatcgttttcgtttttttgttttttttttttgttgttggcggttgtcggtgttcgggtcgggggatacgaggtgagtggggttttcgagttgaaacgtataggaggtagagtgaaatttagaatatagtttagaggtgtgggtgggtttgttttgtgggtgtttagtgaatggttgatgatatgatagtgtggtttgagtgcgtgttttgtgttattgcgaggtttggttgtgcgtatttgagtataggattgtgtttgattgtatttgttttcgtgttttcgggatgtttgtttagattttgtttgtatttaattgtgggattggaggggtaggaggtggtagggggtgagtagtgtatgtgtggggggaggtgttggttgagagttgggattttggagtttgtttgaaattttagtttagtttttatattttttgagtgtgtgacgttgggtaagttatttattttttttaagttttagtgtttttatttggaaattggggataatattattttattttttacggtggtcgtttgttgtcggtaaatgttgaataaatattagttatttttattattattttttcggagtgtgaatgagagttgttttgtggggttgtgtaaagtggagttgtatttatgagtataattatgtatgtgtgtgttttgtttgggagggtttggttttttttgtatataggcgagattaggtttttttgagttatttatttttagattaagatttattttgtagttttcgatttcgggggttattgataaggtatgtgtgtttggggtttttgtgtaga

SEQ ID NO: 1198 - DNA, 6210 bp, Artificial Sequence
  chemically treated genomic DNA (Homo sapiens)
tttgtatagggattttaaatatatatattttgttaataattttcgaggtcgggggttgtagagtaagttttgatttagaggtgagtgatttagagaggtttgatttcgtttatgtgtagaggaggttaggtttttttaggtaggatatatatatatatagttgtgtttatagatataattttattttgtataattttatagggtagtttttatttatatttcgggaaaataataatagaagtagttgatgtttgtttagtatttgtcgatagtagacggttatcgtgggaggtggggtgatgttatttttagtttttagatgaaggtattgaggtttagagaggataggtgatttgtttaacgttatatatttaggaagtgtaagagttaggttggaattttaggtagattttagagttttagtttttagttagtatttttttttatatatatattgtttattttttgttattttttgtttttttaattttatagttaagtgtagataaagtttaggtaagtatttcggagatacggaggtaggtataattagatatagttttatatttagatgcgtatagttagatttcgtaatgatataaagtacgtatttagattatattgttatattattagttatttattagatatttataggatagatttatttatatttttagattgtattttgggttttattttgttttttgtacgttttagttcggaggttttatttatttcgtatttttcggttcgagtatcggtagtcgttagtaataaaaggaaaaagtagagaggcgggagcggtggtcgtagggcgcgggatatggtttaggggtttgttgagtttaggtagtcgcgagcgtagattttcgaagttcgcgcgtaggcgtttatggtttagtagtttttttttggggtttttcggttttggaaaggtcgggtaaacgtttcgtttttagattcggtcgggttaatcggggtggggggcggggttagggcgcggtttggaggtttacgggagagaggttgtagttttgggtaatttcgggggtcgttataggaaggtaggaaaatgttatttttagggtattggttgggttaaaggtgatattggcgttttacgggttatgaagacggaatgttttttaatgtcggaattttaagacggaatgttttttaatgtcggtaggagtagaagtgttttttttaagggggtcgggtttttttagtcggtgtagtgtgtttatgggaatttagggtgttcgttttatggatttttagcgttagggttttggaaggatttagtttgtttaagaggaggatttgatgaagagttttatattgtggggattgggacgttgggtaaatatttttggagtattagggatgggatttagtttggttgagaaggatttttgggtgtttcggagagaaaagagggtttgataagtggggaaggatttcgagttttttatgttttttttaatttttattagtttattttttgataagaaaataaagtttagggtaggcgtagtggtttaagtttgtaattttagtattttgggagggttaggttggtgaattatttgggtttgggagtttgagattagtttgggtaatatgggttgttttgtagagacgggtttgaaaatataaaatttgtaattttatataaaatgtaaaaatataaaaattagttgggtatggtggtatatgtttgtaattttagttatttgggagattgaggtaggagaattatttgaatttgggaggcggaggttgtagtgagtcgagattaagattatgttattgttttttagtttgggtaataagagtaaaattttgttttaaaaaaaataagaattaattgggtatggtagtacgtatttgtggttttagttacgtggtaggttgaggtgggaggattgtttgagtttaggagtttgaggttgtagtgaatatagattgtgttattgtatttagtttgtatgatagattaagattatttttttttttaaaaaggaaaaaaaaaaaaggaaattaaagtttagattatttaggttagtagggttatttggtgagttgttagagggtagaagttattgttttgtttttagtatttgatttaagatataaggtttatgaagtaagtaaatgaatagttagaagtttttagattggggttttatattaggtttatggggttagagtttttttcgttaggtaggaggaatattttattgaatagaagaggttgatagttagagtgaaaaattttattaataataggttttaacgagaaagtaaatgaatatttttagaaatatggatagtattttttttagtagtaggtaggggaagggaggtaggaggggtaagtttagggtgttttttaggaaagggttaggttttttttatttagttgggggtatcgagacggttttatttagggaagtttaggatggtagttgaaggtagtaggtttagtagttaaagtttaggtttagtggatagatagggtttaaaatgtgatttttttaggttggtattattatgggggcgttatgggttgaggattttgtagataggatattattacggtagagatggatagtttgagataggagagaggtgttagtttaggatggttaggttggggtttttttattttttatttaagagttatttgttttgtagggtaagttttatatgaagttatttattatttgtttcgtgtttttcgagtttcgagagttggtaaagttgatgaaggagtagtagatagcgatttaagtatattattttagttagggaaaggtaagtgggtgggtaggttagtgaaaggtataataatgagttttcgaagttatttttttagatattagattatgtttattgattttatttgatgtagttgggattttgttttattcggaattttttagttttatttgtttatggtatattttagatacgtggtttttagttttattgtttggtttgcgttttttaggattaagagagattttgatattttatatgtttaagattttgttttttttttataatttttttttaagttgttttaaagtttggttttattcgtagattaatttgttatatttttaatttgattcgaatttttgattttattaaagattggggttttttcggtttagcgttatcgtagttttattttcggtcgattttaggtttcgttttattagtaatgataagatatttcgttttattttaaattcgttttcgggtttcgtttttaggtttaattatatttatagaagtttaatttcgtttattttaagtatgaggtcgtatatgttgaagattatgtttagtaggtttatgtagttcggcgtcgggtcgtttaaggtcgggttatattcgttcggcgggggtttgtatttgcgataggttcgagggttaggggcgtttaggttttgttttcgggatagataggcgttttttagggtttcgatttatatttataattcgaattcgtgtttacgacgttggggtttttattttagtattttgttcggttttcgtgggttcgatatattgttagtggatatagcgagtcgaaggttagattacgtttttttcgttgtaggaatcgtagttttcggcgtgtaagttgagggcggattttagagtaatattcgaggttttcgtattttcgttttttatgatagaggtttggattttttttatttagagaacggagatttaggagaagttagaagttttttttttaaagggaaaatggggaaaagaatttgaaagcgggttttaatagttttaattcgattatcgaaatgttaaaatgatgaattcggaagtgataaataggaagtaggttaggaagaataataataaggttatatttaagcgtgggtttttaaggcgcggaatttttcgtatagatcgatttaaggttgtaaggaaggagttttgggagtatggttttttttgagttaaagtcgcggtttttagagttgtcgtagaaacggttgaagacgttggattgcgggtagggggtagtgcgagtcgtacgatttaatggtgagcgttttcgtttttatttcgggtttttttttcgttttttgagatcgacggtttagtaattttcgtttggtgttttttagtggatggtaattattgtttgacgtgcggtagtgataagacgttgaagttgtggaattcgtttcgggggacgttgttgcggacgtatagcggttacggttacgaggtgttggatgcggtcgggtgagtcggggattaggttgggatgggagcgttgaggttgggattcgaggtcgatgttgatttttttttttttttattttagtttttttgataatagtagtttttgtttcggcggcggggataaggcggtggttttgtgggatgtggtattagggtaggtcgtgcgtaaatttcggggttacgtaggggtgagtgaaagtttggagatttttatttgagtggaggggattcgtattagcgtataggtggtgatacggttatttttattatatcgtaaggattttttttttagatgacgattttttatttcgtatgttaggttaggtagttattaatttttgtttttgttgtttttttaaaattttttatttttttttcgtttttgttttaatcgatattgggaattttgtttttattttagttttttaaagtttagttttttttgagtggtaataatttttttagaaggtgaatacggtgtagtttaatgaagaggttatagttattttgttcggtgagtttggggtttaagtacgggggtttagggtgttgttttttttttttaaatttgattttattattatgttggttttataggttttattgattttagtattcgttgttgggattgtcgtttacggaggtttgagttagtgtagacgttggatgaggttagagatggcgtgtttagtgtgaaggtgttagattacgagattttggtagggtgagtggagttaggatttggttttattttaggtgttacggggaattatagttgtttttatgtttagattaaaatttatttttagttgggtatagtggtatatagttgtaattttagttatttgggaggttgaagtggaaggattatttgagtttaagagttcgaggtattattgtattttatgttgggtgaaagatagattgtttataaaataataataatttggtcgggtacggtggtttatatttgtaattttagtattttgggaggttaaggtgggtagattatttgaggttaggaggttgagattagtttggttaatatggtgaaatttcgtttttattaaaaatgtaaaaattagttaggtgtggtgacgggagtttgtaattttagttattcgggaggcggaggtaggagaatcgtttgaattcgggagttggaggttgtagtgagtcgagattgtgttattgtattttagtttgggcgataaagtgagattttattttaaaaaaaaaaagataaaatgatttttaaaaataaataaaaataggtcgggcgttgtggtttatgtttgtaattttagtattttgggaggtagaggtaggcggattatgaggttaggagatcgagattattttggttaatacggtgaaatttcgtttttattaaaaatataaaaaattagtcgggtatagtggtaggcgtttgtagttttagttatttaggaggttgaggtaggagaatggagtgaatttaggaggtagagtttgttgtgagtcgatatcgtattattatatttttgggcgatagagtaagatttcgttttaaaataagtaaataaattaaataaataaatatataaaaataattataaggaagaatttttgttttttttgagacgtagtttcgttttgttgttaggttggagtgtagtgacgtgatttcggtttattgtaatttttaatttttaggtttaggcgatttttttgttttagtttttttagtagttgggattatagtcgcgtgttattacgtttagttaatttttgtatttttagtagagacggggtttcgttatgttggttaggagggtttttattttttgatttcgtgatttatttgttttggttttttaaagagttggaattataggcgtgagttatcgcgtttggtggaaaaaatatattttttat

SEQ ID NO: 1199 - DNA, 13125 bp, Artificial Sequence
  chemically treated genomic DNA (Homo sapiens)
  unsure 1892, 2056: n is a or g or c or t
ataaaatgtttttatattgtaattgggttatggtttaaaatttatttgaaaattagatattggaattaataatgttttttttttttttttttagagaaataatagtggagagaaggttttacgatatttttagaagttattttatttataatgaagttgaattgtaatataaatgagggatttaggaatagaatatgtgtcggtgtagaagaggggattagtgggggatagtaggggaggataggaggagaaattggagggggaagatttttttttttttttttattaatatagttttagttttgggttatagtttataataattaggttatgtgtatatagttttttgtggttttagagttagaagtgattggagtttagggtttgatttaggttaaatagatttatattagttagatgtgttaattagaatggtagttaaaaaaattgttggttattaagtatgttgttattagtgtattttttttttggaagtaaatttgtaagggaagttggagtgtaattagaaaattgtgttgagttttatttagattagggattaattgttataggattagataggataattttagattttattagttttttttttggtattttgtataattaaggtttgggagttgttttttttatatttttttttttgggttttttggttttttttatttattattattattttttgttagatatattgttgttttaattatgatgatgtttttaattagattagagttaaaattggtagtttgggagttattttggtttttttttatttgtttgtttgttggtttgttttaggttgatgtagtattgtttttatttaatatgtgcggattttgtagtataattagtgggaaataatttattttttatgtttttagggattattttaatttaatgtttttaaatttttaaatatgttttaattatatttttagttatagatagtattattattttgtgtggaggaggtagaagtggtagaagaaagagtggaattagtttattttattttataaatttttaaaatttaaaaatatttgttgttttaaattttttttagaagtagtaggaatataaagtagaataaaatatatgaaaaaatataaagagttatttattattttttatttttaattgaaatatttttttttttagagaaaatgatgttagttagatgttagaaagaaagatgaatatattaatttatatttatgtgtaaatgattaggtaatatttttagttatattttgagagttttttttttttgagagagggtatatagtgatatatatgtatttttagtagaattttaggtagtgtaagtagttattttatagagtaggaaaatttaaagagtattgtgggaaaggttttaggtttaggttggttttttgttttggagtttagtttttttttgttatttatatttttttttttttttggatattaatttaaaagatttgtaagtttttaaggtttattataaaaatttttattttagtattattaggatttgtagttgtgggagtaagagggagattaggttgttaaggggagagtgagggtaatttttggtatatttgtatattagaagttttttttattagtttaatttaatttttgatttatttttgttgtttatattttttatttttttttaaatgtttaattttttttttttttttttttttgtgattatgagtttttggttattttgttattggttgattatgataggtgtgtttttttattttagggtttgttttagaatgttttttttttagattgttatagcgattttttgttaacgtatttaaatttttgtttagtgttatttttttagagagttttttttgatttattanaaatagtatttttttttatttattatttttttattttgttttatttttttttattgtatttattattatttggcgtattatgtttttgttgtttaatttttatttgtttgttaatatcggaatgttagttgtatttgggagggatttttgtttggttggtttanagttagatttttagtacgaggtttgtgttgggtataagtggtttttataatatttgttagatgatgatttttattttataaatggtatttagtttatagttgagtagttggtaatattggtgtttttatatgttagtttttttttttttttttttttagaattgtatatatttttttgggatgaagaggggaaggggttatttttttagtattgaagtataataatgtaatattttgtttttgttttagaggtgttgtagtagtattatttgtatattttataagattgtttttgttttattgttttagtaattgggagaaaataggttaatgaattaattattttttgattgtttattatgtttagttattgtattaggtgtttatatattttattattttttttttttttatagttattttaatagttataaagatgtttttttttttattaaataaggagatggaagattaaaaagagtaagttatttgttaaagttatcgagttgtaaagtagtattttgtatttttagtttgtgtttttttattatgtttttattttttaaagtgtgggtgatgatttaggtggttacggttatggtgtttaattgtatagatatatatagtaagaaagcgttttgttataatttttatttaattttttgttgtaatatggagaataatttagttaggtgttagtatttttttaatatttttttaatatttggttaatttttgtttttaattaagaaaggagagttttggatttagagttttgagtaaattataatagtatgtagtaggaatttgattatattttatttttattgtgtatatttttagggatattttttattaataagtgatattagtgtttttatttatatagtaatatagaattgtatttaaaaataaatttaagtaaaagaaataaattgtataaaagaaaattattatatatataaaagtaataatggtttaaagaaaggaaaattaaatataaattagatgaggttggaatttaacggatgatttttagaaaatagtgttttttattatattttttgttttttattttagttatgggttttggtgttggttttattttttgaatagtaattgaatattttaattaaaatattatttggaaatattttatttagttattggtgaatgtagttagttggaaatattttatttaattattggtgaatgtaattttttagtgattttgttatagattttaaatattgcgggttagacggtatttttattttgtattgattagattgatatgttggatggaattttttagtttttggttgtttagtatgttttttatgttagggtgttaggaaagatataagagtaaagagtatatgattaataagttatggtagttaatatttaagatattgggttattttggaaattttaagaatatttaggtgattatttatttatttatttatttatttatttatttatttatttattatttatattttattaataggtattttagtattaaagttatgttgattaatttttatttattttttttttttaaagttcgaattttttagttttttatgatattatgtttgtatattttgttttttttttatttttttttttttttttgggatagaagttatatttagtatgtttgtgagaaacggttgtaaataggttgttttaaaaaaaaaataaaaaaataaaaataaaaaatatattttttagtttttttaaatataaataaaggtaataaaaatttttaatgttataggtattttaaaagatattattgttacgaggtaattttgtttgtgtgttttttaaggaattgaaaagtatattatagttattgtaattttgttgagtagagatagtattttttttttattttttgttattattgatattatttgtttagtatattaaggaaagaaattggtatttaatataatatatttgtattttttttattttttatgagtattataaagttagtatttttttatttttggttttgttagagtagaatttaaggtttgaataatagtaggtttaagttttgtatttttgatgtattttttaagtgaaggtggtaaatattgatattggtaaatattagtaaattcgtttttttaaagttataaggttaaagaaaagataggtttcgtttttttaggcggggtatttatagtttcgtatttgtttattgtggttattttagtttttgagaatttggttatattatatatagtatataaggtagaggtttgattagtgtaattttaataagagaaaagatttttatttcgaaaatggaaatttattttatttttatgtatagatagggtgagggtgaggagtgggtagtgggtgtgtacgtggtgggtggtgtaggttgagagcgttttttttttttacggttgtagtaggagtttagcgggcgttttagttttttggttcgcggttttgtttcgattattgttcgtatatttcgtttttttagttttcgggtcgcgggcgagatgatttgttgtagatgatattagtttcgggttaacggttggaagagcggaggtagttatcgcgtgaggatgtgtcgggtggtttttttttttttttttttttttttttttcggttttttgtttagtttttatataaaagcggcgtcgttttttcgtttttttttatttttcgttttttttcgtcgcgtatttttcgcggcgttgggagagggcggagggggaggcggcgcgcggcgttagaggaggggggacgtagggggcggagcggagatagtattttcggagataatttttttttttgtcgtagaggagaggagcggtcggagcgagatatttcgtcgaggtatagtagtcggtaggatggcgatcgtggtggtggaagttatcgagtcggagtcgttcggtagtatcgttaattcggcggcgtttatttcgtttagtttgtcgtatcgtttttttgatagtaagttttatttgttggtggtcgtcggcgagatcgtgatcgaggagtatttgcggcgtgttatcggtaatatcgagttcggtaagtggtttcgcgtttttagagacgcgcgttgggagacgcgtaaatacgattttatttagggcgcgacggttattgcgtttttttcgcgcgtttcgtatttatgttttttttcgttattttttatatttggtttagattttttttgggttaattaagaataattcgaattattagatatgagatttagagggagagtttttaataattttgagggatttgttattacgttgagttcgtagtttgtgttgagttggttatcgtttttttcgttaagtgaaatgtaggtgttaggggagtagaggttataataaagtcgtaatcgtaggaggtagaagggtgggggagatttgatgtaattattttttttagtttttttttggttttaggaaaaggttgggatttttattatcgtagatttggggtcgaagtttatgtgttagggttcgcgtgggatttatttttattacggttattttagtttttgagaaacgttttttttgattttaaatttttcgattttttttttttttagaatgattaggttagttttagggttacgttcgtttttttcgttttttttttttcggggagatgttgggatgtagaatcgtttgcgtttcgttattagatagagttcgtttcgttatcgtttttggggttttggttgtagtttttagaaaggataatgggattttaagttgcggggtggggttgttgtttttagaagttttagtttcgggagtggtagtttgaagggggtcggtgagggagacgttagcgggtagggttagtttttcgttcggtgttcgtattagtggcgcgttttgcggaggtcgaatagcggtacgtcggggattttgggcggggtcgtgagggttcggcgggtatagtttcgggcgtatagagagatcgtttttagttttattcgagttgtcgtagtgttttcggatcgttcgttatatttgtttttttatattgcggcgttttcgtcgggtacggttggttgggtttgcgtttcgttcgggtttcgggttggcgggggtcgcgcgtttttattttttagtttgtttggttttgttgttttgggagtttttgggtgggtagttttggtttttgtttttttttttatttttggcgtttcggtttttttttcgtttttgatagaggtcgtcgggttttttcgtagttttagttcgcgttttatttttttggggtggtgttgaagcgttttttcgggagatatcggttggtgggcgtggtgtagttcgtattgcggtttttacggtagttcgaggcggataaagggcgtttacgtagttttcgttttttattttttttttttaataaaagacgaaagaaaaattttgttttagatgaaaaaataaatgtttgttatttgtttttgtagttggaaacggttatttgtttttagaataaaaggttgtagggtggggattggagttgtagatttggtttttttgtttaattttaaagtatttgatttttttttttagtttaaaaaaaaaaaaagaaaaaaaatgtgagtagaaagttatagtattttattttaaaaaatttaagaataagagatattttagtagtgaaatgttttatttgagtattttaataattttttatttttagattatataggtttttggtttaatttgttttaatttagtttatttgtataatttttttttggaaaaattttatatatattgattttgggtgtggttattgtgggaattaatgattttggatttttttttttaaaaaattatttgtaagtagtatttttgggaaataggaatatattaggaggtgtttttttatttataaaatttttataattattcgatgtggtggtgttaggagagggattattaatttcgttttagagttgggggtttagagaggtaggaagggtaagagaatcggtttaaggttatagtatttataagtgatagaagtattagtattgtagcgttattcgttttttgattttgttatgatgttagtgtagggttggttaatattttatgatgggaggaaggttttagtataatagtttttagggtttgtttttgtatggttatttatttgtgggtagcgttttatgttgggagatggtttagtaattattttcggatcgtaattatttttttgttttgttatttatttgattatttttttagcgttttattttttagagggtttatataagttgtatttatttatggagaaaatagacgtatttacgtattgttatgaagaagggttttttgtttttattcgtttttatattattagtatttagtgataaaatttagatttgtttttttgatattaattttttaaaaaattcggttgaagtattatatagagaggaaagggtataaattaaagatgagtagtttaacgaatttttataaaacggatacgtttgggttatttagattaagaaatagatattattggaattttagaagtttttttgtgttttttttgtaatagatattatggttttttgattttttaattttttaatttggttaggtttttgtatggaatttcgaaatgattgtattgattttattaagaattaattaagtgagtgagtagagtcgtttttttatatatcgtagtagatgttgttttttttttgaagatggtttttttgggttttggggttttggttgtagtttaagatgtaggtttttttagcgttaagtgaaaattttgtttttatagttttttagatagtttgagatgatttagtaatagagtaggttggttttgtttttttgtgtacgataagttgttgttttagtcgttaggttttagttgggttttttttagaggttattgttgttgttgtttggtgtttttgggttttgttgtgtgaagtaagatggagttgttttaggggggttagttttgatgattgtgtgttgtaggttgggaaggtagtttcgtatttgttattttttttttttatttttttttttgttttaattgagattttgggtttggagattttggcgatttggatttttgttattcgattattgagggttttttgggaagtttagaaaataatttataaatttgtagagatatggtggtaatgtagtaaattaataggtttggaacgttttaatgtggatgtttcgtaaatgttttttgaaattagggaagagagatggttttttttgtttttttaattatattcggaaagtataatgaaagttttggatatgttttttttagagtttggaataatagtgttttttcggattaggttagttttatttatttagttatgtaggattttattttaaatcgttttcgttattattaattattattttttggtatttttttttttttttttttaattagtttttagtatggatttagttagtggtttttatttttagtaaaattttgttttttggttttattttaatatatagaggatatatattcgtgttttgtaaattgaattttagagttttgtgaacgtttttattgttttattttttttttaaggaattaaaatatataaagaatattaagtgtttgttggatgtttttaattatcgttagattataattttttttttagttaatattgggaattagtaagatttgttggtgaaaagatagatgaatgtaatatttattgttttgtatttttagataaaagtttagttgattatattgttatattttgatgttatttaattgaatgttttttagtttaagatggtaagagaatttaaaatttaggaaagatttggggtttagtttttttttttttttaataggggaaataagaaattaatattatatgtggtgagaattaaatgttagagagttttaaatttattatatttgtttatattttttaaagtcgaagatagatggatttttgtttgtattgtttaattggtattatttacgatagttttgtgatttatgttgaaatataaggtagtttttaaatttaaggttattaaattgtttattttttttaagggtttattttaaaaaaataagttataattttttagataagtaaataattatgttattttttatttgtttgtgttgtaagatgttattttagatttaaattatttattattaatgttttgaaattatgagttttgtatgtaagatattatcgttattatatatatatgttatgaatattaagttgttggttttaaaaaaagaaaaaaagtaaattaaagatgagtttaagggaaaaaataagaatttttttttttgagaaataaagtatttttaaatgtagtattttttttagtttatttatttagtttatgattttaatttgattttagattattttttagtatagttttataaatataattttatgattttaggttaatgatttaggtatttggaaaaaatatttaaaagtttgttttttagagggagtaattaaagtttataaaggaaaattaatttgttaaaggtttaaataattgttagatagaatttatgtgttattaatatataatgtatggttattttattttgttttttttaatttattgttatttttagaaatatgaattttagtttttaaatgggaggtgtttttttaaattgttggttttattaaataattttgtaaaatgtttatatgattggaaaatttggaataatttagtttgtatatattaagagtatttgatttttttttattttttattttgatttgttttttaatgatttttttttgtttttttgttttataatttattttttttttttttttttatttgtgtatattatgtgtatgttagttttttttgtgtgtattgttattatttggggttagagaattgagaaggaaagattttttgttgttttttggttttaaggagtttatttttagggttgggtaatagttatagagtaggtttagattgtttttagagatgacggatgttttttggttttagatattgaaagaatggggtttattgtttttaattgtttggagttattttgtttttatttgggtaagtttagaaggggtatagttttagaatgttggggaaataaagtttttaggaagagtttgatttggtgtatattggggtgaaaattagaaagagggtttttttgttttttaatagagattaggatgatttgtttttgaaagtttttttagaatttttttattaatattttaggatgttttttagttagatttagagaggggagaatatgggaagggttaaagagatatttttttgttttgtaaattttagagggtttattgttggttttttgttaggtataaaggggaattatataaatttattaaatgtaatatgaatttttattaataattattttttgtttttattaatattatttagtaggagatataaagtaattataaattattttatttttaaaattggtatggaaagtggtttgattttaaaatttttttttttaattaaaatagttggtaaatttaatataatttttattttataagtggtagtagtggttgtgtattgttaagaaataatttgggtggaaattgtttttttgaaaaaagaattttatatttttagttttattgggagtgtaaaaatgagaaatatttttattagtcgtttattagtataatttagaaattattaagtggatttattatttagtattttttttattgttaaattataaatatgttaaaaataaaatatgtatgaaaatataaagtaaatatttaattgtgtgtgttatgataagttaattgaagttaagggaaaatggtaagtaataatgtaagagtaagtttgtagataattttggatgaagttatttaaataatgtattaatttagatattatttagaataaagatagaaaaattgtatgaatttaatttaaatgtatatgttttattattaatttattgatttagtttgatagggtagaagataaagtagagtttagatttggaatacggagaatttagttaataatattaattaagtagtttagataggaattcgatttttttgtattagattagtatatagtgtatatattgaagtaaaatattttaatgaatttagattttttaatttgttaagttttttgtgaaataaaaagaatttatttattatttttgtattaaaaagatttgcgaaattttaatatgttttttttgttaaaatttaaatattttattagtataaatgtaaattgaggttattaatgtttttaggaagagttataaaatttttttttataatttgatttttttttaagtacgttaatttttttatatttgaattttttttattgattatatgagaaatttttgtttgtatttagtggatatatatttatttgaaaatattttttttggttgaaaaggtttgtggtgtgtaatttaaagatattttagatgtgtagtgaattgagtttttagaattttttttttttgtaatgtttatgtataatttattttgattttttataggataggaagattgaatataatataattaagggtaaatataaatatgttttaaggatttagtgtgtatttaagtaatatattgttatttatttttttaagtttgtatatatgattaatgtttaataaaaatgattatatgattgggtgttaatttagagatagtttatttgttgtgttatatttagaggtttaagtttttatttttaggaggtatgtaataaatgtttgttgttttagagatttgtttttggtaattgagaatgttgtatataaaggtataatgatggatattatatattggttttattatgagtaatttattaggaaaaatgtaatatataatatgtaaatatgtaaaatatatatatatattagagttttggggttttttaattttttttggtttattttttagattttttttttatgatgttttttggggttttttttgggttattttttttgggagggtaggagaaagaggatagtgggaggaggaaggaagaggttagagagtagggtatgagtataggaagttgtttttatttcgttttttgtttttttgttttttttattttggatattttttttagtttagggaaaggaagtttgataggatttttttttcgtttagtttagggtaggaatagttgatttatgtttttaattttataaatgttttataaagtataaaaagttgttatttttttttgtttttggataagaaaattgaatataatgaataattgtgaataaaagagttgtttgttaagttatttaggtaatagaaaagtgtttggaaggatagataggttaagttttgaagattgagtggatttattttgtttattaaagattatataaattttggattgatatttagggttcgataaattaaagttaaaaacgggattggtaaaggaaagaaattatatatgtatattattagaatattattttagaaataaaggttcgtgtttgaatggtagttttcgtgtattttttttgtttttattttatatttttttgttatttataagtggagttagtttgtttataagttagagttagtttgttggttttttagttttttaagaattaatatttttttgttttttttagtttttttttggagtatagtttgttatttttttaataattgttttttttgatttttttagaagaggtgtatttattttttatgaggggtagaagtttagtttatattgttaattattttttttttgtggtttggtggagagatttttttggtttttttattttgtgggtatttattgttaagttattaagttttttagaaaaggagtttttatattttttttgaaagtttgagaaatattatagtgatgttgtttaaattattttgaaatgattaattggaagttttttaattgtttttttttttttttttagg

SEQ ID NO: 1200 - DNA, 13125 bp, Artificial Sequence
  chemically treated genomic DNA (Homo sapiens)
  unsure 11070, 11234: n is a or g or c or t
tttagggagggaaagaaagatagttgagagatttttagttagttattttagagtggtttggataatattattgtaatattttttaggtttttagggaggatgtgggaattttttttttgaagagtttggtggtttagtagtggatgtttataaaatgggagggttagggaggtttttttattaggttataagggagggataattagtagtgtggattgaatttttgttttttataaaaagtaaatgtattttttttggaagagttaaagaaaatagttgttaggaaaatgataggttgtattttagggagggattagaaagggtaggaagatgttagtttttaagaagttaagaggttaatagattaattttagtttgtagatagattaattttatttgtaggtggtaagaaaatgtagaataaaggtaaagaaaatatacgggggttgttatttaagtacgggtttttgtttttaaaatgatgttttggtagtatatatgtgtaattttttttttttattaatttcgtttttgattttggtttatcgagttttggatattaatttaagatttatgtgatttttgataaatagagtggatttatttaatttttaagatttggtttgtttgtttttttaggtatttttttgttatttgagtagtttggtaggtagtttttttatttataattgtttattgtatttaatttttttatttagaggtaaagaaaaatggtaattttttatattttataaaatatttatggagttggggatatgaattagttatttttattttaggttgaacggaaaggaagttttattagattttttttttttaggttgaaaggaatatttagggtgagaggaataggagggtaagaggcgggatgagggtagttttttgtgtttatgttttattttttagtttttttttttttttttttattgtttttttttttttgtttttttaaaggggatggtttagagggaattttagagagtattatagaagggaggtttggagagtaagttagggaaagttggggaattttagaattttggtgtgtgtgtgtgttttatatgtttatatattatatattatattttttttaataggttgtttatggtggagttagtgtgtggtatttattattgtatttttgtatatagtatttttaattgttaggaataaatttttagaataatagatatttattgtatattttttaaaggtaagggtttgaatttttaggtataatatagtaggtgaattatttttaaattaatatttagttatgtaattatttttgttggatattagttatgtatatagatttgaaggaataaatagtagtgtgttatttaaatatatattggatttttaaggtatatttgtatttatttttggttatattgtatttagtttttttattttgtaaagaattaaggtggattatatatagatattataaaaaaaaaagattttggaaatttagtttattgtatatttaaaatatttttagattatatattatagatttttttaattaggaggaatatttttaaatagatgtgtgtttattaaatataggtagaaattttttatatgattaatgggaagaatttagatgtggaagagttaacgtgtttaaggaaaggttaaattataagggagaattttatggttttttttggaaatattaatagttttagtttgtatttgtgttaatggagtatttgaattttaataagaaaggtatgttgagatttcgtagatttttttagtgtagaaatgataaatgggttttttttgttttatagagagtttgataggttgagaggtttgaatttattagaatattttattttaatgtatatattatatattagtttagtgtaaaaaaatcgagtttttgtttgagttgtttaattggtattgttgattgaatttttcgtgttttaggtttgagttttattttgttttttattttgttaagttgggttaataagttaataatgagatatatgtatttaaattaaatttatataatttttttgtttttgttttaagtaatgtttaaattggtatattatttgaatgattttatttagggttatttgtagatttgtttttatattgttatttgttatttttttttggttttagttaatttgttatggtatatataattaaatgtttgttttatatttttatatatattttatttttgatatatttgtaatttagtaatagaaaaagtattaaatgataaatttatttagtaatttttaaattatattagtaaacggttgataaaaatattttttatttttatatttttaatgaaattaaaaatgtagggttttttttttaagagagtaatttttatttaaattgttttttagtaatgtataattattattattatttataaaataaaggttatgttggatttgttagttattttagttggaaaggaaaattttggaattaggttattttttatattaattttagaaataaaataatttgtaattattttgtattttttgttggataatattggtaaaggtaaagagtagttgttaatgaaggtttatattgtatttagtaggtttatgtagtttttttttgtgtttaataaggagttaatagtgagttttttaaagtttataggatagaaaaatatttttttggttttttttatatttttttttttttgaatttggttggagggtattttggggtgttggtgaagaggttttaaagaggtttttagaagtaagttattttggtttttgttggggagtagggaagttttttttttaatttttattttaatatatattaagttaagttttttttggaggttttgtttttttagtattttaagattgtattttttttgggtttatttaggtgggggtagaataattttaggtagttggaggtagtgaattttatttttttaatgtttggagttaaaaggtattcgttatttttgagaataatttgggtttgttttgtggttattgtttagttttgaaagtgagttttttgggattagggagtaataaaagattttttttttttagttttttgattttaggtggtagtagtgtatataagggaggttgatatgtatatgatatatatagatgagaaaaggagaaaagaataggttatggggtagggaggtagggaggggttattaaagaataagttagggtgaaaaatgaggagaagttaggtatttttggtgtgtataggttagattgttttaagttttttaattatgtaagtattttgtagggttgtttaatgaaattaataatttaaaaaagtattttttatttaaaagttaaaatttatatttttaaaggtgatagtggattgaagaaagtaaaatgaaatgattatgtattgtatgttgatggtatatgggttttatttgatagttatttgggtttttggtaagttgatttttttttatgggttttagttgttttttttgaaaaataggtttttggatattttttttaagtatttaaattattaatttagaattataagattatatttgtaaaattatgttaaaaagtggtttgaaattagattgaaattataaattaaataaatgaattaaaggaaatgttatatttaggaatgttttattttttagaggaaaaaatttttatttttttttttgaatttatttttaatttgttttttttttttttttaaagttagtaatttgatgtttataatatatgtatgtaatgacgataatattttatatatagagtttatagttttaaagtattgataataaataatttaggtttgagataatattttataatataagtaaatgagaagtgatataattatttgtttgtttaaaaagttataatttatttttttaaagtaagtttttagagaaggtgaataatttaatgattttaaatttggggattgttttgtgttttagtatggattatagagttgtcgtagataatattaattaagtagtgtaagtagaaatttatttgttttcgattttgaaaagtataggtaaatatagtaaatttaagattttttaatatttaatttttattatatatggtattggttttttattttttttgttaaaagaaaaggaaaattaaattttaaattttttttgggttttaaatttttttattattttagattgaaggatatttagttaagtgatattagaatgtaataatgtaattagttaaatttttatttaaaaatgtagagtagtagatgttatatttatttatttttttattaataaattttgttgatttttagtgttaattaaaggaaaagttataatttaacggtaattgaaaatatttaatagatatttaatattttttatatgttttagttttttaaaaaaaaaatgaaataatgaaaacgtttataaggttttagaatttagtttgtaagatacggatgtatgttttttatgtattaaaataaaattaagaagtagggttttgttgaaaatgagaattattagttaaatttatgttgggggttaattagggaggagaaaaaggaggtgttaaagagtagtagttggtggtagcgaaaacgatttggaataaagttttgtataattaaataaatgaagttagtttagttcgaggaaatattattgttttaaattttggaggagatatgtttaaagtttttattatgtttttcgaatatagttgagaaagtaagagggattattttttttttttggttttaagaggtatttacgaagtatttatattgggacgttttaggtttgttgatttattgtattattattatgtttttatagatttatagattattttttaggttttttagagagtttttagtaatcggatggtaagaatttaagtcgttagggtttttaaatttagaattttagttaaggtaggaggggaaataggaagaaagagtaatagatgcggaattgtttttttagtttgtaatatataattattagagttggtttttttggagtagttttattttgttttatataataaggtttaaaggtattaagtaataatagtagtggtttttggaggaggtttagttgagatttggcggttgaagtagtagtttgtcgtgtataggaaaataggattagtttgttttgttgttaagttattttagattgtttgaaaagttatgggagtaggatttttatttagcgttggaagggtttgtattttgagttgtagttaagattttagaatttaggagagttatttttagaggaaaagtagtatttgttacggtgtgtaaagaaacggttttgtttatttatttggttgatttttaatgggattaatatagttatttcggagttttatgtaaaaatttgattaaattagggaattaaaaaattaggaagttatgatgtttattgtaaagggaatataagggggtttttggggttttagtaatgtttgttttttgatttgggtaatttaggcgtgttcgttttgtgaaaattcgttgagttgtttatttttgatttgtgtttttttttttttatataatattttaatcgaattttttaaaaaattaatgttaagaagataaatttgaattttgttattaagtgttagtagtgtaaaaacgagtaaaggtagggagtttttttttatagtagtacgtggatgcgtttgttttttttataaatagatgtagtttgtataaattttttgaggaatagggcgttgaaaggatgattagatgagtaataaagtaggaagataattacgattcgaaggtgattgttgaattattttttagtatggggcgttgtttataagtggatggttatataaaggtaagttttgaaaattgttgtattgaaattttttttttattataggatgttagttaattttgtattaatattatgatagggttagaaaacgagtgacgttgtagtattggtatttttgttatttatgagtgttgtgattttgagtcggtttttttattttttttgtttttttgggtttttagttttaaaacggggttgatgattttttttttagtattattatatcgaatggttatgaagattttgtagatagaaaagtattttttaatatatttttattttttagaaatgttatttataaataattttttaaagaaaaaaatttaaagttattgatttttataatagttatatttaaagttagtatgtgtaaaatttttttaggagaaaattgtgtaaataaattaaattagaatagattagattaaaggtttatatagtttgaaaatgaagggttattgagatgtttaaataagatattttattattgaaatattttttgtttttgaattttttggaataaaatattatgattttttgtttatattttttttttttttttttttttaagttaaaagggaaaattaagtgttttaaagttaaataaaagaattaggtttgtaattttagtttttattttgtagttttttgttttggggataagtggtcgtttttaattgtagaggtagatgataagtatttatttttttatttaaaataaggtttttttttcgttttttattggggagggggagtggggaacgagggttgcgtgaacgttttttgttcgtttcgggttgtcgtagagatcgtagtgcggattgtattacgtttattaatcggtgtttttcggagaaacgttttagtattattttaggagaatagagcgcgggttggggttgcggagggattcggcgatttttgttaggagcgaggggagggtcgggacgttagggataaagggaaaggtagagattagagttgtttatttagggatttttagggtaataaagttaggtaaattgagaggtgggggcgcgcggttttcgttagttcgaggttcgggcggagcgtaagtttagttagtcgtgttcgacgggggcgtcgtagtgtgggggggtaggtgtggcgggcggttcggaggtattgcggtagttcgggtggggttgggggcggtttttttgtgcgttcgaggttgtgttcgtcggatttttacggtttcgtttagggttttcggcgtatcgttattcggttttcgtagagcgcgttattggtgcgagtatcgggcgaggagttgattttattcgttgacgttttttttatcgattttttttaagttattattttcgaggttgggatttttaaaagtagtagttttatttcgtaatttggggttttattgttttttttgagagttgtagttaaggttttaagggcggtagcgaggcgggttttgtttggtggcgaagcgtaggcggttttgtattttagtattttttcggggaggggggggcggggggagcgggcgtggttttaggattagtttagttattttgaggaaagaaaggatcgggaggtttgaaattagaaaaggcgttttttaggggttgaggtagtcgtggtgaggatgaattttacgcgggttttggtatatgggtttcggttttaggtttgcggtggtgggggttttagtttttttttgaggttagaagaggattgaaaggagtggttgtattaggttttttttatttttttgttttttgcggttgcggttttattgtggtttttgtttttttgatatttgtattttatttagcgggagaggcggtggttaatttagtataggttgcggatttagcgtggtgatagattttttaaggttattggagattttttttttgggttttatatttaataattcggattatttttaattagtttagaaagggtttggattaagtatgagaggtgacgaggagaggtatgggtgcggggcgcgcgggaggagcgtagtgatcgtcgcgttttgggtggggtcgtgtttgcgcgttttttagcgcgcgtttttgggggcgcggggttatttatcgagttcgatgttgtcgatggtacgtcgtaggtgtttttcggttacgatttcgtcgacgattattagtaagtagaatttgttgttaaggaagcggtgcgataggttaggcgaggtggacgtcgtcgggttggcgatgttgtcggacggtttcggttcggtggtttttattattacggtcgttattttgtcggttgttgtgtttcggcgaagtgtttcgtttcggtcgttttttttttttgcggtaggagaaaggattattttcgaaggtgttgttttcgtttcgttttttgcgtttttttttttttggcgtcgcgcgtcgttttttttttcgtttttttttagcgtcgcggagagtgcgcggcggagaggagcggggagtgagagagggcggggaggcggcgtcgtttttatatggagattaggtagggagtcgggaggaggaggaagaggaggaggaaaggattattcggtatatttttacgcggtggttgttttcgtttttttagtcgttggttcggggttgatgttatttgtagtaaattatttcgttcgcggttcggaagttggagggacgaggtgtgcggataatggtcggggtagggtcgcgagttaaggggttggggcgttcgttgagtttttgttgtagtcgtgaagggggaagacgtttttaatttatattatttattacgtatatatttattgtttattttttatttttattttgtttgtgtatgggaatgggatgagtttttattttcggagtgggggtttttttttttgttggagttgtattagttaggtttttgttttgtgtgttgtgtatgatgtagttaggtttttaggaattgggatagttatagtgggtagatgcggggttgtgggtatttcgtttaggaagacggaatttgttttttttttgattttgtggttttaagaagacgaatttattgatatttattaatattaatatttattatttttatttaaagaatatattaaaaatgtaaaatttaagtttattattgtttaggttttggattttattttggtagggttaaggatgaaaaagtattggttttgtggtgtttatgggaaatgagagaaatgtagatgtattatattagatattaatttttttttttaatgtgttgaatagatagtattagtaataataaagaataaagagaagatattgtttttatttagtagggttatagtgattataatgtattttttagttttttggggaatatataagtaaaattatttcgtgataatgatgttttttaaaatatttgtagtattgggaatttttattgtttttgtttgtgtttagaagaattaaaaaatgtgttttttgtttttgtttttttgttttttttttaaggtagtttatttataatcgttttttataaatatattgaatatagtttttgttttagaaaaggggaggagggtgaggaaagagtaaaatgtgtaaatatggtattatagaagattggggaattcgagttttaaggaagaggaatagatggaaattagttaatatagttttaatattagaatgtttgttagtaaaatatagatgatagatagatagatagatagatagatagatagatagatagataattatttagatatttttaagatttttaaaataatttagtgttttaggtgttagttgttatgatttattggttatgtattttttgtttttatattttttttgatattttggtatgggagatatgttgggtagttaagggttggggggttttatttaatatgttaatttgattaatgtagaatgaaaatatcgtttggttcgtagtatttgggatttgtgataggattattagagagttgtatttattagtaattagatgaagtgtttttaattagttgtatttattagtaattagatgaagtgtttttagataatattttggttaagatatttaattgttgtttaagaagtaaggttagtattaaagtttataattggggtgaggggtaggaaatatggtgaagagtattgttttttaaaggttattcgttggattttagttttatttagtttgtgtttggtttttttttttttgaattattgttatttttatgtatgtaatagtttttttttatgtagtttattttttttatttaaatttatttttaaatgtaattttatgttgttgtataaatggaaatattaatattatttattaatagaaagtatttttaaaaatatatataatgaagataagatgtgattaaatttttgttatatattgttatgatttgtttaagattttgagtttaaggttttttttttttggttgaaaatagagattggttaagtgttagagaggtattaaagagatattaatatttaattgagttgttttttatgttgtaatagaagattggatgaaaattataatagagcgtttttttattgtgtgtgtttgtgtaattaaatattatgatcgtgattatttaagttattatttatattttgaaaaatagaggtataatgggagaatatagattagggatgtagaatattattttatagttcggtaattttggtaagtgatttattttttttgattttttatttttttatttaatgagaagaagaatatttttataattgttaaagtaattgtaagaaagaaggaaatgatagaatgtgtaagtatttaatatagtggttgggtatagtaagtaattaagggatggttgatttattgatttgtttttttttagttattaagataatggagtaaaagtagttttataaaatgtgtaagtgatattgttataatatttttgaaataagaatagaatattatattattatattttaatattagaaaagtagtttttttttttttttattttaagaaaatgtatatagttttaaggaggaaaaagggggaaaattaatatataagagtattaatattgttagttgtttaattgtgagttgggtattatttataagatggagattattatttaataaatattgtgagggttatttgtgtttagtataggtttcgtattaggaatttaattntggattagttagataaaaattttttttaagtgtagttagtatttcgatattaatagatagatgaaagttaaataatagagatataatacgttaggtagtgataagtgtaatgaagaaaaataaagtagggtgaggggatagtaaatggaggaagatgttgtttntggtaggttagagaaagttttttgaagaggtagtattggatagagatttgagtacgttgatagagggtcgttgtgataatttgggagaagagtattttaaggtaggttttgagatgagagagtatatttgttatagttaattaatagtaaagtggttaggagtttatggttataaaaaaaaaaaaaaaaaaaaaattgggtatttggaaagaggtgagaaatgtgaataatagaaatggattaaaggttaggttaagttagtagaggagatttttagtgtgtaaatgtgttaaaaattgtttttattttttttttagtagtttggttttttttttatttttataattataggttttgatagtattggaatgaaaatttttgtgataaattttggaggtttgtaaattttttagattgatgtttagaaagaaaagaagatataagtaatagagagaagttgaattttagagtaaaagattaatttgaatttgaaattttttttataatattttttaagtttttttattttgtgaaatagttatttatattgtttgaaattttattaaagatatatatgtattattatatgtttttttttaaaagaagaaaatttttaaaatgtgattagaagtgttatttagttatttgtatatgagtataaattagtgtgtttatttttttttttaatatttagttgatattattttttttagaagaaagagtattttagttaagggtaaaagataataagtaattttttatgtttttttatgtattttgttttattttatatttttgttgtttttgaaaaaaatttgaggtagtaaatatttttaaattttgaagatttgtggaataagatggattgattttatttttttttttattatttttgttttttttatataaaatagtgatgttatttatagttgaaggtatagttggaatatgtttggaggtttggagatattgaattaaagtgatttttgagaatatagaaagtaaattgttttttattagttatattataaaattcgtatatgttggataagagtaatattatattaatttaaaataagttaataaataaataaataaaaaaaaattagaatggtttttaggttattaattttggttttgatttgattgaagatattattataattaaagtaataatgtatttggtaaaaaataataataataaataagaaaagttagaaagtttagaaaagagaatgtgaaagaagtaatttttaagttttgattatgtagaatgttagaagagagattagtagggtttaaagttgttttgtttagttttgtgatagttgatttttgatttaagtgaggtttaatatagttttttgattgtattttagttttttttgtagatttgtttttagggaggaaatgtattggtagtaatatgtttgatagttagtaatttttttaattgttattttggttggtatatttagttggtatgagtttgtttaatttgagttagattttgaattttaattatttttgattttaaggttataagaggttgtgtgtatatgatttgattattatgaattgtggtttaggattagaattgtattaataaagagagggagaaaaattttttttttttaatttttttttttgtttttttttattgttttttattagtttttttttttgtatcgatatatattttatttttagattttttatttgtgttataatttagttttattatagataaagtggtttttggggatatcgtgagattttttttttattgttatttttttgagaaaaaaaaaaaaaaatattgttaattttaatgtttgatttttaaataaattttggattatgatttagttataatgtggggatattttgt

SEQ ID NO: 1201 - DNA, 6861 bp, Artificial Sequence
  chemically treated genomic DNA (Homo sapiens)
ttaaaggatataaataaatagttagatgaagagatatatagggtgaggtttgggagggttttaagtgtaggagtttttgttattatggagttggggtgtgttatttttttggtacgtggatgagtttttatttatttttttgttagtttttatttgtttagttttttagaaattttttgaatttagtttttttagtattttttgttttagggtatggggtaggattttttttggaatgagggttttatgatttatgattagaagggtagggtaagattagagttttgttttggggtaggtgaaagagaagtaggaaaaagttagagagattttgttttttgaggtttgtttttgagttttaatatttttaatattataacgaaatattgtataataagggttatgggagttatgagttaggaattatggataaaaatatatataaatttatatatatattaatattatatttattaacgaggttgagtattttttttatatgtttattgtaatttgtattttttttttggtgagttatttattttatgttgtatatatttttttatagtaaaagagaaggaaatgatttatagttttatatagtattttggagagatagttatgaaaattgttaagaaaaaaaaaatttatgtttttttgaatagtaagatgtgtgcgtgtgtgtgtttatagaaaaaggaaagggaggatataaattaaattgttaatattaacgattttagggagtatgtagtatttattgtttggttataagaaggggtatgaatttagaggttagattaggtttaaggttttagttttattattgatttgatgtgtgatatggacgaataatatgttagtttttttatttgtaaaataggaagagaaatagagttgttgtgagtagtagatattataatagtgtttgttataataaagtgtagttattgttattatattattattttttttagtgttttttttattgtattatatttatttttttatttaggatttttttattgggattgtaaaaagatttaagtattaaaagagaaaaatatagaaataaaaataaaatataaaaagtttaataatgagggggtttatatagtatttgtttttgattttattagaattagtttgtttttgaggttattcgagatatttaagttttggttttaaagaattgttataaatttggagacgtggtttatatttttttttttttggtttgtttttatatagaaggtgtttttaagatatatagtttaggaattttttttttaatatttttatatttttatttgttttttgttatttttattgttatttttttttttttttttgttatattaatagttttttgtattgtaaatgttttttggaattttttttatgattgataggttaataaggagttattttatttgttgtttgagttataaatattatttttatttaattttaattttgttttttttgtagggttattgttatattaatgttttttggtttgagaaatttgaagtttttaggtagtgattagattttttttacgtgttttataatattttatatttaataaatttattaacgataaataggaaataaattaataattttttttggtttagtttatttttaggatacgtatttatgaaattagaaattttatttttgttagaataggatggttatgtgtttttttgttaataaagaagttttaattttattaattataatgtttacgattaaaataaagtaggatttttttttattgattttatatgatcgttagagttttttatttttttgtttttttttgttatttttttttttgagacggagttttgtttcgtcgtttaggttggagtgtagtagtgcggttttagtttattgtaagttttatttttcgggtttatattatttttttgttttagttttttaagtagttgggattataggcgttcgttattacgtttagttaattttttgtatttttagtagagatgggattttatcgtgttagttaggatggtttggattttttgatttcgtgatttatttcgtttcggttttttaaagtgttgggattataggcgtgagttatcgtgtttcgtttttttttgttatttttatattcgtttatttttcgttttttttttttttttttttgttttttttttttgaatatttttaagtattttgtgtgtgttaggtatttagtaataaagtttgagtaaaatagtttatttttttattattatggagtttataagtttaattgggaattggagatatttattaaataattattaaatttataatttgaaattgtatttagtgttatgaaataaaatataggtttttgtgataaatttgtgtagatgaaggttttatttaggaagtggtagttgagttggagtgagaaggataaggagttagttaggtatttttttatatttagagcgtcgagtgggtagagattaggattgttatagtatttgtttttgggtttgatttatagatgtgtttataaatatttgtggaagggaggaagggataatacgaataatataaaataaatgaaaatgtgtttttttttgttttgatattatgaaattaataaaattaattgttattaattaaaaaatttaagtagaatatagaaaggagagtgtggtataaggtaaggttgtagaagtagtagttaaattatattggggttttgagtatgtagagattttagttcgtatttcgatagtaattgaaagttattgaaaagtaatttatagtaaatatagttaatttttttatagtttatattaaaataaattatgtattagatattgtgttaaagattttatttgtattatttgaatttttgaaataattttatgatgtattattaatattttaattttatagaacgaggatattgatgtatagagaggtcgtgattttaaatttttatttttattgtattatatttatatattatttataagtgagagaagtaggtaagtaattatgtatagttaaattttatttttttggtaggtttagttttattgtggagttggtagtataggggtattaggatttaatgagttaattattgattttacgttttttgttttgattttttaataaaataattttttagttatattttggttttttatatagatttttttgttgggagataatgtattgattagtttatatacgtattttgttttagttgataattttattatatattgtaagttaataaattggtatttttttttaaaaaataataaaaaaatttaatagttttatatagttatttttttatgaagggttagtttgaaaagtaaaaagtaacgaataaaaatattattatttattgttttttttgtggtcgaatttttttttgttgtttgttttgagcgatcgtggatgtggttattgagtttggggaggagttttttattttttttgtggatgtttttagtatagtttaagtgttttttttgttttttattgagtttttagtaaattttatttttttttttgtatcgacggagaggattgtttttgggaatgtattttgttttattgtcgttagtagtaggtagttggagattgttattaggggttttttttatttttttagcgtaaagtatattttatgttaggagtaggtcgttttttgagaattttattaaattcggcgtttttgttacgcgtttcgtttagggttattaggttattagttcgattagatttgtatcgaggtttagttttagaataggttgtagagattttcgtttttaaggcgggttttttttaaacgggattttatattttttgttggtttaagttttgtttcgttttttttttttgtaatttttttattgggtaaaattgggataaacgtaggtggatattttaaagtgaaagttttatgaaatagtttattttacgtcgttaagagatttgtttaagtatatttaagggaacgaatagtttttatttattaaaaaagaaatgttcgttttatatttttttgaatagaggattgaaatatcgattttttttttttttaaaggaataggaaggttacggggtaaggacggatttgggagcggttttttttttttttggagggaaaggttggagcgttgtttttatttttaagtttacgaattacgaagggtgaggattttttagaaattttagcgtaggggagcgggtaggagggcgattgtttaaatcgatggtagtatttttattaatttgtttttcggttatttttagtagagttatttattaggaaacgattagaaggtgggtttgcgttttttagatatttcggggtcggtaacgagtcgggtagggacgtcgaaggaaggtcgtgaggagttttcgttggtcggttaagatggttatttttatatggtcgatcgttatcggttttttgttattcggtatttagaggcgggacggttagaaagattttagtcgtagtataaaattttcgcgattttcgtcgttttcgttgggggacgcgattttcgggaaagttatttcggttaacggtcggaagggaggtgttatgttatcgtataggggagcgggtttagtaagttttagtcgtttttttttttatattaaataaggaagagtaattttttacgttttttcgcgtttgtattttttttttagttttagcggtttaagatagttgaacggtttttggagggtcggattgttacggtatttttcgcggtcgcgtagtgtggtttagttcggatttcgcggggcgagttgttttttttttttcgattttcgcgtaagtggtgtattggcgcgcggcgtcgaggggcggggttcgagtcgggcgcgcgcgggcgttgttttataaatatcgggtcgtatcgttcgttgtttcgttcgtttcgcgtcgttcgtttgttacgagtagaacgttgttcgtagtttgcgtatttcgtagtcgttgtcgtttcgtcgttgttttttcgtaaggttattttcgtatatcgatattaatatgaacggatagtttaacggtttttacgaggcgtttatcgaggagggtatatttttttttattttagagtcggtcggggaaggttatttaggtgaggggacggtttgaagcgaagcgtggggcggggtagaaggtagcgttaaggttcggttggttgcggtcggtcggtggtggggttcgcgcgggtcgttttcgttcgtcgggtgatggaagagcggcgatcgcgcgtttttttcgtggcgtcgttagggtttggcgcgtggtcgtcgtttttttttttttttttttttttatttttttttttttttttttttttttattcggtcgcgcgtttaggtatgcggaaggttttagaaaacgtgaagggcgggggttgtggtcgttagtgagttttggtcgggaagggagggtattgttaatttttttcggttttgtcgtttgataaatttggagtgggcgattcgtttcgcgtgttcgcgttcggttttcgggagcgcgcgtttcgtattgtagcggcgattacgtgtttgtcgtatgtggtatttgggcgagggggagtcgtgagttttttcggttgttttggtttttagtttgaggggtggggggtttatgttttgggacgtcgtttggttttattgttttagtggttaggttttgattatatattggagaatacgtatatgtttttcggcggatatggttttgtttttaaggtgacggtttttgattaaatatagtttatgtttaagaaggtagtttttatttggattttttgtgaaaaggatgggaagtatgaattaggagttgttattgttttgggttcgtatttaaagttttcggtgtagggttttatttgaggttttgttcgtttaatcgttattatggggattaattggtacgtgaaggaggagtaaagttatatttttaggaattgaaaattttagtttgagtatatcggttagtaaagatgattatttggtttttttggttgtttttgtttttaggatgatcgtagtagttatttatttggtggttttagggtttggttagtttattgtgtttatgatgaaattttataagtaatttagtggtatgagaggataaatttaggattttgatgagtgttgaaggttagttgttatattagttagtagtagatcgaagtttagagtttgtagtttggtttttatattatgtttggattttgttttaggcggttatagaaaatttagaaaaacgaatttgaattagggagatatttgtttttttttttaataatagatgataaagtagggagatatggattcggaatacgtttgagtattttttatattgttgagtttttgttttttgcgtaatttttaatagtaaaattagataattgttattttagttagaaaatgttttttatttaattgtttaatcgaattattttgttgtttattataattggtgttttttaagattagggaaattggtttatttgtggttttagttttattagatttttaggtgtagaggggtttggtatagttgtggaagtgaatatgatatagggtaaattttgttttttaaaggatataggattaatagtttatttttttggtgattagatttataatgtaaattttgaattttaggaggaaagtgtaaatataatgaattaagatgtattaagtatgttttttaaaatttttaaagattttatagatagtaatagggagggagtttgtatatatatatatatattttgtttaaagttaaagaaattgagttaggaattttttttttttaga

SEQ ID NO: 1202 - DNA, 6861 bp, Artificial Sequence
  chemically treated genomic DNA (Homo sapiens)
tttggaaaagagaaatttttggtttagtttttttaattttaaataaagtatgtatgtatgtatgtaagttttttttttgttattatttgtaaaatttttggagattttaaaaaatatgtttaatatattttaatttattgtgtttgtattttttttttaaaatttaaagtttgtattataaatttaattattagaaaggtgaattgttagttttatattttttaaagaatagaatttgttttatattatatttatttttataattgtattaaatttttttgtatttgggagtttggtagaattgaggttataggtaggttagtttttttaattttaaggaatattaattataatgagtaataagataattcgattaaataattaaatgaaaagtattttttgattaaaatggtaattatttgattttgttgttaggagttgcgtaggaaataaaagtttaatagtgtagaagatgtttaaacgtatttcgaatttatgtttttttgttttgttatttattgttaggagggagaataaatatttttttaatttaagttcgtttttttgaattttttataatcgtttaaaatagaatttaaatataatgtggaagttagattgtaggttttgaatttcggtttattattaattggtgtaatagttaatttttagtatttattaagattttgggtttgtttttttatattattaagttatttgtgggattttattatgggtatagtaaattgattagattttaaagttattagatagataattattgcggttattttaagggtagaaatagttaaaagagttaaataattatttttattagtcgatatgtttaggttgagatttttagtttttggaaatatagttttattttttttttacgtgttaattgatttttataatggcggttgagcggataaagttttaagtaaaattttgtatcgaagattttaaatgcgaatttaaagtaatggtagtttttaatttatgttttttattttttttataaggggtttaaataaggattgtttttttggatatgagttatatttagttagaggtcgttattttggaggtaaggttatattcgtcgaagggtatgtgcgtattttttagtgtgtagttaagatttaattattgaggtagtggagttagacgacgttttaaggtataggttttttattttttaaattgagggttaggatagtcggggaggtttacggttttttttcgtttagatattatatgcggtaaatacgtggtcgtcgttgtaatgcggggcgcgcgttttcgagggtcggacgcgagtacgcggggcgggtcgtttattttaggtttgttagacggtagggtcgggaggggttaatagtgtttttttttttcggttagaatttattagcgattatagttttcgttttttacgttttttggaatttttcgtatgtttaggcgcgcgatcgaatgaaaagggaggggggaagggaagggtggagaggggagggggaagaggagcggcggttacgcgttaggttttggcggcgttacgaggaaagcgcgcggtcgtcgtttttttattattcggcggacgaggacgattcgcgcgggttttattatcggtcggtcgtagttagtcggattttggcgttgttttttgtttcgttttacgtttcgttttaggtcgtttttttatttgggtggtttttttcgatcgattttgaggtgaaaaggaatgtgtttttttcgatgaacgtttcgtggaagtcgttgagttgttcgtttatgttggtgtcggtgtgcggaagtggttttacgaaggagtagcggcgaggcggtagcggttgcgaaatgcgtaagttgcggatagcgttttattcgtagtaggcgggcggcgcggagcgaacgaagtagcgggcggtgcggttcggtatttatagagtagcgttcgcgcgcgttcggttcgggtttcgtttttcggcgtcgcgcgttaatgtattatttgcgcgggggtcgggggaggaagggtagttcgtttcgcggagttcgggttgaattatattgcgcggtcgcgggaggtgtcgtggtaattcggttttttagagatcgtttagttattttgagtcgttagagttaggagaaaaatgtagacgcgaggagacgtgggggattgtttttttttgtttgatgtgggagaaaaagcgattggggtttgttggattcgtttttttgtgcggtgatatggtatttttttttcgatcgttggtcgggatagttttttcggaggtcgcgttttttagcggaggcggcgggaatcgcggaggttttgtgttgcggttggggtttttttggtcgtttcgtttttagatgtcgggtggtagggagtcggtggcggtcggttatgtgaaggtggttattttggtcggttagcgagggttttttacggttttttttcggcgtttttgttcggttcgttgtcggtttcgggatatttgaggggcgtaggtttattttttagtcgttttttggtgaatggttttgttgaagatggtcggaaagtagattaatgaaggtgttgttatcgatttaaataatcgtttttttgttcgtttttttgcgttaaagtttttgagggatttttatttttcgtggttcgtggatttaaaagtggaggtagcgttttagtttttttttttagagagaaaggaggtcgtttttaagttcgtttttgtttcgtggtttttttgtttttttgaagggggggggaatcgatgttttaattttttgtttaggagaatatggaacgaatattttttttttggtgggtgggggttattcgtttttttgaatgtgtttaagtagattttttgacggcgtggaatgggttgttttatgaagtttttattttaaaatgtttatttgcgtttgttttagttttgtttaataaaggaattatagggaaaaagagcgaaataaaatttgagttagtaaggagtatggagtttcgtttggagggagttcgttttgggggcgggggtttttgtagtttgttttggggttgggtttcggtgtaggtttggtcgggttggtggtttggtggttttgagcggagcgcgtgataagaacgtcgggtttaatgaggtttttagggaacggtttgtttttagtatgggatgtattttacgttggggaggtgaaggagatttttagtaatagtttttagttgtttattgttggcggtagtagaataaggtgtatttttaagaataatttttttcgtcggtgtaggaggaaaggtgggatttgttaaaggtttagtgggaaataaaggaagtatttgggttgtgttgggggtatttataaagaagataaagggtttttttttagatttagtgattatatttacggtcgtttaaagtaggtagtaagaaaaggttcgattataaaagagataataggtgatgatatttttattcgttgttttttattttttaagttaattttttatgggaaagtaattgtataagattattaaatttttttgttattttttaaaggagaatgttaatttattaatttataatgtgtaataaaattgttaattggaataaaatgcgtgtgtaggttggttagtgtattattttttagtagaaaaatttatatgggaagttagaatataattagaaggttattttattagggagttagaataaggagcgtaaagttaatgattggtttattaaattttgatatttttgtgttattaattttatagtggggttaggtttgttaaggagatgagatttagttgtatatagttgtttatttattttttttatttgtgaatagtgtgtaggtgtaatatagtaagagtaggggtttggagttacgatttttttatgtattagtattttcgttttgtaaaattggaatattaatagtatattataggattgttttaaggatttaaatagtgtaagtagagtttttagtatagtatttagtatataatttgttttaatgtaagttgtaaaaaaattaattatatttgttgtgaattattttttagtggtttttaattgttgtcgggatacggattaaaatttttatatatttaaggttttagtgtgatttggttgttatttttgtaattttattttgtgttatatttttttttttgtgttttatttggattttttagttagtagtagttaattttattaattttatagtattaaaataaaggaggatatatttttatttattttatattattcgtattgttttttttttttttttataaatatttatgagtatatttgtgagttagatttaggagtaaatgttataataattttggtttttgtttattcggcgttttaaatgtggggagatgtttggttaattttttattttttttattttagtttagttattattttttggatgaagtttttatttatatagatttgttataggggtttgtgttttattttatggtattaagtgtagttttaaattatagatttggtgattatttgatgaatgtttttaatttttagttaggtttgtaagttttatgataatgagaaggtgggttgttttgtttaagttttgttattgaatgtttggtatatataaggtgtttagaaatgtttaagagggagagataagaaaggaagggaaggaaacggaaaatgaacgaatataaagatggtagaagggggcggggtacggtggtttacgtttgtaattttagtattttgggaggtcgaggcggggtggattacgaggttaggagatttagattattttggttaatacggtgaaattttatttttattaaaaatataaaaaattagttgggcgtggtggcgggcgtttgtaattttagttgtttgggaggttgaggtaggagaatgatgtgaattcgggaggtggagtttgtagtgagttgagatcgtattattgtattttagtttgggcgacggagtaagatttcgttttaaaaaaaaagatggtagaaggaagtagagaaatgagagattttggcgattatgtgaaattaatggaaagaggttttgttttgttttagtcgtaagtattgtaattaataaaattaagatttttttgttaatagggaagtatatggttattttgttttgataggaataagatttttgattttatagatgcgtgttttaagggtgaattaaattaggagaaattgttggtttattttttgtttatcgttaatgaatttgttgaatgtgaagtgttgtaaagtacgtaggaaaaatttaattattgtttaaaggttttagattttttaagttagagaatattaatgtagtagtaattttataaaaaaggtaaagttgggattggataaaaatggtatttgtgatttaaatagtaaataaaataattttttattagtttgttagttatggggagagttttagaaaatatttgtagtgtaagaagttgttgatgtggtaggagaaaagaggagggtgatagtagggatagtaaagagtaagtgaaggtgtggaggtgttgagaaggaggtttttaggttgtgtgttttaagagtattttttatgtgaagatagattaagaagaaagaaatgtaggttacgtttttaaatttgtggtagttttttagggttaaagtttagatatttcggatggttttagaggtaagttagttttagtgggattagaaataagtattatgtgaatttttttattattaggttttttgtattttgtttttatttttatgttttttttttttgatatttaaatttttttatagttttaataaagaagttttgaatggaagaatagatatggtatagtgaagaagatattgaaggagataataatatgatgataatagttatattttattgtgataggtattgttgtaatatttattatttataatagttttatttttttttttgttttatagatgaagaaattggtatgttattcgtttatgttatatattaaattagtagtggagttagggttttgagtttggtttgatttttaaatttatgtttttttttatagttaaataataaatattgtatattttttgaggtcgttaatattaataatttggtttatatttttttttttttttttttgtgaatatatatacgtatatattttattatttagagaaatatggatttttttttttttaataatttttatgattgtttttttaggatattatgtagagttgtaaattattttttttttttttattgtgggaaaatatatataatataaaataggtagtttattaaggagaaaatgtaaattgtaataaatatatgaaaaaaatgtttaatttcgttgatagatgtgatgttaatatatgtgtgaatttatatatgtttttatttatggtttttggtttataatttttatagtttttgttatatagtgtttcgttataatgttgagagtgttaggatttaggagtaggttttaggaaatagaatttttttgatttttttttgttttttttttatttgttttaaggtaggattttaattttgttttgtttttttgattatgggttataagatttttattttagagagggttttattttatattttgggataaagaatgttgagaggattgggtttagagagtttttggagagttgaataggtggaggttgataggaaagtgaataagaatttatttacgtgttaggagggtggtatattttaattttatggtaatagaagtttttatatttgggatttttttagattttattttatgtatttttttatttggttgtttgtttgtattttttaa

SEQ ID NO: 1203 - DNA, 6802 bp, Artificial Sequence
  chemically treated genomic DNA (Homo sapiens)
gcgtgttttagaattgtttaatgggggatggggacgttggggttttttgatttttgtaggttgcgggttatatttggggatgttaaatttttaggttgtttggtttattgtttgcgtttttgggaattgtttgtagttgtaggtgagttgaatttatagtgggttgaagggttatgggttggggtattaattgggttagttagagtttttagtgttaaatttgagttcgtttttttagatgtttatttttttttttagtgtgattgattataggggttatttttcgtgggaagttttcgtagtcgtttttggggtgagggttgattttttggtttcgagaaggtacgtagtaggggtggattttgtatttttaataattaggtgagtagtatgggtggttaggtgtagatgatttttgagttttttttagagtttgagttttagggttttatatttttttataaataaaatgggttattatgtattgagtgtaaattttgatagggagttagtgagagggttggagtttatttgggaggttttgaaaataggagagtgatttatttagtgttagagaagagagggagatggtgggaggggaggagagggggagaaagggaaagattagagaagagagggagagggagggagggaaggagagggagagaaagagaaagattgataatggtttggaaggtggaaggaagttgatagtgaagagttttaaatgttagttaagtttgaatttttatttagaggtgatttagtgttaataaaggtttttttttcggtaatggtgatagagattgttattgttaattaaatgttatattttggttttgggtatttaggtagagttaggtaatgtgtattttttttttgaggtagttaagagagatgtttgttgttttttttttgtttatatggttagagataaggatttggaaatggtggaggtagttttggaaagggtttatgtggggggtatttatttggtattggacggtgttaggagagagaagtaaattttgtattaagttattgtgatttggggggtatgtttgttattgtaatatagtttattttagtttgattgataaaagaaggcgttgtaaaaataataagtattggtttgttacggtagtttacgtttgtaattttagcgatttgggaggttaatgtgggtagattatttgagtttaagagtttaagattaatttgggtaatacggtgaaattttgtttttataaaaaaaaaaaatttattgggtatggtggtgaatatttatggttttagttatttaggaggttgaggtgggaagattatttgaaatcgggaggtcgaggttgtagtgagttgtgattgtgttatcgcgttttagtttgggtaatagagtgagattttattttaaaaaaaaaaaaaaaaaaaaaggaaaaaattaaaataaaaagtttaatacgtttgatgtagtatttattgtattttttttttataatttttttgtggtattagtattaggattttaatgttattgatatgaaataggtagaaaaaggagggatttatcggaagttattatggttggtttgtgatagagggggatttaagtttagttttttttgattttaaagtcgttttattttataggattttttaaagtttgtcgtgtatgttattggtagaaaataagaaaatttttagtgatatgtggatgaaaaagttaaatttaattagttttgaatttatttgaattttatattgaatgagtgtttattggaataaataaataaatcgtatattaaattagtgattttatggttattattttttataaggtagagaaatttttaagaagtgagttggtttagagtgaattaaataaaaagattaaataaatattggtaaaggcgtatatggatattgttaaatagttgatggtgggtaaagagtgaagggggtaggttgtttcggttgatgttgtatttgtgttagttaggttattgcgagataattaggtttgttttttagggaaagagttgattttgggagtattggggagggagttttgtgtgttttttattgaattatattgtttaggggttttttcgtggattatagatgtttttttttgtatgaaatattaacggttttaagtttttggaagttcgagggatgtgaaaataggaggagggaatagtagagttttttatagttgtttgtttgatttgtgagtaattttgtagaaggttttttcgtgtatttttttttttttttggtttatatcggatatattgtttttaattttgagttttggggaaaaatgttttatatttaaaaaatataaatattgattttttttttttaatgtatatgttgaatttttagattttttttttattatcgtttttaggttttgtttttgttatagaatgttaaagttgtttttttttttttttggtggtgttcggggggggatttatttttgtttttgaaaagttatttgtagtgtatttttgtagttttgttaatgagcggagaagtgatatagagaaggcgtttgtgttttttcgaggagtttatagaattgttatttagaggtggagttgaaagggttgttttatgggttagttgttgtttagttaacggagttttgtgttttgagtttcggatatagttttggtcgttaggggggttggggtggggggagtagttggtgaggagattttagtttacgtttttttcgtttatttttagtatggtacgaggatagtattgcgttttttatcgttggttatcgtggatggtttttgtgtgattttgggtggtttatagggaaatggaataggttcgtagttagtttttatttatttttttatttgtttattagagattttgtgttaggtattatgttgggttttagggatttagtggtgattgagacgggtaagttttttgttcggagggagtttacgtttttggggagataggtaatattttaattatattattttgggaagggagaggtattattattattatattttgtagtatttttggagaagaattcgattttaaagttgtagtagaaaaaggaattagtagttttaagtggtttttggaattggggagggtagtgaattaggtatatatgaaatataaggggaaaaagttagaaggtaatgtttttaattttttttttttttaatattggtgtaaaggggagtgaggtttgagttttaggtttggttttgtttttaaattggttggtggtttcgggtaagttagtgaatttttttgggttttagtttttttatttgataaatgggttaagagatttaaatttgttgattttataggtttgttgggtgagtaaatgagatagagtgatagaatgagtaattgttatgttaagggtggaagggattgttataattattgttaaagagtgtggtagcggtgagttgggtttgttgtatttagtagtcgttttttgtttgtatatttttttttattgaggtataatttatatagagtgaagtgtataggttttaagttttaggattttgttttttggagtaatgataattttttaattttatttttatttttgttttttttttgttttttatatggggtaggtagattaagaacgattatttttattgtattatggtaagttgaggtttagagaggttaagttattagttttaggttatatagttagttaggagtagaagtggttttgaatttggattttttaggtagttaagtttatgttttttttgttttattttatgaattatttgatttaaatgtaaagaaggggatcgtttttgttgatgttattttgtttagaaggttttatttttgttttttttgtgttgggtttgatgtagagttgaatttattggttgataggtgaggtgggttaagtagggatttatagggggaagagatgggtagggagaagttatttatattaagttatattgagataatagtatggttgagagtcgggtttggggttttattttggtaataatattttttagttgtgtaattttagataagttattttatttttttgttttttaatagtagttgttttaaaaagttgttaagaggattaattgagaaattttatttaatttttttgttttttgaattaattttaggaggcgttattattatttttagtttttagatgagtaatttgagatatgagaggtgaagttatttgtttatggttatataggtggtttgttggtatagtaaatttaggtaatttggtttttaagtttgtgtttttaattatggtttttattgttttgtttatattaatagtgaaggtacgtgttagttttaattatgattttgaaagattttataaggtagagagttagtgagaggaaaggattttgggtagatggttttgtatgtgtgatggtttggaggttttcgaggagaatttaggggtagttggagagtagggcgtgtgcggagagtagggtatagtgaggttggggaaggggaagtgaatttaatgagaaatttggggttgtgagtgggggaaggatttgggtgtgggatgaaggtgtaggatagggttgggtcgggttattggatttaggtatgtttaggtttggggtggagttttaaggtagcgcgggttttagtttttggaagagttattttttatttatttgagattttttaaattttagttgtcgttttagttgtttttgtaagtaaaggagtttttgtggttagaggggtttttgaagtttgggttaggttttttcgtttttttagggtatatatatttttatttagtttaagtttcgttttttgggggggttgggggttagggcgggttgtttttacgttagtcgttagttgggggttatttgatttaaaggttgggcgggtagtggggttgataagatttggattttattggttttataatcgtgtcggttgttgttcgtgttgttagaattatgagggttttttttggtattagttttatgttttgtagtttgttgttgttgttttaggttttgtgtagttttggtttcgttttttagtttagaggtgagggggtttgcgtgagatgggggttattgagttagtgggttttgatttttagtattgggggttgggtatcgatatggtagggagtatacgggatttaggatggggaagggagtagggcggtagtggtgggtagtgggttggtgtaggagtagatagggattatggtgtttataagggttagggtaggggtgttttttagtttttagggattatgtatgaggtagggattttggttttttaggtttttggggagtagaagttatttagagagttggttgacgtttggagttgtattaagtttagggttgagtttatggttttttgatgatagtagatttgggatgttaagagtttatgttttttttgtaggtttttttagttttgggttttttgggggtaataatattttttagagttttaggtttgggtattgagttttggaatgtttattttttttgtatagatggggaaattgaggttagtgagggtttaagattatatagtgagatagcgttagagtttttaggttattgatttattgttgtacggtgtggttaattttttttttttttttgggttttagtttatttatttgtagttttagcgagtagatagtagggagtttgttgtatggtgatttttaaggttttttgaggaattttgatgtttagagttttagtttagggtattgtgagttattgtgatttgggggttgggacggttttgtacgtttttttttttttttttgggattggttttgtttagtttagatttcgtatgggatggggagggaagggtttttgtagtgagatttttttgattgtaggtttaggttagtgatagtagttttattttttttattggatatgtgagattacggaggtttagaaaggtgtaatgatttgtttagggttttatagagtggttgagttaggatttgaatttaggtttgaatttattttgattttgtatattttttagtatagggtgttgtttttttgggtttttggaggatattgtttttcgggggtgtgttttggtgtgtatttgattaggttgttaaggtggttattaggaatttttgttttttttttttgtttttggtaattcgttagtaggcgttgttaggttgagggaaattggttttattttggtgatttgttttgatgtttagatgaaagaggttatgttgatgggtattgttttggtttttaagtttgtgtttatgtttggagggtttatttttggtgtttttttgtttagttagaagaaatagttgtttttgtttttggtagtaagtttgggttgaaatttaaatgtgtttttaaggtcgtagggttttttgttatttttggaatatttattgtttgtttggtttttttgttggttttttaaaatattttgtaaggagggattgttagtttattgtttagatgaggaaattgaggtttagagaagtgaagtaaatggtttaaggttaggtttggttttttgtgttttttatgggttgagtagggggtttttggtaagttgtttgttggtgtttgtatgttgataaaagggtttagttgtttagttgaagtttgtagtttattgggttcgaggtttcgtatttggatttaagaagtcgtattttgtgtgtttaggtttagtttttgatttgtgtttttgttttttgttttattttttttgttttatttttagg

SEQ ID NO: 1204 - DNA, 6802 bp, Artificial Sequence
  chemically treated genomic DNA (Homo sapiens)
tttgggagtggggtaggaggggtaaggtagagagtagagatataggttagggattgggtttgaatatatagagtgcggttttttagatttaggtgcgaggtttcgggtttagtaggttgtaaattttagttgggtagttgagtttttttattaatatgtagatattagtaagtaatttgttaaaggttttttgtttagtttatggggaatatagagggttaagtttggttttgggttatttgttttatttttttgagttttagtttttttatttgagtagtgagttagtaatttttttttataggatgttttgaggagttagtaggggggttaggtaagtaatgagtattttaggggtggtaaaggattttgcggttttgaaaatatatttaggttttagtttagatttgttgttagaaataagggtagttattttttttagttgggtaggagggtattaaggatgggttttttaggtatgggtataggtttgagagttaaagtagtgtttattaatatggttttttttatttgagtattaaagtaaattattaaagtggaattagttttttttagtttggtagcgtttgttggcgggttgttaaagatagggaaaaggagtaggaatttttggtggttattttggtagtttgattaggtgtatattaagatatattttcgaggagtaatgttttttagagatttaagaaggtagtattttgtgttgggaagtatgtagggttagagtgagtttaggtttgggtttaaattttggtttagttattttgtggggttttgggtagattattgtatttttttgagttttcgtgattttatatgtttagtggagagaataaggttattgttattggtttgggtttgtagttaggaaggttttattataaaggtttttttttttttattttatgcggagtttgaattgagtagagttaattttaaagaggaaaggggaaacgtgtagggtcgttttaatttttaagttatagtaatttatagtgttttagattggggttttggatattagagttttttaggagattttagaaattattatgtagtaggttttttgttgtttattcgttaaggttataaatgggtaaattgagatttaaagagggaaagggaattggttatatcgtatagtagtagattaataatttagaggttttggcgttattttattgtgtggttttaggtttttattgattttagtttttttatttgtataggaagaatgggtattttaggatttagtgtttaaatttgaaattttggggggtgttattgtttttagggagtttaaggttggaaggatttgtaaagggggtatgagtttttggtattttaggtttgttgttattaaagagttatgggtttagttttgggtttggtgtagttttagacgttagttagttttttgagtagtttttgttttttagagatttggaagattaaggtttttgttttatgtatggtttttgagggttgaggagtatttttgttttgatttttataagtattatggtttttgtttgtttttgtattagtttattgtttattattgtcgttttgtttttttttttattttggatttcgtgtgttttttgttatatcggtatttagtttttagtgttgagggttagggtttattagtttagtagtttttattttacgtaagtttttttatttttggattggggggcgaggttagggttgtatagggtttggagtagtagtagtaggttgtagagtatgaggttagtgttagagaggatttttatagttttggtagtacgggtagtagtcggtacggttgtgggattagtggggtttaggttttattaattttattgttcgtttagtttttgggttaggtggtttttaattgacgattgacgtgggggtagttcgttttggtttttagtttttttaaagggcggggtttgggttgaatggaggtgtgtgtgttttgagagggcgggagagtttggtttaggttttagaggtttttttgattataagggtttttttgtttgtagaagtaattagagcggtagttggaatttgggaaattttaggtgggtggggggtggtttttttaggggttggagttcgcgttgttttgaagttttattttaagtttaggtatatttgagtttaatggttcggtttagttttgttttgtatttttattttatatttaaattttttttttatttataattttaagttttttattaaatttatttttttttttttagttttattgtgttttgtttttcgtatacgttttgttttttagttatttttggatttttttcgaaggtttttaggttattatatatgtagggttatttgtttagaattttttttttttattaattttttgttttgtagaattttttaaggttataattagggttaatacgtatttttattgttagtatgggtagggtagtggagattatggttaagagtatagatttgggagttaggttatttgggtttgttatattagtaaattatttgtgtgattatgggtaagtgattttattttttatgttttagattgtttatttggaaattagggatggtaatagcgttttttagggttgatttaaggagtaaaggagttagatgaggttttttagttaatttttttgataattttttaaagtagttattgttaaagaatagagaggtaaaataatttgtttgaagttatatagttaagaagtgttattgttaggatagagttttaggttcggtttttagttatgttgttgttttagtgtagtttgatgtaggtggtttttttttgtttattttttttttttgtgggtttttgtttggtttattttatttgttagttagtggatttaattttgtattaggtttagtatagagaaggtaaagataaagttttttaaataaagtaatattagtaggaacgatttttttttttgtatttgggttaagtagtttatgagatagagtagaaagagtatgggtttggttatttgagagatttaggtttaaagttatttttgtttttaattggttgtgtgatttggagttggtgatttaatttttttgagttttagtttgttatggtgtagtgggaatggtcgtttttgatttgtttgttttatgtgaggggtaagagggggatagaagtggaaatggagttaaaggattgttattgttttaggaggtagaattttaagatttgggatttatgtattttattttgtgtaaattatattttaataaaaggaaatgtatagataaaaagcgattgttgggtgtagtagatttaatttatcgttattatattttttagtaataattataataattttttttatttttgatatggtagttatttattttattattttattttatttgtttatttaataaatttgtgaagttagtagatttgagttttttggtttatttgttagatggagaaattgaggtttagagaggtttattgatttattcgaagttattagttagtttaggggtagagttaagtttaaagtttaggttttatttttttttgtattagtgttagagaaggaggaggttaagagtattgttttttgattttttttttttatattttatgtgtgtttaatttattgttttttttaattttaaaaattatttgaagttgttgatttttttttttgttataattttgaagtcgaatttttttttagagatgttgtaaggtgtgatgatggtggtgtttttttttttttaaaatggtgtaattaaggtgttatttgtttttttaaggacgtgagtttttttcgagtagggggtttgttcgttttagttattattgaatttttgggatttagtatggtgtttggtataggatttttggtgagtaaatgaaggaatgaatgaaaattaattacgaatttgttttatttttttataaattatttagggttatataagggttatttacggtgattagcggtgagaaacgtaatgttgttttcgtgttatgttggaggtgaacgaggagaacgtgagttggggtttttttattaattgttttttttattttaatttttttgacggttagggttgtgttcggggtttagggtataaggtttcgttagttgggtagtagttggtttatgaaatagtttttttagttttatttttgaatggtagttttatgggtttttcggaagaatataggcgttttttttgtgttattttttcgtttattagtagagttgtagaaatatattataggtaattttttaggaatagagatgggttttttttcgaatattattagaaaaaaaaaaaggtagttttggtattttataataggggtaaggtttgggggcggtggtggagaggagatttaaaagtttagtatatatattaaggaaagaaaattaatatttgtgttttttaaatgtgaaatatttttttttaggatttaaaattgagaatagtgtgttcggtatgagttagaaggaaaaaaaaatgtacgaaggggttttttgtaaggttgtttataagttaaataggtagttgtgaagggttttgttgttttttttttttgtttttatatttttcgggtttttagaaatttaaagtcgttagtgttttatgtaagagagagtatttgtgatttacggagaggtttttgggtagtgtggtttagtgggaagtatataggattttttttttagtgtttttaggattagttttttttttaaagagtaaatttggttatttcgtaatgatttagttaatataaatgtaatattagtcggggtagtttgttttttttattttttgtttattattagttgtttggtagtatttatatacgtttttattagtatttatttaatttttttgtttaatttattttaaattaatttattttttaaaaatttttttgttttataagaaataatagttatgaaattattggtttgatgtacggtttatttatttattttaataaatatttatttaatataaaatttaaataaatttaaaattaattaaatttagtttttttatttatatattattgaaaatttttttgttttttgttagtggtatgtacgatagattttgaggaattttgtgaagtgaaacggttttagaattaaagagagttgggtttgagtttttttttgttataggttagttatggtgattttcggtaaattttttttttttttgtttgttttatgttagtagtattggaattttaatgttaatgttataggaaggttgtaaggaagaaatgtagtgaatgttatattaagcgtattgggttttttgttttagtttttttttttttttttttttttttttttaggatggggttttattttgttatttaggttggagcgcggtggtataattatagtttattgtagtttcgatttttcggttttaggtgatttttttattttagttttttgagtagttggggttataggtgtttattattatgtttagtgaattttttttttttgtagagatagggttttatcgtgttgtttaggttagttttgaatttttgagtttaagtgatttgtttatattggttttttaaatcgttgagattataggcgtgagttatcgtgataggttaatgtttattatttttataacgtttttttttattagttaggttaggataggttatgttgtaatagtaaatatgttttttaaattataatggtttaatatagggtttgttttttttttttagtatcgtttagtgttaggtgggtgttttttatataggttttttttaaagttgtttttattatttttaagtttttgtttttggttatgtggataagagagagatagtaagtattttttttaattgttttagagaaggagtatatattatttgattttatttggatgtttagggttaggatatggtatttagttagtagtgatagtttttgttattattgtcggggggaaagtttttgttagtattggattatttttagatggaaatttagatttggttggtatttaaagttttttattgttagtttttttttattttttaggttattgttagttttttttttttttttttttttttttttttttttttttttttttttttttttagttttttttttttttttttttttttttttttttattattttttttttttttttagtattgaatgagttatttttttgtttttagagttttttagatagattttagtttttttattagttttttattagagtttgtatttaatgtatggtgatttattttatttgtagggaaatgtgaaattttgaagtttagattttgaaggaaatttaaaggttatttatatttggttatttatgttatttatttggttgttaaaaatataaggtttatttttgttacgtgttttttcggggttagagggttagtttttattttaggagcgattgcgagagttttttacggggaatggtttttgtaattaattatattggaagaagaaatgagtatttggaggagcgggtttaggtttagtattgggaattttagttggtttagttaatgttttaatttatggttttttagtttattgtgggtttagtttatttatagttgtaggtagtttttagggacgtaagtagtgggttaggtagtttggggatttaatatttttaggtataattcgtaatttgtagggattagaagattttaacgtttttattttttattgaatagttttgagatacgt

SEQ ID NO: 1205 - DNA, 11334 bp, Artificial Sequence
  chemically treated genomic DNA (Homo sapiens)
  unsure 4649: n is a or g or c or t
gtttttaattttattttatttgtaagttatttttatatagttaagaatttggtattaaaaataggtataggttttaaaatataagagtttagatttagtttttatgttttttgtttatttatagaaatattgattgattgattgattgagatagggttttattttgtcgtttaggttggagtgtagtgttacgattatggtttattgtagttttaatggtttgagttgaagtagtttttttattttagtttttcgagtagttgggattataggtgtgtgttattatatttggttaatttttaaaaaattttttataaagatggagttttattatgttgtttaggttggttttgaattttcgggtttaagcgttttttttattttttaaagtgttgggattataggtatgagttattatatttagtttagaaatatttatttaataaaataaatattaatgggtagtattaattcgtaatttgtattattttaatttttgtggtaattaaaaaatagagatggtaatataatttgtaggttattgaatatatttattttttataattatttgttttttttaggtgggtaaattgtaaaaaatataggtaaagagttttatattttttggaaaagatttttattttgggattgagatagttttgaatataaaagaaaataaatttttttttttaagtatatggtttgttatttattagatttaagaagttttgggatattttttgataatattttttttaatgtatttatggaattaaaggattttttaatttgtttgggggtagattttttggtttaaagttggaaatatatgtttttttttaatagaatagtggatgtttgtatacgtattttttaatgtttatatttataagtttatgtatatttaagatattggtaatagtggtgttattggtaagggtggttgggatagtttttttttattatatatttgtagtatatgttataggttagttgttaatttttattttaatgtatgtttttttttgttttttttattgtggattaaaaaagttaagaatttattttttaagatttttttgtggttaggtgtggttatgagatgttagtagtaaatattttttggttttttgttttttggtttttggttttttttttttttttattttggaatgttaatatgatatttggagttttagtagttttgggaataaaatttatatattaagggtagtaaagtaggagataagtggttttttaagtagtttgtaagttttattttattgttgaaattttagttgtgagaaaaataatttttttaatatgttgaatttattgtttgtaagaagtaatgtaaagttgaaagtaattttaatatttggtcggttttttttttttttttaaagtttagattaagtgtatgtattatttattttaaaaataataaaattttaaaaataatgtaaagtgtatatataaatttttgttgtattttttagatttttgaatagtttaaaaaatttttgtttggtttttttatgatttaagtttttaggttattaaaaagttattttagtttttattttgataaagtagtataagataatatgtagtggtagagaaatatagtttttgtaatatttttaagtaaatatttgaaagtaaagttattatttggtttagtagttagttgagttggtgatatgtaagaaggttttatagttatttgaatttttttgttagaagagttatttttgttttatttgataatttttggatattagatgtaagataatcgttttggagtgtgaattttggagatataaatttattagataatttttattttatttaagatggtatgatttttatatattagtatttgaaattgtttgagatattgataacgaatgtgtagggatatttattagggagttgagatttttattttgagttttttaaaatagtgttttttagtggtatgtaatagaaaaaaaaaattataagattaatatatttatattgttggtgtaaatagaatttatttttgttagaatgagttgaaaaagaggttaagtatggtggtttatatgtataattttagtattttggtaagttgaggtgggaggattatttgagtttaggagtttaagattagtttgggtaatataattagattttgtttttataaagaataaaaaaaaattagttgggcgtggtggtgtatatttgtggttttagtaattcgggaggttgaggtaggaggattgtttgaatttggaggattgtttgagtttagaaagttgaggttgtagtgagttttgatgatattattgtattttagtttgggtgatagaatgagattttgtttataataataataataaagaaatagaaaaagtatatattaagggtattatttgttttattattagtttaaagtataaatggaaaagttaattattttttaagaaatattattttttagttgaagtggaattttaaatgttataattaatatgtgttgattatgaatgtgaatagtgtttttgtgaatttgtgtaatgtatatttatattatttatatgtagttttggatattaagtggtttaaataatttttggaaaggtttaagaattaagtttggaagttatatagttattaattatttttaaaattatattgtaggtttgttatatgggagatttagagttattgttgtttggtatagatattatatatgatcgatgaagattgggttatttatgtatattttagttgtaagagatgttggggaagtaagtttttggagttaatttggggaggtgttgatttatgaagttggaaatttttaaatttaggaaggtatttgtgatggtgaattttaatgtgttattttgattgggttaatggatgtttagatagttattaaatattatttttgggtgtgtttgtgaggatgtttttggaagagattagtatttgaatcggtagattgagtaaagaagattatttttatttatgtgagtggagtgggtattatttaatttgttgagggtttgaatggagtaaaaagatagtggaaggtaaatgtgttttttgttggagttgggttaattagttttttttgtttttggatattagtatttttggtttttgggtttttggatttagattgggttttatgttattggtttttttgtttttgggtttttaggtttggattggattatattattggtttttttgggtttttagtttgtagatagtagattgtgggattttttagtttttataatcgtatgaattaattttttataattttaattattttttttattttttttttatatgtatgtgtatataaaatataatggttttgttttttttaagaattttgattaatgtagggtttaaaggttttggggattattttaaaagtaagacgaaagagaaatgtttattagagtttgtaaaaattgtatttattaattttttttttttttggtattgttttttttaaattttttagtgttttttttttattattataaatttttcgttttttttaaggttttttttatttggtgagtttttagagggagttgagtgatttttttttttagtgtgattattattgtttaatgttattgatatattatataattttttatttttattttttttgagtttttgttaattattattttttttgattttatgaatttgattattttagattttttatgtaaatggaattatatagtatttgtttttttgtgattagtttattttatttaatataatatttttaaggtttatttattttgtagtatttgttaaaatttttttttttttaaggttgaatagtattttattgtacgtagatattgtattttgtttttttatttatataaagagagatatttgggttgttttcgttttttggttattgtgtataatgttgttattagtatggggtataaatatgagaagtgaggtttaggatcgtgtgaggaggattatttgtagagggaaaatagtgaaataggacgattagataggttttgttggaattcgcgtttattgttttaagacgtagtttaaatgttatttggttttagaagtttttttggttttcgtaggtagttagtattttttttttaaatttattatattttcgtagatagatattatatttatgtaaattttttttttatagatagtgagttttatgggggttttttggtagtttttagttttgtattatgttaattttttcggagagttaatggggtttcgggagagtttttgaagtttgtgttggtataggttgtttttttagttaacggggttttttggggaatgtatgtttgattttttattttcggtaatataagtttaaatgtttgtggatatttgaagttcggatgaaagcgtttttatttatgtttttagaatttgtgaggttttttttttttttttttttttttaaataagagtttatagtaaaatttgggttatttggttgaggaaaggaatgtagagttaggagtagggttttatttttagttttagtcgggtaaattagtggtagaagggaaagtagagtttaggggtttttatttcgtatttggggcgtaggcgtnttggggtgtggagggagagtggagggtcgggtagttgttagcgtcggatggttgttttttttgtttcggtgttattgggaggacggaggttgcgatagtagtcgagtttatttagttgtagtcggttcggggtttagggtaggggcgggaggtgattaatcgcgtcgttggtcgtttcgtttagatatttcgtttttgtcgttggaatgcgcggataaggttttttgttggttttgggcggggtatcgcgggtcggtttggcgttcgaagcgtcggggcgggcgggttcgaggtcgcgggatttttaaattcgagtttcgcgtggtttttggttttcgacggatattattaggtttacggagtttattatgtcggttcggttttcgcgcgtcgtttttcgggattttttttgttgttttggtcgttgttgttgttgtttttcgtcgttttcgatttcgtggttcgttcgggttttcggaggttggagattcgaggtttcgggggtagttttggacgtcgttttttttttgcggttttcgacggcgcgttcgttttcgggattagcgagtttggtcgcgttcgcggtgtaggtataggcgggcggcgggagggacgcgtgagtatcgaacgaggagaagtttagggtatttattaagcgcgttttatttcggttttaggtcgatcgtggtgcgggggaaagaggtttttttcggatgaattttgtgggggaaattgaggtttagagaaggggagggagatgtttaatattatttatgtgtttaggttagagatgtgggttttttgaagtttttatttttttgtgattcggttaggagtatagggtagttggggagcgtaggggttgttgttagcggttgttgttaagtttcgttttagttttgatttttttatttagtgagtaaattttttttgagattttgttgttagtttttttggaatttttttatttttatttaatattagggcgtgattttttttttttttttatagtttttaggttgttttagattggaaggtaagggatgcgggtgtgagattaggaggagattcgaggagtcgtaggatattttaggattaagatattttgggtttttggcgaataattttatttttttttgtggttagtaattgatttttgaagtagagtaaagttatatagtgtagcgaggcgggtaggtcgtttgatatagtttttgatagtatatgaaggaaatttgaggtatattaagttgaagggattttgtgaattagtattagaggttataataaaatttagggtttcgaaattttaagtaaggtttttttttattgttttagtttattaattttttaatatggtttatataagattgtatttttatttttaaaaagcgtagttttagttttgttaaaaagagtttgtgttaggttatttttgggtatgtagttttatttggttagttacgttgtatgttttaggttgattttaattgtttatttttttttgtatttttttggataagttgagaaggagtttaagggatttttttttgatttaaatatttagttttcgtatttgaagtggtagatttgaaatggtaaaagtattgttgttaaggtaggaggtatcggggtttatagggttagatttagttggtggttggttgttttaggtcgggaattgagggaaagttttttttttggaagttaattttattttagttttgatttgtttttttttgggatgggattggaagaggaaggagagatttagtattaggtggttatgtttttttaagttttattggttttttattatttagagttcgaatttgattatgaatgataatttattaataaatgcgagattttattttgttttaaattatttttttttagtaattagaaattgttaagtttcgttatggatttttatttttagtaggattgtaaggatttagtggtattatgagtatgggaatattttaggagatttagattttttttttgtttttgggaattaaattgttgttatttagtaaatgggagtgagatttaaaaataattaatgattgatgcggagtattagttaggaaggaattagatgtttatagaattttttgttattatggttaagttttaggtattagttttttatggttattgtaataaattattgtgaatttagtgttttaagataatatatatttattatttgagagttttgtgggttagaagtttgattttggttttattgggttaagatgaaggtgtcggtagggttgtgttttttttgggaggttttaggggagattgtattttttttttttttttatcgtatgaaggttgttgagttttttggtttatggttttttttttttatttttagagttagttaaagtaggttgaggtttttttttattgagttatttatattttttttatttgttttttttttttattttataattatattgatttattgaataatttaggataattttttgtgtagagttttttgatttaattatatttgtaaagtttttgttttttgttacgtaaaagtaatatgtttttggaattaggacgtggacgtttttggcgggggatattattttgtatattatatttcgaatagaggattcggtgtgaataattaagtggagaaggaaagaattatgtacgtttagttataagaatatagttatgatatttataaggatattatttgggtgttggtgaaagtattgttaattatagagtttatatttttatgttatttttattttttttttttttaattatataaaaatattttgatttatttttaggaaagatttttaatataatttttttttttagttttagatttatgggattttttaggaatgaagtaaaattttggaggtttttttttttttttttttagtatttgaagagatttattttgagataaatatgagtgattatggtttgtgatatagtttttaagaggttttgagtatatgtgtttaagatggttagggtgtagtttgtttttatataatttaaggaggtatgagatattaattaaatatatttaagaaatatattggtttggttttaaaaggtgggataatttaaagtcggtggtggtgaggggtttttaggttataggtaagtttaaatattttttggttgataattggttgtatttgtttaaagatttgggatttatagaaaggaaatgtttaggttaagataaaagattgtaaagattaatgtttttttgaagttttatagtggttatttttagagataatagatgataaatgttttttatttagatttttttaaaaaattattattattttattttaagttttgggatatatgtgtagaatgtgtaggtttgttatatagggatatatgtgcgttggtggtttgttgtatttattaatttattatttaggttttaagttttatatagattaggtatttgttttaatgttttttttttttttgttttttattttttgataggcgttggtgtgtgatgtttttttttttatgtttatgagtttttattgtttaatttttatttatgagtgagaatatgtggtgtttggttttttgtttttgtgttagtttgttgagaatgacggtttttagttttatttatgtttttgtaaagggtacggatttatttttttttatggtcgttggagttgttttttttttttttaaagaaagaaagaattttgattttttttttttttttttggtttttagcgattgggttttattttattatttaggttggagtgtagtggtgtgattgtggtttattgtagttttgattttttagttttaagcgatttttttgttttagttttttaagtagttgggattataggtgtttgttattatgtttggttaatttttaaattttttatagagatgaggtttttttatgttgtttaggttggtttagaatttcggagtttaagtgattttttttttttagtttttcgaagtgttgggattataggcgtgagttattgcgtttgggtttaattttttttgatttaattaaatgtatgatatatagtatattttagggcggtgatttaaagttaataagtaggatgtttattgaatatatgagagaatgttgatttttgtggaggaaaatgttgttttagagagaggtaattgggatttagtagtaagtttttagggattgggagttaggaaatttggagtttaatttatgttttattattttttagtttttatatttttttgaattttaggttttttatttgtaaaatgaatataaaaattatttttgtatttttagttttataggttgatgtgttggtattttgcgatttttaaagtgttattgaaaggaagattttttttttgttaattaaatatttttaagtagtaggttaaaaataagaagataattttttgtttttaaaagaaaattagatagagatataaggtaggttgttttaggtaaggttttaatttttttttataaattgtttagtttaggtattaattttgaattattttttttttttattaagtattatttttttagagtagtattaatttttgtttttttattaggaaaggaaagagttttgagtgatattttatgttttaggattttatttttatttagggttgtatgcgtgtgttgggtgagaagggggaatgatttgaaaaagaagtttagggttgggtatagtggtttatatttataattttagtattttgggaggttaaggtgggaggattatttgaggttgggagtttgagtttagtttggttaatatagtgaaatttcgtttttatgaaaaatataaaaattagttgggtgtggtggcgtatatttgtagttttagttatttaggaggttgaggtaggagaattgtttgaatttaggaggtggtggttgtagtgagttaagattgtattatcgtattttagtttgggtgatagaatgagatttcgttttaaaaaaaagaaaaagaagtttaataattggtttttttttttgttttattttgatttgtggatttgatttttgtatcgaggagagagggtgtgtaaataggggttgggggaaataggaaagaataggaaagaatagatgaatattaaaatgtattgtgatattaaattgttaggtatttttgtgtagaaaagagataaattttttgaaggtgggaaatttggttatttggtttatatgtttttgtagttttagggttttatatatgtaggtttttaaaaaatgtttttggtgaatgaataagttaaaagagagatgattaagagagttagttggggtagtagggtagatattagattataatttttgttttttacgagatatgtttatgaagttggaagtttattaaatagatataagattaagttggtattttttattttattttttttttgagatgatgttttgtttttattgtttaggttggagtgtaatggtaggattttagtttattgtaatttttatttttcgggtttaagcgatttttttgttttagtttttcgagtagttgggattataggtatatgttattacgattcgttaatttttgtatttttagtagagatagggttttattaagttggttaggttggttttaaatttttgattttaggtgattttttcgtttcggttttttatagtgttgggattattaggcgtgagttatcgcgttcgggtttttttttttatttatttttttttttgttttgttttttgagacggagtttcgttttgttgtttaggttggagtgtagtggcgtaattttagtttattgtaagttttgttttttaggtttacgttatttttttgttttagtttttcgagtagttgggaatataggtatttattattacgttcggttaattttttgtatttttagtagagacggggttttatcgtgatggttttgattttttgattttttgatttgttcgttttggttttttaaagtgttgggattataggtatgagttattacgtttggttttatttttaattagtttagggttttagtgagtttttaaatttattaaataggaaagatggttagatggagggagaatttagggatattttggagtagtttttagttttttggaagtggagtaaaagaggggggttattagaagagtttttgagtgttttgttttagattattattgtttgaggtttgggtatagtggttggtagtgaggttgtttttgagggtttaaggttttttatatggtttagggatatattgtttaattgttttagatagttaaggtatttaagaaatgtgtagaatttattaatttttaggaattatgagggtttttgggagtaaaagtttaagtagagggatgaggttttaagtgaaattttaggatttagttagtttgtaggtgaggtatttggggaaattttatatttttaggtgaatttttattagggaattttgaagtttttggtgtttttaatatttcgatggttttggggaaggtcgtaggtagtggtgatgttggggttaggagatgttgttttgtttggttttttggaattttagagttttttggaagtgaggattattgtatttttaattgtggtttgattattgtttggttttttgtagg

SEQ ID NO: 1206 - DNA, 11334 bp, Artificial Sequence
  chemically treated genomic DNA (Homo sapiens)
  unsure 6686: n is a or g or c or t
tttgtaaaagattaagtaatgattagattataattagaaatgtagtaatttttatttttagagaattttgggattttaggaggttaggtaaggtagtattttttgattttaatattattattgtttgcgattttttttaagattatcggggtgttgaaagtattaaggattttagaattttttagtgagaatttatttggaggtgtgaagtttttttaaatattttatttgtaggttggttgaattttgaaattttatttagaattttatttttttgtttaagtttttgtttttaagggtttttatgatttttgggaattaatagattttatatattttttaagtattttggttatttggagtaattggataatgtgtttttgaattatgtaaaaggttttgggtttttagggatagttttattgttaattattgtgtttaagttttaggtaatggtagtttgaggtaaggtatttaggggtttttttggtggttttttttttttattttatttttaaggggttgaaaattgttttagagtatttttgaattttttttttatttggttattttttttgtttagtgaatttgggggtttattggagttttgaattaattaaaagtagagttaggcgtggtggtttatgtttgtaattttagtattttgggaggttaaggcgggtaaattaagaggttaggagattaagattattacggtgaaatttcgtttttattaaaaatataaaaaattagtcgggcgtggtagtgggtgtttgtatttttagttattcgggagattgaggtaggagaatggcgtgaatttgggaggtagagtttgtagtgagttgagattacgttattgtattttagtttgggtaatagagcgagatttcgttttaaaaaataaaataaaaaaaaaagtaagtagaaagaggggttcgggcgcggtggtttacgtttggtaattttaatattgtgggaggtcgaggcgggaggattatttgaggttaggagtttgagattagtttggttaatttggtgaaattttgtttttattaaaaatataaaaattagcgggtcgtagtggtatgtgtttgtaattttagttattcgggaggttgaggtaggagaatcgtttaaattcgggaggtggaggttgtagtgagttgagattttgttattgtattttagtttgggtaataagagtaagatattattttaaaaaaaaagtagaatgagggatgttaatttaattttgtatttgtttagtgagtttttagttttatgagtatgtttcgtaagaagtagggattgtgatttggtatttattttattgttttaattaatttttttggttattttttttttgatttatttatttattaaaaatattttttgagggtttatatgtatgaagttttggagttataaaagtatataaattagatagttagattttttatttttaaagaatttattttttttttatataaaagtatttaatagtttagtattatagtatattttagtgtttatttatttttttttgtttttttttgttttttttaatttttgtttgtatatttttttttttcgatataaaaattaaatttataagttaggatgagataagaaaaaaagttaattattaaattttttttttttttttttgagacggagttttattttgttatttaggttggagtgcggtggtgtaattttggtttattgtaattattattttttgggtttaagtagtttttttgttttagttttttgagtagttgggattataggtgtgcgttattatatttagttaatttttgtattttttatagagacggggttttattatgttggttaggttgggtttaaatttttaattttaggtgatttttttattttggttttttagagtgttgggattataggtgtgagttattgtgtttagttttaaattttttttttaagttattttttttttttatttaatatacgtatgtagttttaaatggaaatgaggttttggggtatgaagtgttatttaaggttttttttttttttaataaggaggtagaagttgatgttattttaggaaggtaatatttagtaggaaaaaaaggtgatttaaaattaatgtttagattaagtagtttatagaaaaaaattaaagttttatttggaatagtttattttatgtttttgtttagtttttttttaaaagtagaaaattatttttttgtttttagtttgttgtttggaggtatttaattaataaaaagaaaattttttttttagtaatattttaggaatcgtaaggtattaatatattaatttgtgaggttggaggtgtagaggtggtttttatatttattttataggtgagaaatttgaggtttaaggaggtgtgagaattagaaagtggtagagtatggattggattttaggttttttgatttttagtttttgggagtttgttattgaattttagttatttttttttgaggtaatatttttttttataaaaattaatatttttttatgtatttagtaaatattttgtttgttgattttaagttatcgttttgaaatatgttgtatgttatgtatttagttaagttaaaaggaattaaatttaggcgtagtggtttacgtttgtaattttaatatttcgagaggttgagggagaaggattatttgagtttcggagttttagattagtttgggtaatatagggagattttatttttataaaaagtttaaaaattagttaggtatggtggtaggtatttgtagttttagttgtttagggggttgaggtaggaggatcgtttaaagttagagagttaaggttgtagtgagttataattatattattgtattttagtttggatgatagaatgagatttagtcgttaaaagttaaaaaaaaaaaaaaggaattaaaattttttttttttttaaaaaaaaaaaaaataattttagcggttataaaaaagaatgagttcgtgttttttgtagggatatggatgaagttggaagtcgttatttttagtaaattgatataggaatagaaaattagatattatatgtttttatttataagtgggagttgaataatgagaatttatggatatagggaggggaatattatatattagcgtttgttagggggtggggggtaagaggagggagagtattaggataaatatttaatttatgtggggtttaaaatttagatgatgggttgatgggtgtagtaaattattagcgtatatgtatttttatgtaataaatttgtatattttgtatatgtattttagaatttaaagtaaaataataataattttttaaaaagatttgaataggaaatatttgttatttattgtttttaagggtagttattataagattttaaaagaatattggtttttatagttttttattttaatttgaatattttttttttatggattttaggtttttaggtaaatgtaattaattattaattagaaaatatttaaatttatttatagtttggaagttttttattattatcggttttgagttgttttattttttaggattaaattaatgtattttttaaatgtatttgattgatgttttatatttttttaaattgtataaaaataagttgtattttgattattttgagtatatgtatttaggattttttgagggttgtgttatagattatggttatttatgtttgttttagaataaatttttttaaatattaaaaaaaaaaaaaaaaaaatttttagaattttattttatttttggaaagttttatagatttagagttaggaagaagaattatgttgaaaattttttttggagatgggttaaagtatttttgtataattagaaaaagaaaaggtgggggtaatatgaagatatgaattttgtaattgatagtgtttttattagtatttaaatggtgtttttataaatattatggttatgtttttataattaaacgtgtatgattttttttttttttatttggttatttatatcgaattttttattcggggtgtggtatgtagaataatgtttttcgttaaagacgtttacgttttaattttagagatatgttatttttacgtggtaaagagtagagattttgtaggtgtgattaagttaaagagttttatataagaggttattttggattatttagtgagttaatgtaattataaagtagaagagggaggtagatgaaagaaatgtgagtaatttaatgggagaaggttttaatttgttttagttggttttgaaaatggaagaaaaaggttataagttaaggaatttagtagtttttatgcggtggaaagggaagggaaatgtagttttttttagagttttttaaaaggaatatagttttgtcgatatttttattttagtttagtgagattagggttagatttttgatttatagaatttttaggtaataaatgtgtgttgttttaaggtattaaatttatagtaatttgttatagtggttatagaaaattaatatttgaggtttgattatggtggtagaaaattttgtgaatatttggtttttttttgattggtatttcgtattaattattagttgtttttgaattttatttttatttattaaatagtagtaatttgatttttaagaataaagaaagaatttgaattttttaaaatgtttttatatttataatattattgagtttttatagttttgttagaaataaaaatttatagcgaagtttagtaatttttggttgttaaaaggagataatttggaatagggtggaatttcgtatttattaatgggttattatttatgattaggttcggattttaggtaatgaaagattagtaaagtttagggggatatggttatttggtgttgaatttttttttttttttttagttttattttagagggaggtaggttaggattagagtaagattaatttttagaagaaaggtttttttttaattttcggtttggagtaattagttattagttgaatttagttttgtggatttcggtattttttgttttagtagtaatgtttttgttattttaaatttgttattttaaatacggggattgagtatttgagttaggaaagagttttttgagtttttttttagtttatttagaaagatgtagaaggggatagataattgaaattagtttgaggtatgtagcgtggttggttaaatgagattgtatatttagaaatggtttggtatagattttttttagtaagattgaagttgcgttttttggaaatgaagatataattttatgtaaattatattaagaggttggtaggttggggtagtggaaagagattttgtttgggatttcggagttttgaattttattgtggtttttgatattgatttatagagtttttttaatttgatatgttttagattttttttatgtgttgttaggggttgtgttagacgatttgttcgtttcgttgtattatgtagttttgttttgttttaggaattaattgttgattataaagagaaatagaattgttcgttaaagatttagagtgttttgattttggggtattttacggtttttcggatttttttttggttttatattcgtattttttattttttagtttgaggtagtttgaggattgtgggaggggaggaaagattacgttttgatattggatggagatggagagattttaagagaattaatagtagagttttaggaagggtttgtttattgaatggagaggttaggattgggacggagtttagtagtagtcgttggtagtagtttttgcgttttttagttgttttgtgtttttggtcgaattataggggagtgagagttttaggagatttatatttttagtttggatatatgagtgatattgggtatttttttttttttttttggattttagttttttttataggatttattcgggaggggtttttttttttcgtattacggtcggtttgaggtcgggatgaagcgcgtttggtggatgttttgggttttttttcgttcgatgtttacgcgtttttttcgtcgttcgtttgtatttgtatcgcgggcgcggttaggttcgttggtttcggaagcgggcgcgtcgtcgggagtcgtaggagaggggcggcgtttagggttgttttcgggatttcgggtttttagttttcggaagttcgggcgggttacggggtcgggggcggcggagggtagtagtagtagcggttagagtagtaggaggagtttcgggaggcggcgcgcgggggtcgggtcggtatggtgggtttcgtgggtttggtggtgttcgtcgggggttaggagttacgcgaggttcggatttaaaggtttcgcggtttcgggttcgttcgtttcggcgtttcgagcgttaggtcggttcgcgatatttcgtttaaggttaataaggagttttgttcgcgtattttagcggtagaaacggaatgtttgggcgaggcggttagcggcgcggttggttatttttcgtttttgttttaagtttcgagtcggttgtaattgggtgggttcggttgttgtcgtaattttcgtttttttagtaatatcggggtagggggggtagttattcgacgttgatagttgttcggttttttattttttttttatattttagngcgtttgcgttttaggtacgggatggggatttttgggttttgtttttttttttgttattggtttgttcgattggggttgaagatgaaattttgtttttagttttatatttttttttttagttaagtaatttaagttttgttgtgggtttttgtttaaaaaaaaaaaaagaaagaaaaggttttatagattttaggggtatgaatagaaacgtttttattcgagttttaaatatttataaatatttgaatttatattatcgggaatagaaagttaaatatatattttttagagagtttcgttagttggaaggatagtttgtattaatataggttttaaaggttttttcgaggttttattgatttttcggaagagttagtatggtatagggttggaggttgttaggggatttttatggaatttattgtttgtgagaaggagatttgtataaatgtggtgtttgtttacgggaatgtggtggatttaggaaagagatattgattgtttgcggagattaggaagatttttaaaattaggtgatatttgagttgcgttttaaaataatgggcgcgagttttaatagagtttatttggtcgttttattttattattttttttttataagtgattttttttatacgattttaaattttattttttatatttgtattttatgttggtagtagtattatatataatagttaagaggcggaaataatttaagtgtttttttttgtgtgaatggaaaagtaaaatgtagtatttacgtataatggaatattgtttagttttaaaagggaggaaattttggtagatgttataaaatggatgaattttgagagtattatgttaagtgaaataagttagttataaaaagataaatattgtatgattttatttatatggggaatttagagtagttaaatttatagagttagaaagaatggtggttaataggagtttaggggaagtggggatggggagttgtataatgtattaatgatattgggtagtgatagttatattgagggaaaaggttatttaattttttttgagaatttattaagtgagaaggattttagaagaaacgagaagtttgtaataatgggaagaggatattaagaagtttgaaagaaataatgttaagaagaggagggattgataaatatagtttttgtaagttttggtggatatttttttttcgttttgtttttagaatgatttttagagtttttgaattttgtattagttagggtttttgagagaaataaaattattatgttttatatatatatatatatagagagagggtggggggagtaattgagattatgagggattggtttatgcgattatgaaggttgagaagttttatagtttgttgtttgtaagttgggggtttaggaaagttagtggtgtaatttagtttaagtttgaaggtttaagagtaggagagttaatgatataaggtttaatttgagtttagagatttaagaattaggaatgttgatgtttaaggataggagaagttggttggtttagttttagtagagaatatatttgttttttattgtttttttgttttatttaagtttttaatagattggatgatgtttattttatttatatagatgaaggtgattttttttgtttagtttatcgatttaaatgttaattttttttagaaatatttttatagatatatttagaaataatatttaatagttatttgggtatttattagtttagttaagatgatatattaaaatttattattataaatatttttttaaatttagggatttttaattttatgagttagtatttttttaagttgattttaagaatttgtttttttagtattttttgtagttaggatgtatataagtggtttagtttttatcgattatatgtggtgtttatgttaagtagtagtgattttaggttttttatatagtaaatttgtagtataattttgggaatggttgatgattgtgtggtttttaagtttgatttttgaatttttttagaaattatttgaattatttaatatttagggttatatatggatggtgtaggtgtatattgtataagtttataggggtattatttatatttatagttaatatatattgattataatatttggaattttattttaattggggagtgatgttttttgaggaatggttggtttttttatttgtattttgagttagtagtgggataaataatatttttaatatatattttttttgtttttttattattattattataaatagggttttattttgttatttaggttggagtgtaatggtgttattagagtttattgtaattttaattttttgggtttaagtaattttttaggtttaagtaatttttttgttttagtttttcgagttgttgggattataggtgtgtattattacgtttaattaatttttttttattttttatagagatagggtttaattatgttgtttaggttgattttgaatttttgggtttaagtgatttttttattttagtttgttaaagtgttaggattatatatgtgagttattatgtttagttttttttttagtttattttagtaggaatgggttttgtttgtattaataatgtggatatattaattttgtgattttttttttttattgtatattattggggggtattgttttaaagagtttaaaataaaaattttagttttttggtgaatgtttttatatattcgttgttagtattttagataattttagatgttggtgtatgaaagttatgttattttgaatgaaatagaaattgtttgataagtttgtatttttagagtttatattttagggcggttgttttatatttgatgtttaaagattgttaaataaaataaaggtagtttttttgatagaggaatttaggtggttgtagggtttttttgtatgttattaatttaattggttgttggattaggtggtaattttgtttttaggtgtttatttgggaatattgtaaaagttatatttttttattattgtatattattttatattattttgttaagataaagattagaataattttttgataatttaaagatttaggttataaaaaagttaaatagaggttttttgaattatttaaaaatttaagaaatataataaagatttatatatatattttatattgtttttagaattttattatttttaaaataggtaatatatgtatttggtttaaattttgaaaagaaaaaagaaatcgattaaatgttaggattatttttaattttgtattattttttataagtaataaatttaatatgttgggagaattattttttttataattaggattttagtagtagaataagatttgtaagttatttaaggaattatttgttttttgttttgttgtttttaatgtgtggattttgtttttaaggttgttggaattttaagtattatgttggtattttaggatgaaggaagagggaagattaaaggttaaagagtaaaggattaaaagatatttgttgttgatattttatggttatatttggttataagggggttttgaaaggtaagtttttagtttttttgatttatagtgaagaaggtaaaggaaaatatgtattggaatgggagttgatagttaatttgtggtatatattataggtatatggtgaaaaggaattattttaattatttttgttaataatattattgttgttaatgttttgaatgtgtatagatttgtaggtgtaaatattgaaaaatacgtgtgtagatatttattgttttattgaaagaagatatatgtttttaattttagattaaaaaatttatttttaaataagttgaaaagttttttgattttatggatgtattggagaaaatgttgttaaaagatgttttaagattttttaaatttgataaatgatagattatgtatttggagaaaaaaatttgtttttttttgtgtttaaaattgttttaattttaaggtggaagttttttttagaaagtatagaattttttatttatgttttttgtaatttatttatttgaaaaaaataagtaattatgaaaaatgaatatgtttaatagtttataagttgtattgttatttttgttttttaattgttatagggattaagatagtataaattacggattggtattatttattaatatttattttattaaataaatatttttagattggatgtggtagtttatgtttgtaattttagtattttgggaggtgggaggagcgtttgagttcgggagtttaagattagtttgggtaatatagtgagattttatttttatgaaaaattttttaaaaattagttaggtgtggtggtatatatttatggttttaattattcgggagattgaggtaggaggattgttttagtttaggttattgaggttatagtaagttatgatcgtagtattgtattttagtttgggcgatagagtgagattttgttttaattaattaattagttaatatttttgtgaataagtagaaaatatggaaattaaatttaaatttttgtgttttaaggtttgtgtttatttttaatattaaatttttagttatatgagagtagtttgtaaatgagatgaggttgaaggt

SEQ ID NO: 1207 - DNA, 5815 bp, Artificial Sequence
  chemically treated genomic DNA (Homo sapiens)
  unsure 3143: n is a or g or c or t
tcggggaggaaaatagaggattaaagttataattagtagagaagtagatgttgtttatggttttttgatgtttattattagtttatgttttttaaatatattattttgtttgtttgtttttattggaatgaagtttttttagtaagttgtttgttgggtttgtagagtattaggtgtaattttttagagaagataaaggataattttggttttcgttcgttgattttattgtttgtttattgattttgtttataagtatgtatggagtattgtgaattttattatggtcgggtttaatcgaggttattggagttgttagagtgagagaattgtggttataagataggggtgtgttttatataggataaatggaatgagtagttttttagattgagtaaatagtgtgaataatatattagagtttttgttaggttttagataaagaaggtgaagtaaaagagttaaggatatgagggaggatatgagagtttttgattgttttgagtttgtttatttatttttagtagatatgatttgttttggttttttagtgtaggtttggttttgagtgaaaattagaagtattatttttatggtgtggtgtgggtttattggttagggtggttttaggtagttttgtattagattgggtttttatggagaagtttcgttttgttagggatgtgtatttttgtttaatttatgagatattggaggattttatggtagaagtttttgatgatgtgagagtaaattttattgttttcgtatattagtgggagagggaagagtgtattttgatagtttaggtatttttagtttttttgtttataggtaaaattgtttagttatttaaagaaagttttttttgattaagagataagggatttgttagtagtaatttagtattagtagtagttaaatgtaatgtttttggtaagttttattttagggtggaggaaaaggaagagttagaagtggttgatgatttggatgggtttaagtttatgaggaggaattttatatgtattgtggtaagatataggggaagagtaaatttttattgtttagaattaaaatagttgatgtttgagatagtaagaaagatttagtttttatattaaaaagttattgagttatatgtgtaagaagttaaagtatattttaaattaataggagaaattgaaaaaagatttaagtttattagagttacgtttatgttttttatgaagagttaggttatgttttggtaggaagatagatttaagattaatgaagtagtagtttttttttgaaagaaggatttgagtgagaaattgggattaggagaattaagaaatggagattatatttttaaggaggtaaaaggatttaggaaaagattaaaggatgttgttaggttatatgtttattttaatatttaagagaaagagaaagaattaattttatattagtattgttaaagaaaagaagaaagtttattgagaggttaatataagattatttagaagtttttatggaatgattagattgatatattgaggagagagaaaatgaaatgattaaatgatagtagtttaaaagaagtggagtgtgtggggatgttatttgttaaggtagattttgatttcgagtaataggtagaaagttttgaagttaatgatttgatgagttatgaaataaagagttggagaatttttaagagttattttttgattttatatgatagttggaaggaattatttttttttaggtagtgttagattttgttaattaggtgttaagtttttaatgattggttgagagtttaggaggttgaaggaaattttattattattagataggaagttgcggatttgggataaagaagaagggaaagagttatttagttttagtttttgtatgtggatttttatggatttgattattttagtggagtatgtggttgagattaggatttgtgttttgatttttggttatgaagtgttgtttttttagagatcgtagagtttttggtttatttattttgattttttttttgatgattttttttttatttttttttttttgtttttagtatttttatttttttttttttttttttttttttttaataagatgtttattgagttttaatagggagtttttggtaagaagttatttttttttattattttttttaagaaggtttgttgtatttatgttaggtttttttatttttaaagtagggttttttttttttgtatttattatagtttgtttttttttttggatatttgaatttagaaaatggttgtgttatttttcggttttatttaatttttatgggatttttgttttttaaatttcgaaattatatagtggtttttagttatgagtttttatatttgatttttaaaatgttttttagttttttttttatgtttatatttatggtagagttttttatataagtggtttgttttttgtagaattttgatagttatatagattttaggataaatttagaaaatagagattattggaagttatttttatgatagtatattttagaaaattagaaaaatatgttttttgtaggttttttttttttttttttttgagatagagttttgttttgtcgtttaggttggagtgtagtggtatgattttagttgattgtaattttcgttttttaggtttaagcgatttttttgttttagtttttaaagtagttgggattataggtattttattattatatttggttaatttttgtatttttagtagagatggggtttcgttatgttggttaggttggtttcgaatttttgattttaggtgatttgtttgttttagtattttaaagtgttgggattataggtatgagttattacgtttggttttttaggaggtttttattggatgagttagtttgtttttagatgaatttagagagatagaaagttaaataaaagttattaacggttgatgttacgggtaaatggagaattttaaagtaatgagttgagagatttattttgcgatgatgaaaattattttatgatgcggtgatgatagtataatcgtgtgaatgtatttaatgttattgagttgtgtgtttaataataatggttataaatggtatattttatgtttatttntttataatgaaaaattggaaaagtaaagttaatgattataatattataaagtgtaagtaatatgagagaaaataatttaggttaagaggatagagattgttaggtaggattattttagaataagtgattaaggtattgatttttttgaaattggaatatttgaatagaagagaaagagttagttggcgatgttcgtaaggggtttaggtatggagatattaaatgaagagtttgaggtaggaatggttttaatgtattaatggtagtaagaggtttatgtggttttatggatgggtgtgtgcgtgtatgtacgtgtttgtgtgtatagttggtgtgtatgagtatgtgtatgtatttgtgagtatttttgtttttttgttggaaataaggatgttaataggattaattaggtgaatttagttgtggtagtttagtaatgagatttgttaaaatggatggtaattgaaagaggaattgtgttgtattaaagtagatagttgtcgagtattgtattggaggtttttaaattttttatagttttgagaagagttgtttattaatttggagttgaaggttaggtttaggatatttttgtttataaggttgattgggttttatattgttgagtttagtttttttttttattttgaggtatttgttagagttttaggttagagggttagcgtttttgttattgagtttttgttttgtagaaatattagtaagttatttttggtgaataaatttgggttttcggattaagggtttggggagttgatatgattttggaggtatggaggaggttttttaggggtggggggagtgggatggaaagtagaaattaggttgaggatgtttttttttttgtttgtgttggagtatttgtgatttttttttattatttgtttatttgtagtggagattgtttttgtttttaaagggaaatttggaggtttagatttatggggttaggttgttgaggttttttagggggtaatagttggaagaaagttttgaagaataaatgaaaggttaatattgagaaatgggaggaggatttaaggtaagttttttaattgttagtggtttttgatttatagaatatggggaatttttgttagaaagtagagaggtatttagtattttgttagggttaacgtagtaagaaatttttagagaaaatgtttatttaggtaagtttgtttaaaatattaaggggaagtaaattttagttaattttgggttgggttggtgattaaggttgaggttgatttgaggttgagatttttttttttggattattagtttttagtttagggtttgttaatgagtaaatgatagttaataggttttggaggggaattagttgtttagatataaagatgggatttaggtggtagatggattcgaagaggatatggagagaaagaggaagtttttatagatatttgggtttttatttatttttattttttaagttaataggtataagttagttggtaatgtacggttttatttgtttttattgttatcgaaagtatgtttatagttttttagtagtaacgttaggtgtttaggtatagatgaatttttttttaggatttttattgtttattatagtgtttatttttgttaaagtattagttacgtagtgttataaggaatgtttatttttttaaatttttagttagaggttagggatgggttatttatttttatatagtttgtatttagattgtaggatagagggtatgttcggtaaatatgtgtttattaattgagattaattttttttgagtttttttatattaaggtgaggattatgtttttgtttttattatttttttttttttttttgagtatggtggtagcgttttatttagaaattgtgatttgtgaggatgtttaaaagatttgttttgtagtgattgtttgtagttttttaggtattaacggttttttaggtaaagatgggcgtgatggtattaagggagaaaagggggaattaggtacgtgttgggttgttttgtttttgtaattttttattttttagaggaaattgtttggggatatgaggagattgatgttttatttgagtatattttttttaattatattgtaatttaaaatagagatttagtttttattttttggtattttagaattttatatagtagtttgtgattaatagttgttttgttagtttaggaaagtggtttataggttaggttatttcgtgggatataggatgaattttttttttttgggttattgttatgttagatttttatttattttagtagggatggtattaggtttaagaggttaaagaagagatggagttagtaaataaatataggttttattgggggaatttgtttatagggagatttagtagtagtgggttggataggagaataataattattggtaaaaataaatgtagttaatttttattttgtattttttttgtagtaatttttacgtggtaattttattttttaagttattgtttttaggtgtttattatatagttattgagagtagtgtttagaaaggttagttttgggttaaggtttttttttttttgagaagggattgggtattaaatttttgaagagagagagtaagaatatagatattaagttatattttttttgttttttaatagg

SEQ ID NO: 1208 - DNA, 5815 bp, Artificial Sequence
  chemically treated genomic DNA (Homo sapiens)
  unsure 2673: n is a or g or c or t
tttgttggaagataaaggaaatgtgatttaatatttatgtttttgttttttttttttaagagtttgatgtttaatttttttttaggagaaaggagattttgatttaggattgatttttttgagtattgtttttaataattgtatggtgggtatttgagagtaataatttaagaaataaagttgttacgtggaggttgttgtagggagggtgtaaagtgaaaattaattgtatttgtttttattagtagttgttgtttttttgtttagtttattgttgttggatttttttgtaaatagatttttttagtaaaatttatgtttgtttgttgattttattttttttttggttttttgaatttggtgttatttttattgaagtgaataggggtttgatatgataatgatttagagaagaaaaatttattttgtgttttacgggatggtttgatttgtgggttatttttttgggttggtaagataattattagttataaattgttgtgtggaattttgagatgttagagaatgagagttgaatttttgttttgagttatagtatagttgagaaaaatatatttaaataggatattagtttttttatatttttaggtagttttttttggaaggtaaagaattgtagagatagaatagtttaatacgtatttggttttttttttttttttttggtgttattacgtttatttttgtttgggaagtcgttgatgtttggagagttataggtaattattgtagggtaggttttttgggtatttttataggttatagtttttgagtaagacgttgttattatatttaggagaaggagagggagtgatggaaatagggatatggtttttattttggtgtgagaaaatttagggaaggttaattttagttaatgaatatatatttatcgagtatgttttttgttttataatttgggtgtaggttatatagaaatagatgatttatttttggtttttagttggggatttggaaaagtaaatattttttgtgatattgcgtgattagtattttaataaaggtaggtattatgatgagtagtggggattttaaggaggggtttatttgtgtttagatatttggcgttgttgttggaagattataaatatgttttcggtggtagtgagaataaatgggatcgtgtattgttagttggtttatgtttgttagtttagggaatgagaatgagtggaaatttaggtgtttgtaggagttttttttttttttttatgtttttttcgggtttatttgttatttgaattttatttttgtatttgggtagttgatttttttttaggatttgttaattattatttatttattggtaggttttgagttgaaagttggtgatttaaagaggaaggttttaattttagattaattttaattttagttattaatttagtttagaattaattggagtttgtttttttttggtgttttagataggtttgtttgggtaagtattttttttggaaattttttattacgttggttttggtagagtgttaaatatttttttattttttggtaggaattttttatgttttgtgagttaaaaattattggtaattagaaaatttgttttgaattttttttttattttttagtattaattttttatttgttttttagagtttttttttagttattgttttttaagaaattttagtagtttagttttataggtttaagtttttaagtttttttttgaaaataaagatagtttttattgtagatgaatagataatggaggaaagttatagatgttttagtataagtagaaaaagagatatttttaatttgatttttgttttttattttattttttttatttttagaaagttttttttatgtttttagggttatgttagttttttaaatttttgattcggaaatttagatttatttattagaaatgatttattggtgtttttgtagagtagggatttagtgataaggacgttggttttttagtttggggttttggtagatgttttagagtgagggaggaggttgggtttagtaatgtagggtttaattaattttgtgaataaggatattttgggtttggtttttaattttagattaataaatagttttttttagaattatgagaaatttaggagtttttaatatagtgttcggtagttgtttgttttaatatagtataattttttttttaattgttatttattttggtaaattttattgttgaattattatagttaggtttatttagttagttttgttgatatttttgtttttaatagaaaaataaagatatttataaatgtatatatatgtttatgtatattaattatatatatagatacgtgtatgtacgtatatatttatttatgaaattatatagattttttgttgttattaatgtattaaggttatttttgttttagattttttatttgatgtttttatgtttggattttttacgggtatcgttagttagtttttttttttttatttaaatattttaattttagagaaattagtattttgattatttattttaaaatagttttatttagtagtttttatttttttagtttgaattatttttttttatgttatttatattttatgatattatagttattgattttatttttttagttttttattgtgggnaaatagatatagaatgtattatttgtgattattattattaagtatataatttagtagtattaagtatatttatacggttgtgttattattatcgtattatgggatgatttttattatcgtaaagtgaattttttaatttattattttagaattttttatttattcgtagtattagtcgttggtaatttttgtttgattttttgtttttttgaatttatttaaaagtaggttgatttatttaataaaagttttttggagggttagacgtggtggtttatgtttgtaattttagtattttgggatgttgaggtaggtagattatttgaggttaggagttcgagattagtttgattaatatggcgaaattttatttttattaaaaatataaaaattagttaggtgtggtggtagggtgtttgtaattttaattattttggaggttgaggtaggagaatcgtttgaatttgggaggcggaggttgtagttagttgagattatgttattgtattttagtttgggcgatagagtaagattttgttttaaaaaaaaaaaaaaaaaaaatttataggaaatatatttttttagttttttagagtatattattataagaataatttttaataatttttattttttaaatttattttgaaatttatatgattattaagattttataaaaaataaattatttgtgtaaaagattttattataaatataaatatagagggagaattgaaagatattttaaggattaaatatgaaaatttatgattgaagattattgtgtggtttcggaatttggaggataaaggttttatggaggttgaatgaaatcgagagataatataattattttttaaatttaaatatttaggggaaaaaataggttatggtagatgtaaaagaggagaattttattttgaggatgaagaagtttggtatgggtgtaataagtttttttgaaggaggtagtggaagaagatagttttttgttaggaattttttattaagatttagtaaatattttattgaggaaaaggaaagaggaaagaaaaagtgaaggtattggagatagaggagggggagtgaggagagggttattaagggaagggttagagtggatgggttagagattttgcgatttttgagaaagtagtattttatggttagggattagggtataaattttaattttaattatatgttttattgggatgattaaatttatgaagatttatatgtagaagttggagttgaatggttttttttttttttttttgttttaggttcgtaattttttgtttggtgatgatgaggttttttttaattttttgagtttttagttaattattgggggtttgatatttgattgatagaatttggtattgtttagaaaaaaatggttttttttagttgttatgtgagattaggaaatagtttttgggagttttttaattttttattttatggtttattaggttattggttttagaattttttatttattgttcgaagttaagatttgttttgataagtagtatttttatatattttattttttttaggttgttgttatttaattattttattttttttttttttaatatgttaatttgattattttatggaggtttttagatgattttgtgttgattttttagtgagttttttttttttttttggtaatattgatgtgaaattggtttttttttttttttttgaatgttgaaatgggtatgtgatttgatagtattttttgatttttttttggatttttttgtttttttaagaatatgatttttattttttggtttttttaattttaattttttatttaagttttttttttaggaaaaagttgttgttttattgattttgagtttgtttttttgttaagatatagtttgattttttatagaagatataaacgtggttttggtgagtttgaatttttttttagttttttttgttagtttgaagtgtgttttagttttttgtatatatggtttaatggttttttggtgtagagattggattttttttgttgttttagatattagttgttttagttttgaataatgagggtttattttttttttgtgttttgttataatgtatatgaagtttttttttataggtttgaatttatttaagttattagttatttttgattttttttttttttttattttaggatgaaatttgttaagagtattatatttgattattgttagtgttaaattgttattggtaggttttttgttttttgattaagaaagattttttttgaatgattaaataattttgtttataaataagagaattaggaatatttggattgttaaaatatattttttttttttttattgatatacggggatagtgagatttgtttttatattattaggggtttttgttatgaaattttttagtgttttatgggttggataagagtatatatttttagtagaacgaagtttttttataaaggtttagtttgatgtagagttatttagggttattttggttagtaggtttatattatattatgaaaatgatgtttttggtttttatttagaattaaatttgtattgggaaattagggtaaattatgtttgttgagggtgggtgggtaggtttaaagtaattaagaatttttatatttttttttatatttttggtttttttattttattttttttatttggagtttaataaggattttaatatattatttatattgtttatttagtttggaaagttgtttattttatttgttttatgtggggtatatttttgttttgtgattatagtttttttattttagtagttttagtggtttcggttgggttcggttatgatgaggtttatagtgttttatgtatatttgtggatagaattaatgaataagtaatggaattaacggacgaaggttaaagttattttttgttttttttggaaagttatatttaatgttttgtagatttagtaaatagtttattagaaaaattttattttagtggaagtaaataaatagagtaatgtatttgaaaagtatgaattaatggtgaatattagaaaattatgagtaatatttgtttttttattaattatagttttagttttttgttttttttttcgg

SEQ ID NO: 1209 - DNA, 6971 bp, Artificial Sequence
  chemically treated genomic DNA (Homo sapiens)
  unsure 4231: n is a or g or c or t
aattttttaaagtttttaatgtaggtattacggtgagtttacgagaaattttgtttgttattttttatatttttatttttaagtttaaaggaaatggtttttgaattaagggttgagattagttgtgggtttagttgttttggggagttgtattggagtttattacggtgggattgttggttcggcggtgatttttatttttatgtttgtggtcgtagttggataggttattttttgggttatagagatgttttatttttcgtagttttcgggtatatattgagtaaatgtgtgtgtgtgtgcgtgtgtgggtgggtgcgtatttgtgtgtgtttgtgtgtgtgcgtatgtggtgtgggtgtacgtgtgtgtacgtgtgtgggtaaatattgtgtgtgcgtatacgtgtgtgggtaaatatttgtatgtgtacgcgtgtgtgggtaaacgtgtgtgcgtacgtatgtatgtgtgtatatttgtatgtgtgtatatttgtatgtatgtgtgtttgtgtgtgtgtgtttgtgtgtgtgggtgtatatatgtgtgtgtgtgtgtgttagtgtgtgtgtgtgtacgtatgtatgtgtgtatatttgtatgtatgtgtgtttgtgtgtgtgggtgtatatatgtgtgtgtgtgtttgtgtgtgtgggtgtatatttgtgtgtgtgggtgtatatttgtgtgtgtgtgcgtttgtgtgggtgtatatttgtgtgtgtgtgtgtttgtgtgtgtgtttgtgtgtgtgggtgtttgtgtgtgtggggtatatttgtgtgtgtgtgtgtttgtgtgtgggtgtatatttgtgtgtgtgtttttgtgtgtgtgtttgtgtgtgggggtgtatatttgtgtgtgcgtttgtgtgtgggggtgtatatttgtgtgtgcgtttgtgtgtgtgggtgtatatttgtgtgtgtgtgcgtttgtgtgtgtgggtgtttgtgtgtgtgtggggtatatttgtgtgtgtgtgtgtgtttgtgtgtgggtgtatatttgtgtgtgtgtttgtgtgtgtgtgtttgtgtgtgggggtgtatatttgtgtgtgtgtgtgtttgtgtgtgggggtgtatatttgtgtgtgtgtgtgtttgtgtgtgtgggtgtatatttgtgtgtgtgtgtgtttgtgtgtgtgggtgtatatttgtgtgtgtgtgtttgtgtgtgtgggtgtatatttgtgtgtgtgtgtgtttgtgtgtgtgggtgtatatttgtgtgtgtgtttgtgtgtgggtgtatatttgtgtgtgtgtgtttgtgtgtgtgtgtttgtgtgtgtgggtgtatatttgtgtgtgtgtgtgtttgtgtgtgtgggtgtatatttgtgtgtgtgtgtgtgtttgtgtgtgtgttgtaggttttggatgttagatattgtataaacgtaggaagacgtgtgtttttatttttttcgtgggtcgttggtttagaaatatttggatggaaagtgttttgtaggaacggtgtttttgtttgtggcggggattttggtgagcggatgggttagttttacgtgtttttcggttatttagtatgtagtgtttttaggggtattaagagattaaaatcgagatatgattagttgtaggatgttatttaattatagattatttcgaggttaatttattttttttatgattataatatattaaaaagttgattttttgtagttcggttgtgttttatttttttacgaagtttcgataggtatatttagtgaggaattatagtgggagttttgtggtagggttattttattttcgatgttttttagttgtattttggtacgaaaaaggttgtttagtttttatgtttttttaagtttcgggttggggggtagtagtggaggttggggttaatcgtcgttcgttttaaaggttttattgtggagttgtaaatacgaacgtttttgaaatgtgaggggatagtgttttggggtaggggttgtttattggtttatggttagaggtgagcgggttttgggtttgggtttgtgaggtgttgtggacgtcgggggtgtttttggggtagggatatagttacggtttttatattagtggagtcgttttttttttcgaggtagaggtttggtttttttatattttgggattttttttttttttgtgtttatgttggaagtatagcgtgagggggtaaaggttatgggaggtaaaaggttgggttgaggtcgaggttttgtggttgtggtcggatattaggttttgtggtggtgtgggtagggcgcgtttttttttttgagtagtttggggttgcgtgtgtgaatagaaataggtttgtcgatttgaagatggtttgattaagttttttaaagttgaagagaggtttttgtttatgtttttcgggtggtaatttatagacgtatttgtgtttattagacggtatcgttgatagggagtttgaagttatttagacgtggtttgtttacgtcgtggatattacggtttgaggtagacggttatagttatcggtataggcgaattttagttagagagagtgaattgggatattatttacgtgatgggttagatgggttggtagcggttcgttggagtcgttcgggtgggaacgttgtgtttgttggtttggtgttgtttatgtggttggtttaggtttgttattcgttaatttgtatatttattattggtgtatttttatgtatgttgtattttaattaaaatattttagggtcgggcgcggtggtttacgtttgtaattttagtattgtgggaggcggaggcgggaggattatgaggttaggagattaagatcgttttggttaatatggtgaaattttatttttattaaaaaaaatataaaaatttgtcgggtgtggcggtacgcgtttgtagttttagttatttaggaggttgaggtatgagaattatttgaatttagtaggtagaggttatcgtgagttaagattatgttattgtatttttttttttgagattgtatttttgttttttaggttggagtgtagtggtgtgatttcggtttattgtaattttcgttttttgggtttaagtaattttgttttagttttttaagtagttgggattataggcgtgcgttattacgtttggttgatttttgtatttttagtagagatggagtttttttatattatttaagttggttttgaatttttgtttttatgattcgtttgttttagttttttaaagtgttgagattataggggtgagttattgtgttcggtaataataattttttttttttttgagatagagttttgtttttgttgtttaggttggagtgtaatggtgtaatttcggtttacggtaattttcgttttttatgtttaagttattattttgatttagttgggattataggtatttattattatatttggttgattttggtatttttagtagagacggggtttttttatgtcggttaggttggtttcgaatttttgattttaggtgatttattcgttttgggtttttaaagtgttgggattatagttttgagttattatggttgataataataaaaaattttaaagtaaaattaaagatttataaattgtaaaatgcggttgtaataagtatttattgtattagtaaatatgaaaaatattaatgtttttatatatatggaggtggtttgtgagtggtgtgagtattttatggttagagtttggtagttgggcgagagataggatggattttaattcgaatatcgtagatataaaattgaaaattttgatgcggtgtttgtatcgttgtttttttttttgtagttgtaaatgggacgagtaattttatttttttttcgtttttattttttagtatagacgtagtttttagtaaggaagtgttgggaacgttttggagtgaatttaggaagatgtttgtagtgggtgttagggtttttttttatcgtttttgttgggtttcggggttacgttcgattgttgtgaacggtttgcggagtattacgtgcgacggttggaggcgagaggtttgtttttgatgtggttgttggtgtagggtttgtggtgtttttcgtagcggaaatggcgcgtcgtttcgggagggcgggagtagcgtttcgggttgttttgtgaggatgagcgacgagatgattggagggtttttgaagattttattagggtgtttttagtcggttcgtttttaggaagcgatatttntatagttttagggttgtagttgagggggtcgttattttggttgggcgaggttgggtttttggacgagggaaggtggaagggttgggtttatgaagagggtagttttcggggaagtttcggaatttttaggggggcggttaggtgggggtttttgtgatttaggatagattgtggtttttttttaacgtaaaggagatttcgcggtgtgagggattttttgggttttgtacgtcgtttggtggtaggtcgggttatggtgggtgtttacgttttcggtatgtggtcgtttttagtgggaggggttttgagaacgattttttaaaacgtagagaaaagttttattttttttaggattttagcgtagttttggtttaggaaggtaggagatagaggttaggacggtttagaggtgtcgaaatgttttggggatttgagtagtagttattagggaagaggtagggagggagttgaggattaggtttggttgtgagaatttttgagtttaggcggtagatgttaggaggtgtttggattggttgggttatgtttgggttgatttgtttagttagggagagggtgtgagggtagatttgggggtgtttagatggaaggaggtaggtatgggggatatttaaggttttttggtagtattatgaattaagtaggatatttggaggggaagaattgtggggatttggaggtttttaacgatttttttttgttttttggataggattatggttgtgtagggattttagagaagatttttgggtttttttaattttatttttatagttattttttagttggggttggttgttaattagataggagttcggtgtttggaggtgtttatttttgacgggtttttttttagtttggggttggtgagtttggtggagaacgcgttggtgttggttattatcgttaagaatcggaatttgtatttatttatgtattgttttatttgttgtttggttttgtcggatttgttggtgagcgggagtaacgtgttggagacggtcgttatttttttgttggaggtcggtgtattggtggttcgggttgcggtgttgtagtagttggataatgttattgacgtgattatttgtagttttatgttgtttagtttttgttttttgggcgttatcgtcgtggatcgttatatttttattttttacgtattgcgttattatagtatcgtgattttgtcgcgggcgcggcgagtcgttgcggttatttgggtggttagtgtcgtttttagtacgttttttatcgtttattacgattacgtggtcgttttgttgtgtttcgtggttttttttttggttatgttggtgtttatggtcgtgttgtacgtttatatgttggttcgggtttgttagtacgtttagggtatcgttcggttttataagaggtagcgttcggtttattagggttttggttttaaaggcgttgttatttttattattttgttgggtattttttttttttgttggggttttttttttttgtattttatatttatcgttttttgtttcgagtattttacgtgcggttgtatttttaagaattttaatttttttttcgtttttattatttgtaatgttattatcgatttttttatttacgttttttatagttaggagtttcgtaggacgtttaaggaggtgttgatatgtttttggtgagcgcggtgtacgcggttttaagtgtgttgggtagagggaggtggtgatattgtgtggtttggtttttgtgtgattttgggtagttttttatttttttggttttcgtttgttaaagaggatggattaaatgatttttgaaagtgttgaagcgcggatttttttgggtttagggaggggtttttgtaaaattttaggtaggattttttattagtagtcgtggggaacggaggaggatatggggaggttgtggggttttaggtttcgggtattaggggttaattttaggtttttaaagagatatttttcgtttatttttgggatatttcgtttgttttaatgattgagtagtatttatttcgttttatttttgttgttagtttttatgatcgtgcgttcgttagttgggatgtgaattttttgggtggaagtgtgtgtttagagttatttttatattagttttaggagaaggggttttgtgattagaaagttttatttatatttttgtttcggtttttggtataggtggtgatatttttgttttaggttaatggattaggtttgtaggagtttttttagtggtatggggttgagtttttttgagggtcggttttaaggtttagattgggtattggggttttagtttgtttttttgtagtagtcgtttaagtagatagttttggtaaatgtttgatttagtgattagtgtttgtgagtatggggttaggaaagtttggtaataaatgtggttttttttagaaagtgtttgaagtttgcgggtggagggatgggggaggggaaggtgggtaggggtgagagtcgagagggaagaaaggagtttcggaaaacgtggttgtttttttaggtgaggaagttatagttttagaggttttaaatgtttggggagtgtggaggttttaattaggtttgcgttgattttgtttttcggtttttttttcgtgttgataaattttagtttataggaaggacgagtaggtgtagtagggttttagttttttttatttttgacgttgttttagttgtagaagagg

SEQ ID NO: 1210 - DNA, 6971 bp, Artificial Sequence
  chemically treated genomic DNA (Homo sapiens)
  unsure 2741: n is a or g or c or t
ttttttttgtagttaggatagcgttaagagtggaggggattggggttttgttgtatttgttcgttttttttataggttggggtttgttagtacggagagaaaatcgagaagtagggttagcgtaagtttggttgggatttttatattttttaggtatttggggtttttggggttgtggtttttttatttggggaggtagttacgtttttcgggattttttttttttttttcgatttttatttttgtttattttttttttttttatttttttattcgtaaattttaagtattttttggaaggggttatatttattattagatttttttggttttatgtttataggtattggttattgagttaggtatttgttagggttgtttgtttgggcgattgttgtaggaaagtaggttgaggttttagtgtttagtttgagttttagaatcggtttttaggagggtttagttttatattattaggggggtttttgtaaatttggtttattggtttgaggtagggatattattatttgtgttaggagtcgagataaggatgtggatgaagttttttggttataaagtttttttttttgggattgatgtgggagtagttttgggtatatatttttatttagagaatttatattttagttgacgagcgtacggttatgagagttggtagtaaagatggggcggggtggatgttgtttagttattggagtagacggagtgttttaggagtgggcggaaaatgtttttttaggagtttgaggttggtttttggtgttcggagtttgaggttttataatttttttatgttttttttcgttttttacgattgttggtgagaagttttgtttggagttttgtagggatttttttttggatttagaagggttcgcgttttaatatttttagagattatttagtttattttttttgataaacggggattagggaggtaaggaattgtttagggttatataggaattagattatataatattattatttttttttgtttagtatatttaaagtcgcgtgtatcgcgtttattaggagtatgttagtatttttttgagcgttttgcggagtttttggttgtggaaggcgtagatgagggggtcgatgatggtattgtagatgatgagggcgagaaagaggttgaagtttttgaagatgtagtcgtacgtggggtgttcggggtagaggacgatgagtgtgagatgtaggaagaaggggttttagtagaggaagaaaatgtttagtaggatggtgagggtgatagcgtttttaaggttaaagttttggtggatcgggcgttgttttttgtggagtcgggcgatgttttgggcgtgttggtaggttcgggttagtatgtggacgtatagtacggttatgagtattagtatagttaggaagaagattacgaggtatagtaggacggttacgtggtcgtagtaggcgatgaagagcgtgttgaagacgatattggttatttagatggtcgtaacggttcgtcgcgttcgcggtagggttacgatgttgtggtagcgtagtgcgtagaagatggagatgtagcggtttacggcgatggcgtttaggaagtagaggttggatagtatggagttgtaggtgattacgttaatgatattgtttagttgttgtagtatcgtagttcgggttattagtgtatcggtttttagtaggaggatgacggtcgtttttagtacgttgttttcgtttattagtaggttcgataaggttaggtagtagatgaagtagtatatgggtgagtgtaggtttcggtttttggcgatggtggttaatattagcgcgttttttattaagtttattagttttaggttgaggaagagttcgttagagatggatatttttaggtatcgggtttttgtttggttggtagttagttttagttgggggatggttgtgggggtggagttgagggagtttagaagttttttttgggatttttgtatagttatagttttgtttaggaagtaggaaggagtcgttggaggtttttaggtttttatagttttttttttttaggtgttttgtttagtttatggtgttgttagggggttttgggtgttttttatgtttgtttttttttatttgggtatttttagatttgtttttatattttttttttggttggataggttagtttaggtatggtttagttagtttagatattttttggtatttatcgtttgggtttagggatttttataattaagtttggtttttagttttttttttgttttttttttggtggttgttgtttaggtttttaggatatttcgatatttttggatcgttttggtttttgttttttgtttttttgggttagggttgcgttgaggttttgggaagaatggagtttttttttgcgttttaaaaagtcgtttttagagttttttttattgagggcggttatatgtcgggggcgtgagtatttattatggttcggtttgttattaggcggcgtgtaggatttagggggttttttatatcgcggaattttttttacgttaaaaaaaaattatagtttgttttgggttataagggtttttatttggtcgtttttttaggaatttcgaaattttttcggaaattgttttttttataggtttaatttttttattttttttcgtttaagggtttagtttcgtttagttagagtggcgatttttttagttgtagttttggggttgtgngggtgtcgttttttgggagcggatcggttgggggtattttagtgaggtttttagggattttttagttatttcgtcgtttatttttatagggtaattcgggacgttgttttcgttttttcggggcggcgcgttattttcgttgcggaaggtattataggttttgtattaatagttatattaaaggtagatttttcgtttttagtcgtcgtacgtggtgtttcgtaggtcgtttatagtagtcgggcgtggtttcgaagtttagtagggacggtggagaggggttttggtatttattgtaggtatttttttgggtttattttagggcgtttttagtatttttttgttgaagattgcgtttgtgttgaagggtggaagcgggagggggatggaattattcgttttatttatagttgtaggaaaggaggtaacggtgtaggtatcgtattagggtttttagttttgtgtttgcgatgttcgagttaaaatttattttgtttttcgtttaattgttaaattttgattatgaaatgtttatattatttataagttatttttatgtgtgtgaggatattaatattttttatatttattggtatagtaaatatttgttataatcgtattttataatttataaatttttagttttgttttaaaattttttattattgttagttatggtggtttagggttgtaattttagtattttgggagtttaaggcgggtggattatttgaggttaggagttcgagattagtttggtcgatatggagaaatttcgtttttattaaaaatattaaaattagttaggtgtggtggtgggtgtttgtaattttagttgagttaggataatagtttgaatatgagaggcggaggttgtcgtgagtcgagattgtattattgtattttagtttgggtaataagagtaaaattttgttttaaaaaaaaaaaaaattattattgtcgggtatagtggtttatttttataattttagtattttgggaggttgaggtaggcggattatgaaggtaagagtttaagattagtttgggtaatatggggaaattttatttttattaaaaatataaaaattagttaggcgtggtggcgtacgtttataattttagttatttgggaggttgaggtagaattgtttgaatttaggaggcggaggttgtagtgagtcgagattatattattgtattttagtttgggaaatagagatatagttttaaaaaaaaaaatgtagtggtatgattttggtttacggtagtttttgtttattgggtttaagtaatttttatattttagttttttgagtagttggaattataggcgcgtgtcgttatattcggtaaatttttgtattttttttagtagagatggggttttattatgttggttaggacggttttgattttttgattttatgattttttcgttttcgttttttatagtgttgggattataggcgtgagttatcgcgttcggttttaaaatgttttaattgaggtataatatatatgaaaatgtattagtgataaatatgtaggttgacggatgatagatttgaattagttatataagtagtattagattaatagatatagcgtttttattcggacggttttagcgagtcgttgttagtttatttggtttattacgtgaatggtgttttagtttattttttttggttgagattcgtttatgtcggtggttgtaatcgtttgttttagatcgtggtgtttacggcgtgaatagattacgtttgggtggttttagattttttattaacgatatcgtttgatggatataggtgcgtttgtggattgttattcgggggatatgggtagggatttttttttagttttgggagatttggttaaattatttttaaatcggtaggtttgtttttgtttatatacgtagttttaggttgtttagaagagagagcgcgttttgtttatattattataggatttggtattcggttatagttatagagtttcggttttagtttagttttttgttttttatgatttttgtttttttacgttgtgtttttagtatgagtataggggagagaagggttttaaggtgtgagaaggttaagtttttgtttcgggaaggaagacggttttattggtgtgagggtcgtggttgtgtttttgttttaggagtattttcgacgtttatagtattttatagatttagatttagagttcgtttatttttggttatgaattagtgagtagtttttgttttagagtattgtttttttatattttaaggacgttcgtgtttgtagttttataatgaggtttttgagacggacggcggttaattttagtttttattgttattttttagttcgggatttgaaagggtatgagaattgggtagtttttttcgtgttaagatgtagttggagggtatcggaagtggggtgattttgttataggatttttattgtggttttttattggatgtgtttgtcggggtttcgtgggaagatgaggtatagtcgagttgtaaaaagttaattttttgatgtgttatggttatgggggagataaattagtttcgggatgatttgtgattagatgatattttatagttaattatatttcgattttggttttttagtgtttttggaaatattgtatgttgagtggtcggaagatacgtggggttggtttattcgtttattagggttttcgttataggtagaggtatcgtttttgtagagtattttttatttaggtgtttttggattagcgatttacgaggagaatgaagatatacgtttttttgcgtttatatagtgtttggtatttagggtttgtaatatatatataggtatatatatatatataaatgtgtatttatatatataggtatatatatatataaatgtgtatttatatatataggtatatatatataggtatatatatataaatgtgtatttatatataggtatatatataaatgtgtatttatatatataggtatatatatatataaatgtgtatttatatatataggtatatatatataaatgtgtatttatatatataggtatatatatatataaatgtgtatttatatatataggtatatatatatataaatgtgtatttttatatataggtatatatatatataaatgtgtatttttatatataggtatatatatataggtatatatataaatgtgtatttatatataggtatatatatatatataaatgtgttttatatatatataggtatttatatatataggcgtatatatatataaatgtgtatttatatatataggcgtatatataaatgtgtatttttatatataggcgtatatataaatgtgtatttttatatataggtatatatatagaggtatatatataaatgtgtatttatatataggtatatatatatataaatgtgttttatatatataggtatttatatatataggtatatatataggtatatatatatataaatgtgtatttatataggcgtatatatatataaatgtgtatttatatatataaatgtgtatttatatatataggtatatatatatatatgtgtatttatatatataggtatatatgtatataagtgtgtatatatatatacgtgtatatatatatattggtatatatatatatatatatgtgtatttatatatataggtatatatatataggtatatatgtatataaatgtatatatatataaatgtatatatatatatacgtgcgtatatacgtttatttatatacgcgtgtatatataaatgtttatttatatacgtatgcgtatatataatgtttatttatatacgtgtatatacgtgtatttatattatatgcgtatatatataggtatatataaatgcgtatttatttatatacgtatatatatatatatttgtttaatgtgtgttcgagggttgcgagaggtaaaatatttttgtggtttagggagtggtttgtttagttgcggttatagatatggaggtgggggttatcgtcggattaatagttttatcgtggtgggttttagtatagttttttaggatagttggatttatagttgattttagtttttggtttagggattattttttttgaatttgggggtgggggtgtgggaggtggtaagtagggtttttcgtgggtttatcgtggtgtttgtattgaaggttttggggggtt

SEQ ID NO: 1211 - DNA, 6894 bp, Artificial Sequence
  chemically treated genomic DNA (Homo sapiens)
gatagtttttattattagaatttagagtttaggagtatagttttatattggttttttttaaagtttggattataggattgttttttagaaaagtttgaaagtttttggtaaatagtatttagttatttagttttttttttttagtttttttttagaagagtaattcgagaaaatatttagtagcgtagaggaaagcggtatagtgttgttaatttatttttagtaagatttacggaattttaaaaatatagtttatgggttttaggacgtttgtagttttgttgtttaaaggttttttgtagtattaattttttttttaaattataagtggtgtttataggttttgttgttttttaaattttagagagatttttttttaaatgaaatttagagaatagaaagatttaaaattattttgatttggttagatatagaggtttaagattgttaagttattttgtgtttatttttttattaaagttattaaaatttttttattaaatgaatatttatggaagcgttaagattaattatttttggagttaaatagattttgatttaaattttagttgtgtaatataaagtttgtgggattttagatcggttttttggtttttgggttttaattttttaggggtgagttagattaggggtgagttagagagaataggatttttttgtattgttaataagaggattaaaatgagatttattatgtatagtataggatataagattagttggtatataataagaatttaatatataatagagttttttttttatttttggagtttttaaaaaatataaaaattatatatattttttttggttaaagatgatgattaatataaaaattttattttaggtttatgttttttggattttttaaagagtatttaatagagtgagttatatttggggttatatttgagttattcggggttatgtttttgtgttttgtgatgttgttaattcgatgatttgtgcgttttttttagttaaaaaataaaagtcggttttgtttttttttgtagttttttgaatagttataattattttaattgtttgttttgtttgttaagatttacgtttttaggtaaacgaattaattaagtttttttttgggtatagattataaagttatgaaaaatttgttttttttttttttttttatttattattttatttttgttttttggggagtattgtagagttagagttttttaagattttgtttattgtaagtttaaggtgatggagtttggttttcgggttaggagttaattttagaggttttaataatataagaaagaatgagatttaaagattattttgttaggtgggatggtttatatttgtaatttttagtgttttgggaagttaaagtgggaggatgttttgagtttaggagtttgagataggttttaatagggtatggatagaggaaagtagtatggaattgaagggtggatatttattgtttagtaaattataaattttggaaggaggtggaagggttttagatttgtgttgtttgtagtgaagaaattaagatataaaaaagtaaatgggagaggatagtagacggttttgaatggatgagagttagatatatggtaggtgtagatttttatttaagttttttaagttaaagatattgttgaaatatttggattattgacgttattttatagtaggtttttgtgaagtttaaatggagtgagttttgttttttttaattgttatttagtgtgttttataggtaatttttaagtaggaataataggagtatagtaatgtagtagaatttataaattttatttggtattgagaaaggttaagtcgagaggaaagtgattgttgttaattttattgtagtttgtgttggagtagggggtgttgtgtttggttttttgtatttgttgttattatttttgttatttgtgaaaggagtgtgatatggtggttataaggcgggttttgttgtattttttttagattgtggttttgggcgtttgtttaatttttttggggtagttttttttgggggttgagtgagtgaatgtatttggagaattaggtggtgtttatggtatgttgagtatttataaaggttattaattcgtgttattggttttttaattaagaatggggttatatattatttgtagtttttattattagtttggtagtatttataaacgtgtagtagtaatgtttgattggtggttttttgaagggattttatgggtatattgtgtatttgtttaaatttagggttttttatggatttataggattggtagttgtaggttagtaatgtatagtaattgaagttgggtttttaaattatttgtttttaaaaaaatattataattatttttaatatgtttttttttttttatgaattttattattaaatgtatttgaaattggaaatatatattaattttgattatatttaatggatttatgagatgggagtatttgttttagtagagtttttatatatggtttatgttggttataggtgttggtttttgtattaattaggattttgaagaggaaaataaatagtaggagatgggtagagatataaaagatttattataaggaattggtatatatagttatggggttgcgtagttttaagttttatatttagtaagttggagatttaggagagtagatgatgtgttttggtttgaaagttagtagacgtgagatttaagaggagtttatatttttgtgttagttcgaaggtaggaagagattagtgtttttattaggtagttaggtaggaggagttttttaggtcgtcgaggagttggtttgttatttttaggttttttgttgattggataaggtttttttttattttagagggtttttgttttatttagtaatttgtttaaatgtgtattttatttagaaatatttttagatatatttagaatattgttttattatatatttggtattttgaaatttagttaggttgaaatatgaatattaattattataggtttttttttattatcgatgtttttttagtaggtggggtatagtatataggattttttttatttttgaggtttttttagtaggtgggatatagtatataggttttttttgttattttcgaggtttttttagtaggtgggatatagtatataggttttttttgttatttttgaggtttttttagtaggtgggatatagtatataggtttttttttatttttgaggtttttttagtaggtgggatatagtatataggtttttttttttattttcgaggtttttttagtaggtgggatatagtatataggtttttttttttattttcgaggtttttttagtaggtgggatatagtatataggttttttcgggtttgggtaggaggtacgaaggtgatttatttttgtttgtttaggattgaggtggtttttgagatgtagaatttttggtttttaaattttgtttatgttttaggtaaataaggtaaattggttattttaggtagaatttttatagtagttacgttttgttaatttttttttttcgtatttatcggatttataaatttttttttgaatatttgatttttgatttaattttttttaaggtaattagtttttttttagataagtttttagagtgaggtcgtgatgggtttttcgtggattttagattataggttgtgtttttaaatttgttttttttaggaagtgtttttttcgttacgtggtgttggttttttttattggtgtattgtcgtagttcgtttttattttagagatatagaaaataagaagtttttagaaatgttagttttaggagttttatttttgaaatagaagtgttgacgtttattgtatagttatttttgggaatgatatattagtatttttatcgttattttataggttgtggggttaggtagtgatttagggagacgagtagtgagaaggaatggattaaatatttttcgagtttatcgagtttagttatcgttttttagttagagaaggtagttgtgggtttttttgtttttatatggatttttttttgttttatttttttttttattaagggtatcgttgttgtttatttgtttattttatatttacgtgtgtttacgagaaggatgggagggaaagtggggcggtaaagaataatttttgttattatttttcggtttaaaattttattaaagtttttttttataaagtgtttaagatgagggtttagtatattattttatttaaattataatattttatatatatttttataaatgtaaggggtataaaagtgttattttgttatatggatatatcgtgtagtggtgaagtttgggtttttagtgtatttgttattagaataatatacgtgttatttatagggtaattttttattattcgtttttttttattttttcgagtttttaatgtttattttatattttatatttacgtgtatgtattatttagtttttatatataagtgagaatatgtagtatttgattttttttttttgagttattttattttgataatggtttttatttttatttatgttgttgtaaaagatatgattttattttttttgatagttggggagtattttattgtgtatatgtattatattttttttatttatttatttattgatgaatattttagttgattttatatttttgttattgttattagtgttgtaataaatatatatgtgtaggttttttttaatatattgatttttttatattttatggagggaatagagtttttttaagcgagtgtggttggtttttattttttagtgtattttgtaattaatatttttgtatatttttttttaggtgattgggagattttaatttagatttttagtaagtgttataaggaagaaaagattttgaagaattaattaagtttttcgtgaagttaagtttaagtaatattttcgttttaattataagtaggagaaatgaagtatattattaattcgtatgaaaatattaataatatagtaagaaataatttcgattgttttcgtgtggttttgtcggaggagatattttttataatttttattgttggagttttggagaatttgatcgttttgttggttgtgtttaagaataagaatttttaggtatttatgtatttttttatttgtagtttggttatatttgatatgttgggtagtttatataagattttggaaaatattttgattatattgagaaatatgggttattttaagttacgtggtagttttgaaattatagtcgatgatattatcgattttttgtttgttttttttttgtttggttttatttttagtttgtttgtgattgttgcggatcgttatattattattttttacgtattgcggtattatagtatcgtgattatgcgtcgtattgtggtggtgtttacggttatttggacgttttgtacggggattggtattattatggtgatttttttttattatgtgtttatagtgattatttttacgtcgttgttttcgttgatgttggtttttattttgtgtttttatgtgtatatgtttttgttggttcgattttatattaggaagatttttattttttttagagttaatatgaaaggggttattatattgattattttgttcggggtttttattttttgttgggttttttttgtgttttatgtttttttgatgatattttgtttaagtaatttttattgcgtttgttatatgttttttttttaggtgaacggtatgttgattatgtgtaatgtcgttattgatttttttatatatgtttttcggagtttagagtttagggacgtatttaaaaagatgattttttgtagtaggtattggtagaatggttgatttttggttttagaatttatgggaataacgttgttaagtgttagaatagtgtaatattttaataaatgttagtgttttttattggttttttttttttaatggatgtaaggatgattttattagttagtgtttttaatagttaggttttatgtgaatagttttattgtaggggtaattttttaattttgtgattggatagataaaacgatgtagtaaaagaaggatagaatataaagtattaggtaggtataaaagtaattaaggtttttgttattatttttaatgattaaaaattgtaattatttttgtattaatttagtaaaatagtaataaaaatttaagggttttgggttaaggtaaagatttgtttttttgtggatatttaataagttagttttgaggtggtttttttaggtggaggttattgtagttaatttttagaagttaagtatttggatatgcgattttaggtagaagatgtagggtttttgtaagttaataataaattggaaggaatgtattgttgtagttgaatttgtttgttttttatagttatgtggaatttttatttttttttttttttttgttagtttgatgtattgatgttattttagttttagaaagtaggttgagtataaattataaatgttaaataacgagtttcgagtttttaatgataaatggattttttttgttagttttttttgtttatttagtattttattggttttaaaatttttttttgttatatttttttatgttttatgagtatatattttaaaggaagaaatgaaaatttaatttatttagtttttatgtgggaatatataaaggttagatgaaaattgttattatttgaagaagttgtaattaaattatgtgtgttataatgtagaagtataagaaaagagttttaatatgtattttaagaaataaagagagagagatagagatagatagagagagagagagagagagagagagagagtgt

SEQ ID NO: 1212 - DNA, 6894 bp, Artificial Sequence
  chemically treated genomic DNA (Homo sapiens)
atattttttttttttttttttttttttttttttgtttgtttttgtttttttttttttattttttaaaatatatgttggggttttttttttgtatttttatattgtaatatatatagtttggttatagtttttttaaatagtgataatttttatttggtttttatgtatttttatatgggaattaaatggattaaatttttatttttttttttgaaatgtatgtttataaagtatgaggaaatgtaataggaaagggttttaaggttagtgggatattgagtgagtaaagaagattaatagagaaggtttatttattattggaaattcgaagttcgttatttgatatttatagtttatatttagtttattttttgaaattgaggtggtattaatatattagattaatagggagaaagaggagggtggagattttatatggttgtgggagatagataaatttagttgtagtaatgtattttttttaatttattattggtttatagagattttatattttttgtttggagtcgtatgtttaggtatttaatttttggaaattggttgtaatggtttttatttggaaaggttattttagaattggtttgttagatgtttataggaaagtaagtttttgttttagtttaaagtttttgaatttttattgttgttttattagattggtgtaaaagtaattgtaatttttggttattgaaagtaatggtaaaaattttaattatttttgtatttatttaatattttgtattttattttttttttattatatcgttttatttgtttagttataaagttaagaggttgtttttataataagattgtttatatagaatttagttattagaaatattagttggtgggattatttttgtatttattagggaaggaaggttagtgaggagtattggtatttgttggaatgttatattattttggtatttggtaacgttatttttatggattttaaaattagggattagttattttattagtatttgttgtagaagattatttttttgaatgcgtttttgagttttgggtttcggaaggtatatatgaaggggttaatgacggtattgtatatgattaatatgtcgtttatttggaagagagatatgtagtaggcgtagtaggggttatttgggtagaatgttattaagaggatatgaagtataaagggggtttagtagaagatgaagatttcgagtaggatggttagtgtgatggttttttttatgttggttttggggagggtggagatttttttggtgtgggatcgagttagtaggaatatgtgtatatagaggtataggatgaagattagtattagcgggaatagcgacgtgaaggtgattattgtgggtatatgatgggagaagattattatggtgatgttagttttcgtgtagaacgtttagatgatcgtaagtattattatagtgcggcgtatggttacgatgttgtggtatcgtagtgcgtggaagatggtgatgtagcggttcgtagtaattatagataggttgaagatggagttaagtagggagaggataaatagggagtcgatgatgttatcggttgtggttttaaaattgttacgtggtttgagatagtttatgttttttaatatgattaggatattttttaagattttatataggttgtttagtatattagatatggttaagttatagatgaaaaagtatatgggtgtttggagatttttatttttgaatatagttagtaggacgattagattttttaaaattttaataatggaaattgtgaaaaatatttttttcggtaaaattatacgaggatagtcggaattattttttgttgtgttgttgatgtttttatacgagttgataatgtgttttattttttttgtttgtggttaaggcggggatgttatttggatttgattttacggaaaatttgattgattttttaggatttttttttttttgtagtatttgttggagatttaagttaaaattttttaattatttaaaagggagtatatagaaatattagttgtaaagtatattagaaaataaaaattagttatattcgtttaaagaaattttattttttttataaaatataaagaaattagtatattagaaggagtttgtatatgtatgtttattgtagtattagtgataatagtaaagatatggaattaattaaagtgtttattaatgggtgaatggataaagaaaatgtggtatatatatataatggagtattttttagttattaaaaagaataaggttatgttttttgtagtaatatggatggaagtggaggttattattaaagtgaaataatttagaaagaggaagttaaatattatatgtttttatttatatgtgggagttaaataatgtatatacgtggatatagagtgtggaatggatattggagattcggaagggtgggagggggcgggtgatgagaaattattttatgggtaatacgtatgttattttgatgatagatatattaaaagtttaggttttattattatacggtatatttatgtaataaaatggtatttttgtattttttatatttataaaaatatatataaagtgttgtaatttaggtaaaataatatattgggtttttattttaagtattttgtgagaaaaagttttagtggaattttgagtcgagagatgatagtaaagattattttttgtcgttttatttttttttttatttttttcgtgaatatacgtgagtgtgggatgaatagatgaatagtagcggtgtttttgatgaaaaaagaggtaaagtaaggaaaggtttatgtgggagtaggagagtttatagttgttttttttgattgggaggcggtggttgggttcggtggattcgggagatgtttagtttatttttttttattgttcgtttttttgggttattgtttgattttatagtttgtgggataacggtaaaggtgttgatgtattatttttaaagatgattatataatgagcgttagtatttttgttttaaaggtggagtttttgggattggtatttttggagattttttattttttgtgtttttggggtgaaggcggattgcggtagtgtattagtggggaaagttagtattacgtggcgaggaagatattttttagggaggataaatttgggagtatagtttatgatttgaagtttacggggagtttattacggttttattttagggatttgtttggaaaggaattaattattttggaaaggattgggttagaggttaagtgtttagaaggaggtttgtgggttcggtggatgcggaaggaaggggttgatagggcgtagttgttgtgagggttttgtttggaatggttaatttattttgtttgtttgaaatatggatagggtttaaaagttagaagttttgtattttaggaattattttagttttgggtagatagggatgagttattttcgtgttttttgtttaggttcggggaagtttgtgtgttgtgttttatttgttggggaagtttcggggatgggaggggaagtttgtgtgttgtgttttatttgttggggaagtttcggggatgggaggggaagtttgtgtgttgtgttttatttgttggggaagttttagggatgggagggggtttgtgtgttgtgttttatttgttgggaaagttttagggatggtaggggaagtttgtgtgttgtgttttatttgttggggaagtttcggggatggtaggggaagtttgtgtgttgtgttttatttgttggggaagttttagggatgggaggggttttgtgtgttgtgttttatttgttggggaagtatcggtgatgggagggggtttgtggtggttggtgtttatgttttagtttgattgagttttagggtgttaggtatgtggtgagatagtgttttaggtgtgtttgagggtgtttttgggtgagatgtatatttgaataggttattgagtaaaatagaggttttttgggatgggggagggttttgtttaattagtagaaagtttgaggataatagattagtttttcgacgatttggggggttttttttgtttgattgtttgatggagatattggtttttttttgttttcggattagtatagaagtgtgagttttttttaggttttacgtttgttggtttttagattagaatatattatttatttttttgggtttttagtttgttgagtgtagagtttgggattgcgtagttttataattgtgtgtgttaattttttatagtaaattttttatgtttttatttattttttgttgtttatttttttttttagaattttggttaatataggggttaatatttgtggttagtatgggttatgtatggagattttgttgggatagatatttttattttatgagtttattaaatgtaattagaattagtatatatttttaattttagatgtatttgatggtaaaatttataaaaaaaaaaagatatgttgaaagtggttgtaatatttttttagaaataggtggtttgggagtttagttttagttgttgtgtattgttgatttgtagttgttaattttataaatttatggggagttttgaatttggatagatatatagtgtgtttatggggtttttttaaaaggttattaattaagtattgttattgtacgtttgtggatgttgttaagttggtggtgggggttgtaggtggtgtgtggttttatttttggttgaagggttagtgatacgaattggtggtttttatgagtgtttagtatgttatgggtattatttaattttttagatgtatttatttatttaatttttagaggaagttattttagaaaggttgggtaaacgtttaaagttatagtttggagaggatatagtagagttcgttttgtgattattatgttatattttttttataagtggtaagggtaataataatagatgtaagagattagatatagtattttttattttaatataaattgtaataaaattgatagtagttatttttttttcgatttggttttttttagtgttaagtaggatttgtaaattttgttgtattgttatgtttttgttgtttttgtttagagattgtttgtagaatatattaaatgataattagaagaagtaaaatttattttatttaaattttataaggatttgttgtgaggtggcgttaatgatttaaatattttaataatgtttttggtttaaagaatttggataggggtttgtatttgttatatgtttggtttttatttatttaaagtcgtttgttgtttttttttatttgtttttttgtgttttgatttttttattgtaaataatataggtttagagtttttttatttttttttagggtttgtggtttgttgggtaataaatgtttattttttaattttatgttgtttttttttgtttatattttattgaaatttgttttaagtttttgggtttaaggtatttttttattttagttttttaaggtattggggattatagatatgaattattttatttggtagagtgatttttaaattttatttttttttatgttattggaatttttggagttaatttttggttcgaagattaagttttattattttgagtttgtagtaaataaggttttagaaggttttaattttgtagtgttttttaggaggtagagatggggtggtggatgagaaaggagaaaagagataagttttttatagttttataatttgtatttagaaagaaatttggttgattcgtttgtttgaaggcgtaggttttggtaggtagagtagataattggggtagttataattgtttaagggattgtaaggaaaagtaaaatcgatttttgttttttggttgggaggggcgtataaattatcgagttaatagtattatagggtataagaatatggtttcggataatttaaatgtggttttaaatgtggtttattttgttagatgttttttggaaagtttagggagtatgggtttaaagtgagatttttatattgattattatttttgattaaaaaaaatatatatagtttttatattttttaaaggttttaagggtaaggagaaggttttattatgtgttaaatttttgttatgtgttagttggttttgtgttttgtgttgtgtatggtgggttttattttaatttttttgttgataatataagggagttttattttttttgatttatttttgatttgatttatttttgaggagttgaggtttagagattaagagatcggtttaaagttttataggttttgtgttgtatagttgggatttaaattaagatttgtttggttttaaaaatgattaattttagcgtttttatgaatatttatttgataaggaagttttaatggttttagtaaaaaaatgaatataaaataatttaataattttaaatttttgtatttgattaaattaggatggttttaaatttttttgttttttaaattttatttagagaaaaatttttttgaaatttagagaatagtaagatttgtagatattatttgtggtttaggaagggagttaatgttatagaaagtttttgagtagtagggttgtaggcgttttggggtttatgggttgtgtttttggggtttcgtggattttgttgaagataagttagtaatattgtgtcgtttttttttgcgttgttgggtgttttttcggattgtttttttggagaagagttggggaaggaggattgagtggttgagtattgtttattaggggtttttaggtttttttagagggtagttttgtaatttaggttttagagagagttagtgtaggattgtgtttttgagttttgggttttggtggtgggagttgtt

SEQ ID NO: 1213 - DNA, 9888 bp, Artificial Sequence
  chemically treated genomic DNA (Homo sapiens)
tttttttttatggggaaataaaattaatgaattttataaattttaaagggaaattgtgtattttagaaagtaaaattttagatggaaattatttattatattatatttgtgggaattgttatatttattttattgtttgtgatagggttatatatggtagtattttttaattgaaatattggatagaaagtttttattgttgtatatgttgtttaattattatttttataggagggataatagttattgataagaaggaagtattaaagttttattgagtttgttaggattttttattgggattagtgatgtatttttaaataaaatatgttgtttttggattaatatttttattaaagtataggaaaatttatagttatttaaagattaaattaaaattattaataagtttaggaaaaatgtaggttttagttttgggtggttatagtttttttttaatgaattttagttttttttatggaattggttaaattttttattaagtttttttttgtttatatgttttgtattaatatttgaattttgtatatttaatattgtaatttaaattgtttttttttttttagaagtaattaaattttaaatgggtgttataaattggattacgcgtggatacgttttatttttaagaatttttagatagattttaggaagagttttagttgttgttttttatttaacgtttatttttagtaggaagtagttagaaaaagtcgttatttaataattttttaatagtaattaggttgtttttatggggggttggggggaatgtgataggagttattaagaaattattttaggtagatagagaggaaaagcggtttttggaaagtttttattttttttaaagtagttttagaaaagttttttgttaagaaggaaagtttaggtttttagagttaagtaggtaattttaggtatgtagatatcggttattagaaattgggtttatttaatatgatgatttttatggttgtttttttgtttttgcgttgatatgtgtttggtaatatggttttatttatttttatacgggtagaatattatggtgttttgtatttgtatattaatagattagggtggtaaggttagttttttttcgggttatgtgaatgatatgtttattgaaattaattcgttgagttttatgtaaattaggtatcgttttttttagtttatgtatatttggttggtttttgttttatttgaggtttttatttttagttttggagttttcgtttttgtttttgtataggggagtttttttttttttttttttttttttttttttgtttattaaattttttattttttaaaattattttacgtgtgtttatttcgtttttttttaatttaatgcgagatgaagaatttggtgtttttttatatattggagttttattagtaggggttggatattaattgttttttgaagttatttttagttttaatattttttgttttgtttgttgttttggtatattaagtgtgtaaagtttatgaggtttaaatgaaattttttgtttttattattataatgagaaaggagtaaaatatttttattttgtaaatttatttatggaatatagtttttaatatatttatgttttaaaagtttttaaaagttaagaggaaataaaatattatttattttttttgagaaatgtatttttttttgtatttgattgtttttataatttttgtgttgatatgtaatgttataaaaatgtttttgatagtaataggaaagaggattagatatagttaatcgtaaaggttagttggttggtaggtgtttagtagatgtaaatagaggtttatttatgttattatatttgtttttgaaaagtataatgtaaatatagtatattaatttaggaggtaaagaattatttaatattaaattttaaaagagttggttatagtttaatgatatttttgtatattagtttttatttatattgttttttataagtttttaaaaggagattttatagttttaaatttggtttataaatatatatatttttatttttttttttttttttttttggtagtttggtaaaatttttagggggagttggaggaaatattagtgtttaattttttaaattttttttatttaaagttttggttttaagttttatttttgttaaggttttaggaagtttattgtcgatattttttttttgaatttagttattaaaatgattttaaggttaagggatagattatagttttattttataagtaagtttgtaatatttgatttaggaaagtttgttgtgtagatagttgtagtttattttttttatagattaattttgatttgttttttagggttaaaattatttaaattaaaattttttagaattttgtgggtatttggtaaatttatgttgggggagaattggtagagatatgttaaatgtatttgattataagaattatttattttatttaatatttattagttatttattgtatatttattatagattttggtattgtagatatgagaaaatgttatttttgatttacgaaatttatttaaaaagtagagaataaggtttagttatttaaataaagttttagttgaattaaataaaaataagttttaaatatttaatgtgaaagttttcgagtatgttaagaatggtttaatttagggatagaaattttattgattgaaagaaaattttaataaaatattaatttttgaatttaatttgatattcgaaattaggtaattaaatattagtattatttttttttttatagtttataataaaattttttatgagaaaaaaagatattttttttttaagtttgaaaatggatggagaatttttaatatttattgttgttgagaatagtaaatagattatttatttttataaatgaaggttggttttgagttatagaatatatttgttatattattttttgatattatatattaatagaaataataattttttcgtattgagttttttatttattatttttttaattatattcgttttaattgttgttatggagtgttgaattttataatttaagatattaagatgtttatttgatatattatttttatatttaatgttttataatttttgttaagaatttaaaaatttttgttggtcggataggaagaggaaattttatggtttggtgaatttagaaattgtttagtatatttcggttataaaattgtgttaaatatatttaaattttataattttataagatttattttaggtttatatattgagtatttagttttttatcgtttttttataggttaattttgtgtaatataagttttgtttttataattttatgaataaaatagtttttgatatataggtttgattttttaaatatattttttttattttattttaaatgtaatataaggttaatatagaaaattgaaaagtataaggaaagtgaaatatttgtaattttattaattattgttaattttgttgtatttttagtttttttttatatatattaatatggtatttttgttttaataaaaggattgttaaaaggtatatgttagtttggattttgttttttttatttataatgatattatagttttttatatttggtatttttttgtaatatttgttgtatagaattttattatataaaggtaattgttagaaattttttattatttttgttagatatttagggtttatatttttttaaaaattaattatattagagttttgattatattagagttttgattatagttttgatgatttttttgggaattgagagtttaatataagttatgtttattttaagatttttaatatattgaaaagttatgttatagagtgttggtttttttgtaatacgtttatttatattggttgacgttttaattttttgttaatttgaggggaagaaatgttaattttttgtttgtttttttaatgttagttatgtttttttttttttatcggttatttcggtttatttataattttataaattaattttgtttatttttaattttttagtattgttttttagattgttttattagaaaagtttttttttttatttattttttatttaataatttttatttattcgaatttttttgtatttattgtttttaggaatttggtatttaggatatttttgtttttatattgtttatgtatgtatatttcgtttttaataaaaaatttagttgtttaagggtaagggttttatagagttttaatattttaattgtttggtgttgtttaataaattagattcggaagggttttttttagggaggggagtaaagggtaaattattttaggggttgggagtgtagaagttaaatttttgagattgtgaaaataagacggtttcgagacgatttagtagtaggtatttaagtaagaaaaatttaaatattgtttttaataatgtttgattaatgttaaatattaagtaagggtttaggtagttttgatagtttgtagtgttttaggataaaattaattttgaggggtgttagtttacggtgattttttgtttagattttggatttttatttttaggtcgaagtgttttatttttgattttcgaattttcggaaattattattaaagtagtttagttttttttttattttgtttgggttataaatatgacggcgagttagttttttttcgtaggacgttttaggttttcgggatggtaggttaagggtttagtaagaaaaaaggcggtttcggggaatttgttttgttaggtttcgttagggtttttttttgatttttcgaaggttaagggttgtttatgaacgtcgaggtttcgtttcgcggttcgtcgattggttttagtcgttttggtgattcgacgtattttcgtttcgggcgcggttcgggttacgtttatttgttttgtagtattggatgttttgtgagttggggattgttgcgttttatatttggatttagaagggatttttttgttcggttggttttcggtttttttgttttttttcggagaaataatagcgtttttcgcgtcgcgtatggagtttttcggtcgtcgcgagtgttttttttttttttggcgtttttttgggttgtttttggcggttatggtgttgttgttgtatttttttttcggtaggatttcggggcgggttcgcgcgttcgcggcgagattagagttttttttagtcgggtaagagtcgcggggcggggtttatagtaggtcgtgtttgtttggggatagggttttttgaggggtgtagtgtttagatttcgggggtatgtggcggggaatgcggggattacgtagagttcgaggtgaagtttgtttggtggcgtcgtgtgcgcggttagtatttacgtaggatttggttgcgtttttaaaaaaagcgtgaatcgtgttttcgggattgagttagtcggttaggggagcgcggattgggcgttttaggtgagggtttgttttggagtgtataggtgcgtgggagtgttgttagggttcgtgttgtgttcgtggtgagagtgtgttttgtgtttttttggtgttttaatgagtggggtgtttattagggtattgggttttagttcgttttttcgaggggcgttttatatgtgttttatgcgttgggttgggcgagtaggggtttggttaggtgttgttgggagcgtgttgtgcgtaagtggtttgtgtgtagagtttattgtgggtaagatagtttaattgtttgttttgaatggagtgagcgcggattttggggttagggagggtatgttgagtgagagtaggttttcggtgtttggggttagagaggtggtaagggcgcgttatgttttttgtgttttttgtgaatagttttcgtgttatttgagtttttattagtttgtaaatggttgtttttttggggggtgggtgggttatcgagttttttttttgtttttaattaatatagatagtatttgattttattgtttaatggttttttgatattgttttttttttttttattattttgagttatatttgagagatgtgaaataatttaaaaaataatggtagttaaatttagtgagaaattagtattttaataaaggaaggtagataatgttaattttgtttttttttgtagtttataagttaaagtttaaggtttattttattaaatttattttgtattttattgaatggaattaatatttttaaaaatgtatgttaggttaggcgtagtggtttacgtttgtgattttagcgttttgggaggtttaggcggggtgattgtttgtgtttaggagtttaagattaatttgggtaatatggtaaaattttgtttttataaaaaaatataaaaattagttgggtatggtggtttatgttcgtggttttagttattttgggggtcgaggtaggagatttatttgagtttaggaggtgaaggttgtagtgagttgtgattatgttattgtattttagtttagatgatagagtgagattttgttaaaataaaataaataaataaaaaaaaaattcgttaagaaatatatgtttattgtgcgatacgaatagaattaaaagatagttatttttaatattttggtatatttgtttttgtttttatgtgcgcgttatgtgtatttatgtttaaattatatttaggatttaataatatgtatagtttttacgttgtatttttttttttaggagtatttatttaacgaatatgggttttgtatgtttggtgttattatattggtaggtaataataaattatttttatttttttgattttttttttattatttgtttatatatatatttatgtaggaagataagtagggattttgttttgtttaatgataagtgtttagtgtcgggaatatagtagataattaataaattatttgttaaaatgtattgggattggtagatattaaaatttaaaatataatagtgataaataaattatgaattaagggaagtgttttggaggtaagtagtataatttttagatataaatttgatagtatttaataaatgattggagagagggaaggtttttttgtttattaaatagattttggggtatttgtgtttgttgtttttttagtttaggaatattttttttttgatttgttgtagaaatagtttcgtttttttgtaaatttagttggaatgttatatttttagagattttttttgattattttatttcgcgatttttttattttaggttgaatatatataatttagtttaagtttttttttatttgtaattatttttttaaaatgattttttttgttttttgttttattttgttagaatgtagggattttgtttgttttgtcgtatttgtggttttaaaagttcgatttgtttatttttgtatttgttaaatattagaaaattaaatatattatttggttggggtttagagtttaggaaaaagttttttttgtttttaagaggaaggttttttaaagagttatgtttaggatggtttttttgcggtatttaaaaagttagggtagtggtagttgagagttagaaaggatttgttttttttatttgttgattttgtagggtttttagtattttagttttgtattttattgattattaaaacgtttattttgaaggagggtaatgggagtagggagtagtggtgataagaagaaaataaaaggattttttttttttttttttaagattaatgtttagaataggtttagtgttagaagtttagtttggatagtataagtagattttatttatataaaatatgtaaaaaaaaaaaaaaaaaattagttaggtgtgatgttgtatgtttgtggttttagttatttgggagattgaagggggaggattattggagttttttatggttaaggttgtagtgagttttgattatattttagtttggataatagagtaagagattttgttttaaaataaaataaaatatatatatatatatatataaataaataaaaaaagaaataaaataggaagttgaagaagataatgaaagcgatttgaaatagaggaatatagaattatgaaatgaatagggtgtaatatggaaaataataaaattaagaatgaagagaaggaaaagtaaggttaagtttgaggtttataagggtaaattaagataggtatgaaatttagagaaagtaaaaatgagaagttacgatgttaggtagagagaatacgtgaattaaaataaatatttaatttttggagtaatttatttttataaggagaaggtttcgtaagtagatagtgttgtgtatgggagatttgtttttttaaaggtagttgttaaatggttttagatagttgaaggaaatatgtattaaattttaggttagttttatttttttagaagaggagttgtttttttggataaaattcgtaattttttgttgtgcgtggttttttttgtttattttaggtgttttttttatttttagtgaaagaagttaagattagtaagtatttatatagtagcgttttagtttttttattgggtatattataatgtaaagagagtagtttatatttggttatttgttaggatattagaagattgggagataggtagtataagaaatggtttaattttttttttttattgtgttgtagaatgattatttttaatatgaaattgattataatatattttttatattgttttgtgtttgatagtagtggattttgaatattaaattttttttgaatagttattttgagtgatatattgtgttgggtgttgtggttatatggatgaatggagttggttttgttaattattaaatataaaagtatgtgatagttatttgagagatttatgtaggggagagtttaggggaaggtgattgattattgttttttagggggaggtagaaaatgttttttggaggagatgatgggtggattaaggaagatgagttgagtaggagttgtagttattagttagggaggaagggtatttagagtagaggaagtaaggtgagtaaaggtattaagatgtgatattattggattgttaagttatttagtgtggtagagtagggtaaaggaggtaagaaagaaggaagaggattaaattatagggtgagtaattttgaaaagtaatagatttattaggagtaaatatttattattataaatttagatttttacgttattatttgtttttttagggtaatttgagttttttgtttgatttagtataatatgaatttaaattagggttgttttgatttttttaggtacggtagtagataattttttgaatatttatttgtagatagagtttgttagtgttagtattttttgtgtatttataaggtgagtatagtagaaaaagaagaatatggtttttgatttttaggaatttgttttttaagagaagatattttgaagtgataagttgttataagttagtgttttaaattatggaagaataatttgagtagagtattttatattgtagaagattttttagaggagaagttatttttgaaatgaatttagaaaaatgtggggaaagatgtatttatatatattttaagattaaagatattaatgttgtttttttagtttattgtcgaatgtttatttttaaataaattaaaagttaataggatgttatttaaaatatgtaagttttattttttttattgttatgagtatttaggtaaaagtatggaatagttatttaaaattttgttaagggtttttttgttttttttgtattatttgttgttagattatagtttatggttgatgaaagtgatattagtattttatttttatgtttttatttttttatttttaga

SEQ ID NO: 1214 - DNA, 9888 bp, Artificial Sequence
  chemically treated genomic DNA (Homo sapiens)
tttagggataagagaataggaatatgaagatgaagtattgatattatttttattagttatggattgtggtttggtagtaggtagtatagaaaaaatagaaaggtttttggtaagattttaaatgattgttttatgtttttatttgagtgtttatagtagtggaggaaatgggatttgtatgttttaagtaatattttattagtttttggtttgtttgggaataaatattcgataataaattgaagagatagtattaatgtttttgattttaaaatatatatggatgtatttttttttatatttttttaaatttattttaaaagtaattttttttttaagaagttttttatagtatagagtattttgtttagattgtttttttatagtttaaaatattaatttataatagtttgttattttagggtgtttttttttaaaaggtaagtttttgggggttaagaattatgtttttttttttttattatatttattttgtgggtgtataagaaatgttgatattgataaattttatttgtaaataagtatttaagaaattgtttgttatcgtgtttgggaaaattaaaataattttagtttggatttatgttgtgttaagttaaataaaaggtttaagttgttttaaaaggataggtaataacgtgaaagtttgaatttatgatggtgagtgtttatttttgatgagtttgttgttttttagaattatttattttgtgatttaattttttttttttttttttgttttttttgttttattttgttatattgaatagtttggtagtttagtagtgttatattttggtgtttttgtttattttgttttttttgttttgaatattttttttttttggttggtagttataatttttgtttaatttattttttttaatttatttattattttttttaggaagtattttttgtttttttttgggaagtagtgattagttatttttttttggatttttttttgtatggattttttaggtaattattatatgtttttgtgtttaatagttaataaggttaattttatttatttatgtggttataatatttagtataatatgttatttagagtagttatttaaaaaaaatttggtatttaaaatttattgttgttaaatataaaataatgtgaagaatatattgtaattaattttatattgaaaataattattttatagtataatggagaaagaagattaggttattttttgtgttgtttattttttagttttttggtattttggtaggtgattagatatggattgttttttttgtattgtagtatgtttagtaaggaaattgagacgttattgtgtaagtgtttattgattttggttttttttattggaaataaggaaaatatttaaaataggtagaagagattacgtataataggagattgcgggttttgtttaaaaaagtagttttttttttggaggaatgagattggtttgaaatttgatatatgttttttttaattatttggaattatttggtaattatttttgagagggtaggttttttatgtatagtattgtttgtttacgaaattttttttttgtgagagtgagttgttttaaaaattgaatgtttattttaatttacgtattttttttgtttagtatcgtgattttttatttttattttttttaggttttatatttgttttgatttatttttatgaattttaaatttaattttgtttttttttttttttatttttagttttgttattttttatgttgtattttatttattttataattttatgtttttttattttaaatcgtttttattattttttttagttttttattttgtttttttttttgtttgtttgtgtgtgtatgtgtgtgtgttttgttttgttttgagatagggttttttgttttgttatttaagttggagtatgattagggtttattgtagttttgattatgaggggttttagtgattttttttttttagttttttaagtagttaggattataggtatgtaatattatatttggttaattttttttttttttttttatatgttttgtataggtgaggtttgtttatgttgtttaggttgaatttttagtattaagtttattttaaatattaattttaaaagaaaaaaaaaaaagtttttttgttttttttttattattattattttttatttttattatttttttttaaaatgaacgttttaatgattagtgagatgtaagattgaagtattggaagttttgtagagttaataaataggggagatagattttttttggtttttagttgttattgttttagttttttaggtatcgtagaaagattattttgagtatagttttttaaagaattttttttttggaggtaggaggaatttttttttaggttttaagttttagttaaatagtatatttaattttttggtatttaatagatatagaggtaaataaatcgggtttttggaattataagtgcgataagatagataggatttttgtattttgatagggtgagataaagaatagaaaaggttattttaaaagggtgattataagtgaagagggatttgaattgggttgtatgtgtttaatttgagatgggggggtcgcgaggtggggtgattagagaaggtttttgagggtgtaatattttagttgagtttgtagaagagcgagattgtttttgtagtaggttaggaggagaatgtttttgggttgagggaatagtaagtatagatgttttaaagtttgtttgatgagtagagaagttttttttttttttaattatttgttaaatgttgttagatttatatttgaaaattatattgtttgtttttagagtattttttttggtttataatttatttgttattattatgttttggattttaatgtttgttaattttaatatattttagtaaataatttattggttatttattgtgttttcggtattgagtatttattattgagtaaaataaagtttttgtttatttttttgtatgaatgtgtgtgtaaataaatagtgaaaaaaggattaagaaaataggaatggtttgttattgtttattagtgtaatagtattagatatataagatttatattcgttgaatgaatgtttttaaggaaaaaaatgtaacgtagaaattatatatgttattggattttaaatataatttggatatagatatatatgacgcgtatatgaaggtagaaataaatatgttaaaatattaaaaatagttgttttttgattttgttcgtatcgtataataagtatgtattttttagcgggttttttttttgtttgtttgttttgttttgatagggttttattttgttatttaggttggagtgtagtggtatgattatagtttattgtagtttttattttttgggtttaagtgaattttttatttcggtttttagagtagttgggattacgggtataaattattatgtttagttaatttttgtatttttttgtagagataaggttttgttatgttgtttaggttgattttgaatttttgggtataggtaattatttcgtttgggttttttaaagcgttgggattataggcgtgagttattgcgtttggtttagtatgtatttttaaaagtattgattttatttaatgaaatataaaataaatttagtgggataggttttaagttttagtttatgagttgtaggggaaaataagattaatattatttgtttttttttgttaggatattaattttttattaggtttggttattattgttttttaggttgttttatattttttaaatatgatttaaagtaatgaaaagaaggaaaataatgttaaaaagttattaggtaatggaattagatattatttatattggttgggaataggaagaagattcgatggtttatttattttttaaaaaagtagttatttataaattaataggagtttaggtaatacggagattgtttatagaaggtataaaaagtatggcgcgtttttattatttttttaattttaggtatcgagagtttgtttttatttaatatgttttttttagttttagagttcgcgtttattttatttaaagtaaatagttgagttgttttgtttatagtgaattttgtatataggttatttacgtatagtacgtttttagtaatatttggttaggtttttgttcgtttagtttagcgtatggggtatatatgaagcgtttttcgaaggggcgagttagaatttaatgttttaatgaatattttatttattaaggtattaagggaatatagggtatatttttattacggatatagtacgggttttagtaatatttttacgtatttgtgtattttagaataagtttttatttagggcgtttagttcgcgtttttttggtcgattggtttaatttcgaaaatacgatttacgttttttttagggacgtagttagattttgcgtaaatgttggtcgcgtatacgacgttattaaataagttttatttcgggttttgcgtggttttcgtatttttcgttatatattttcgggatttgagtattgtattttttagagaattttgtttttaaataggtacggtttgttgtgagtttcgtttcgcgatttttgttcgattgaggagagttttagtttcgtcgcggacgcgcgaattcgtttcggggttttatcggagaaggagtatagtagtaatattatggtcgttagaagtaatttaggaaagcgttaggaaggaaagggatattcgcggcggtcgggaggttttatgcgcggcgcggaagacgttgttattttttcggaggaaagtagagaaatcgagagttagtcgagtagggaagttttttttgggtttagatatgggacgtaataatttttaatttataaagtatttagtgttgtaggataggtgggcgtggttcgagtcgcgttcggggcggaagtgcgtcgagttattagggcggttggggttaatcggcgggtcgcggggcggagtttcggcgtttatgggtagtttttggttttcgagaggttagggggaggttttggcggaatttaatagaataggtttttcgaggtcgtttttttttttgttaagtttttggtttattatttcggaagtttgaggcgttttgcgggaaaggattggttcgtcgttatatttgtgatttaggtagggtggagagaaaattaagttgttttggtaatagttttcgggaattcgggagttaagaataaagtatttcgatttaaaaatagagatttagagtttagatagggggttatcgtgggttagtattttttagggttagttttattttggggtattgtaggttgttaggattgtttgggtttttatttggtatttggtattagttaggtattattgggaataatatttgagttttttttgtttgaatgtttgttattggatcgtttcggggtcgttttgtttttataattttaaaggtttggtttttgtatttttagtttttaaggtaatttgttttttgtttttttttttggaggggattttttcgaatttaatttattaagtaatattaggtaattagaatattgagattttatggggtttttgtttttgagtaattaaattttttattgaagacgaaatatatatgtatgaataatgtaaggataagggtgttttaagtgttaaatttttggaagtaataaatgtagaaggattcggatgggtagaaattgttaggtgaagagtggataagggggagaatttttttggtgaaataatttgaggaataatattggaaaattaagaatgagtaggattgatttgtaggattgtgagtaaatcggaatgatcggtaaaaggaaaaggatatgattgatattaaaagagtaaataaagagttgatattttttttttttagattggtaaagaattaaaacgttagttaatgtgagtgaacgtgttgtagggggattagtattttgtaatataattttttagtatgttaaaagttttaaagtggatatgatttgtgttaggtttttagtttttagagaaattattagagttgtgattaaagttttgatgtgattaaaattttgatgtgattaatttttgaaaaaatgtaaattttaagtgtttagtaaaagtaataaagaatttttggtagttatttttgtgtgatggaattttatgtagtaaatattgtaaaagaatattaaatatgagaaattatgatattattgtaagtggaaaaagtagagtttaaattggtatgtgttttttggtagtttttttattaaaataaaagtattatattgatatgtataaaaagaaattaggaatatagtaaaattaataatggttgataagattatagatattttattttttttatgttttttagttttttatgttgattttatgttatatttagaataaagtaaagaaaatgtatttaaaaaattaaatttatatattaagggttgttttgtttatagaattatgggagtagaatttgtattatatagggttaatttatgagaggacggtgaggaattggatgtttagtgtataaatttaaaatgggttttatagaattatagagtttaagtgtatttaatatagttttataatcgagatgtattgaataatttttgggtttattaaattatggaattttttttttttgttcgattaataaaaatttttaaatttttggtagagattataagatattaagtgtggaggtggtatattagataaatattttagtattttggattataaaatttaatattttatgatagtaattaaagcgggtataattaaagagatggtaaataggaaatttaatgcgggaaaattattatttttgttaatatatggtgttaaagagtgatataatagatatgttttgtggtttaaagttagtttttatttgtgaaagtggatagtttatttattgtttttagtaataataaatattaaaaattttttatttatttttaggtttggaagaaaaatgttttttttttttatgagaaattttattataaattatagaagaaaaaatagtgttaatgtttgattgtttagtttcgggtgttaaattagatttaaagattggtattttgttgaaatttttttttaattagtaaaatttttatttttgagttaagttatttttaatatattcgaagatttttatattaaatatttaaaatttatttttatttgatttaattgaggttttatttgaatggttgagttttgttttttattttttggataagtttcgtgagttagggatagtatttttttatatttatagtgttaaaatttatagtaggtgtataatgaataattggtaaatattggatgaaataaatggtttttgtggttaagtgtatttaatatgtttttgttagtttttttttagtatgaatttattaaatgtttataaagttttgagagattttgatttaaataattttaattttaggaaataaattaagattggtttgtaaaagggatgagttataattgtttgtatagtaaatttttttaaattaggtgttgtaagtttatttgtgaagtggagttgtggtttattttttagttttgagattattttagtgattgagtttaaagggagggtgtcgatagtgaattttttgaggttttaataggggtagaatttgaagttaaagttttgaatgaaggggatttaggagattaaatattaatgttttttttaattttttttaaagattttgttaaattgttaaagagaagaaaaggagagaatgaggatatgtgtgtttgtagattaggtttagaattatggaatttttttttaggggtttatgaagggtagtgtgggtggaggttggtgtgtagggatgttattaaattgtggttaatttttttaaagtttgatgttagatggttttttgttttttaaattagtatattgtatttgtattatgttttttaggagtaggtgtagtagtatgaatgggtttttatttgtatttattaagtatttgttagttaattgatttttacggttagttgtgtttgatttttttttttgttattattaagagtatttttgtggtattatatattaatatagggattatgagaataattaggtatagaaagaagtgtattttttagaaggaatgggtagtattttgtttttttttggtttttgaaggtttttaaaatataagtatattagaaattatattttataagtagatttgtaaaataaaaatattttattttttttttattgtaatggtagagatagaaaattttatttaagttttataaattttatatatttagtgtgttaaaatagtaaataaaataaagaatgttagggttaggaatagttttagagagtaattggtgtttagtttttgttgatagggttttaatgtgtgaaggaatattaggttttttatttcgtattgaattggaaaaaaacgagatgggtatacgtggagtggttttaaggagtggagagtttagtaggtaaaaaagaagggagaagaaagaaggaagaagtttttttgtatagagatagagacgggggttttaaagttgagagtggagattttaagtggggtagaaattagttaggtatatataggttggaggaggcggtgtttgatttgtatagggtttagcggattggttttagtaggtatgttatttatatagttcgggaaaaaattggttttgttattttagtttattaatatgtaaatgtagggtattatgatgttttattcgtgtggggataggtggggttatgttgttaggtatatgttagcgtaagggtaagaggataattatgggaattattatgttgggtagatttaatttttaatggtcggtatttgtatatttaaggttgtttgtttggttttaagggtttgggtttttttttttgataagaaatttttttggagttgttttaaaagaaatgaaaattttttaaggatcgttttttttttttatttgtttaaaataattttttagtaatttttattatattttttttagttttttatggagataatttaattgttgttagggggttattgggtgacgattttttttggttattttttgttgaaaatggacgttgaatggggaatagtagttagggttttttttggggtttgtttaagggtttttggaaatagggcgtgtttacgcgtgatttagtttataatatttatttggaatttggttgtttttagaggagaagaaataatttgagttatagtattgagtatatagggtttaagtattaatataagatatataagtaagagagggtttaataaagggtttaattaattttataaagaagattggaatttattaaagagggattgtagttatttagggttaaagtttgtattttttttgagtttgttaatgattttgatttgatttttaagtaattgtaggtttttttgtattttagtagaggtgttaatttagaagtagtatgttttatttagaagtgtattattaattttaataaaaagttttagtagatttagtaaaattttgatgttttttttttgttagtaattattattttttttataaggataataattaagtaatatatatagtaatggaaattttttgtttaatattttagttagaaggtgttattatgtataattttattataaatagtagagtgagtatagtaatttttataagtgtggtgtagtagataatttttatttaaaattttattttttaagatatataatttttttttgggatttatgaagtttattggttttatttttttataaaaggaaa

SEQ ID NO: 1215 - DNA, 15825 bp, Artificial Sequence
  chemically treated genomic DNA (Homo sapiens)
atttcggggttggtatgtttttggtcggggaggggtatggaatgtttttggatggagatattatttgtggtttatggttatggtgattttagttattaggttgatgttttttggatttaggtagtttttgattaaggtgaatttaaaatgatagtgtttgtttaagatggtaatattcgtgttttgttattggtgattttggtttggagttgggtaggttttgggaaagaaatattggtggttgggtacggtggtttacgtttgtaattttagtattttggtaggttgaggcgggtggattacgtgaggttagtagttcgagattagtttggttaatatggtgaaattttttttttattaaaagtataaaaattagttagtatggtggtatatatttgtaattttagttatttaggagattgaggtagaagattcgtttgtagttgggaggtggaggttgtagtgagttaagatcgtgttattgtattttagttttggcgatagagtaagatttggtttttaaaaaataaataaataaataaataaataaaaatataaaagaaatattggtttatttgttggttattaattttatttttgttaattttatttgttttttggttttttaggaattagttttgatttttcgggtttaagttatttttttaagtattttagttttttaagtatttaggattataggtatgtattattatgtttggttaattttaattttttgtagagatggggttttgttatgttgtttaggtaggttttgaatttttggttttaagtaatttttttgtttttattatttaaagtgttgagattatagttatgagttattatgtttggttaggtatttgtattttttttttttatttatattttgttgaaatgttttatgtagggttttggttttttttttttttgttttttggtgatgattgatttaaggtttttagtttgttggttaatggtgttaggtattattataggtattttatatgtattaataattttaagagataagtaggtgtttttaatgtttttttttatagaagaggagattgaggtattgtggttaggtgattttttttttttttttttttttttttttttgttttttgagatggaatttcgttttgttaattagttggagtgtagtggtgtgatttcggtttattgtaagtttttttggagtttagggaagaggtttttgttaaagattttgtagtttgagttattaatgtatagaagaaatgtgaagagttaggttttaattattttggtttttttttttatttttttatattgttttagttttatttttttttttgtttttgagatggagtttttttcgttgtttaggttggagtgtaatggtgcgattttagtttattataatttttgtttttcgggtttaagcgatttttttgttttagtttttcgagtatttgggattataggtatatgttattatgttcggttaattttgtatttttagtagagatagggtttttttatgttggttagattggttttgaatttttggttttaggtgattcgtttgttttagttttttaaattgttgggattataggtgtgagttattgtgttcggttttatttttatttttgaaggatgttttttttggatatagaattttggatatatagttgtttttttttttttttaattttttagttatttttttttgagatagggttttatttttttgtttatgttggagtgtagtggtacgattatggtttattgtagtttttgttttttgggtttacgttatttttttgttttagttttttgagtagttgggattataggtgtgcgttattacgtttagttaatttttgtatttttagtagagatggggttttttttattatgttggttaggatggttttgatttcgtgattttgtgattcgttcgttttgggtttttaaagtattgggattataggtgtgagttatcgcgtttggtttatttgattatttagaatataattttgtgattggtgtgaagtagtgatttaattttatttttttatagtattatttggtaaatagtttattttttttttattgattatattatttttgtcgtatattgttttaagtatgtatgagttatttttaggttcgttttttgtttcgttggatatttgtttatttttgtgtttttagtatattatgattgttattttatatattattattattattatttttttttttttttgtagagttggggttttattgtgttgtttagattggtttcgaatttttggttttaggtgattttttttttttagttttttagtatgtcgagatgataggttttttttttttttttttttttgagagagagagtttgttttgttatttaggttggagtttagtgatacgattttagtttattgtaatttttgtttttcgggtttaagcgatttttttgttttagttttttgagtagttgcgattataggtgtgtattattatgttagttaatttttgtatttttagtagagatggggttttattatgttagttaggatggtttcgattttttgattttatgatttttttatttcggtcgtttaaagtgttgggattataggcgtgagttatcgcgttcggttttttgttttttttttgtttttttttttgtttttagttgagtttgttatatgggttttagtgttttattttagattttttgaattaaaatatttaggagaaaaatttaaggttttttttttttttttttttgagacggagttttattttgttatttaggttggagtgtagtcgcgtaattttggtttattataatttgtaatttttgtttttcgggtttaagcgatttttatgttttatttttttaagtttgggattataggcgtgtgttattatgtttagttaatttttgtatttttagtagagatggggttttattatgttggttaggttggttacgaatttttgattttaagttattcgttatttttagttttttaaagtgttgggattataggtgttagttattatatttggtttgttagtttttttgaggtagagttttgttttattatttagattggagtgtagtggtttatttttggtttattgtaatttttattttttgggtttaagcgatttttatgttatagtatgagaagtgggattatagggattagtaggtgggattataggtgtgagttattatatttagttaggtttagataattttaaaatttatttttttatttatttagaaatggagttttattatgttgtttcgtttggttttaaatttttggttttaaggaattttttttttttggttttttaaagggttaggtgataggtatgagttatattgcgtttagttttgagtttttgtgttcgagatatagtttatttagaatttttggttggtattttttatttggtatatgtagggtattttggattttttattatttttgagtattggtttgaatttatttgtttgtttttttttaggggttgtttcgtgtattttttgtttttagggtggggatggggttggatgtttggggttgtagaggggattagtagagggtgatttttttttttatgttattattttagattttggtttttgtttttttttaaatatatagtaattttggtttttagtttaggtgggaaagggagaaagaatcgattttttttagtttttttttgaaagtagtttaattggtattgtttaggaataaggagtttttgagagtgttggtattttacggtgttgatgttcggtagttttttgttgtgaattttgtttttgttttattttaatttaaggattttgtggagggaattttaggtttttttaaagtttttgtagtattagttgtttttaaggtttaatatagtgaagtgatagggagataggattttgggggagtttggggataattgtgggagtttttgtaaggtgggtaagagtttggttatggtattttttggtttattttataaaaaaggtggatgtttttgagatttagttttgttatgtttattatagttttattagttttttttggatgtttgatttttagttgttaaatatttaggtgttagtagttgggggtggggtaggataagaaggggggtgtttattttaatttttttgtttaaattatttattttaaagtattgtgaagaaggttggattagtgttaaatttaataaagttaataaagtaaagtattgtagtgagtatataataaatagttgttgtatgaggaattttttgaaatgaatttaagatgagttttgaaaaacgagtgggagtaagtcgtgtacggaagtagaggtttagtagaggtttagcgttaagttttagaggtttgagagggtaagttttggtgggggaaaaggtagaagttgtgattggttgtttttgagagtgtaagtagttatgtaaagttgggaaaattagacggcggtcggagtcgtgaattaggggtaaatggaggatggtgttggggtagttattagtttgtcggaatggaagaagaggggcgtttgggggcggtaaggtttaaaggatattggaggggtttcgggatttggggtaggattataggtttagtttatttaaaggtggtttcgtgttaggtttttttagaattaggttgaaaagaattttagggttagataggttggagatgagaaattggattatgtaggaagtattgtcggaggcgtgtttttgattttattattttgagtcgtttacggttggggtagttttcgaggttttattttaaggggcgggtcggggcggggtttcgttgtttttttttagaggtcgcgtttgttgttgagtagatgtagtagtcgaaattgcgcggaggtatagaggtcggggagagcgttttgggttcgagggtttaggtaggggttgagttattatttgatcgtaagttgcgtcgtgtcgtcggttttgtaggtattatgagttaggatatcgaggtggatatgaaggaggtggagttgaatgagttagagttcgagaagtagtcgatgaacgcggcgtttggggcggttatgtttttggcgggagtcgagaagaatggtttggtgaagattaaggtggcggaagacgaggcggaggcggtagtcgcggttaagtttacgggtttgtttaaggaggagttgttgaaggtggtaggtagtttcggttgggtacgtattcgttgggtattgttgttgtttttttggttcggttggttcggtatgtttgttggtgtcgtggttataatcgtgcgagcgtcgcgttgtcgcgagttatcggcgtagaagtggtggtatacgggcgttttttatcgtatcggcgatttttaggttttttagggttacggcgcgggtaatttggcgggtgagtgtagcgcgttttcgtttcgggtattttcggttgaatttggtggtttgtatcgatttttttttttgtttttagaaaaaaaaaaagaatagttttttttttttttttttagaagatttttttttttgtttgtttttgttttttgttttgtgttttttttgagattgagtttagttttgttatttaggttggagtgtagtggtgtaatttcggtttattgtagtttttgttttttgggtttaagtgatttttttgttttagttttttgggtaattttttgtatttttagtagagatagggttttatcgtgttagttaggatggtttttattttttgatttcgtgatttattagtttcggttttttaaagtgttgggattataggcgtgagttattatgtttggtttataattataaatttttttttttttgagatggagttttgttttgtcgtttaggttggagtgtagtggtgcgattttggtttattgtaatttttatttttcgggtttaagtaatttttttgttttagttttcggagtagttgggattataggcgcggattattatgtttagttaatttttgtatttttagtagagacgaggttttattatattgtttaggttggtttagaatttttgattttgtgatttattcgttttggttttttaaagtgttgggattatagatgagttattgcgttcggtttataattttttttttttttttgagacggagttttttttttgttatttagaatggagtgtattggtgcgattttgatttattgtaatttttgttttacgggtttaagcgatttttttgttttagttttgcgagtagttgggattataggtatgtgttattatatttggttaattttgtatttgtagtagagatgggggtttttttgtgttggttaggttggtttttgaatttttgattttaggtgattcgttcgttttggttttagaaagtgatgggattagaggcgtgagttattgggtttagttataaatttttataattggtttggaggtagaatgtaaggatattggaggatttaggaagatatttttgagtaagtgatatttgaagtgaaatttgaaggagtgagtagtagtttattagataaagggattgggggtggaggatagggaggagagagttttaagtggaggaagtagtgtttaaaggttttaaaataggtgtatttgaggaattgaaaggaggatataggtgggaatatagaatataagaaagtaggagataagaggtaagaggtattgtagaagtaggtagtatatgtagagtttttagagttattgtttagatttgttttttatttttttttttttttgagacggagttttgttttgttgtttaggttggagtgtagtggcgtgatttcggtttattgtaattttcgttttttgggtttacgttatttttttgttttagtttttcgagtagttgggattataggcgttcgttattacgtttagttaattttttgtatttttagtagagatggggttttattatgttagttaggatggtttggattttttgattttgtgattcgtttgtttcggttttttaaagtgttgggattataggcgtgagttatcgtgttcggttaagggtatttttattttataggcggttgtaaattgtttttttagaacggatgtattaattaatgttgttatttatgtaatttgtatttttttaattatttggtttagttagatgtttttatattgttaatttgacggatatgaaattttatttttttgttattttaatttgtattttttagattattaatgaggttttgtaatttttattatttttttgtatatttaattttgtgaattggtttttttgtttttgagacggttttattttgtcgtttaggttggagtgtagtggtgtgattttagtttattgtaatttttgtttttcgtgtttaagtgatttttttattttagtttttcgaatagttgggacgataggtttgtattattacgtttcgttaatttttgtatttttagtagagacggggttttttatgttggttaggttgttttttggttaggtttgtttcgaatttttgattttgtgatttgttcgttttggttttttaaagtgttgggattatagacgtgagttatcgtatttggttttttttgttttttttttaaaattttttttttattttgaggttagaaagatatttttatttttttttgaaattttatttatttatttatttatttatttttttttgagatagagttttattttgttgttagtttggagtgtagtggcgtgatttcggtttattgtaatttttgttttttaggtttaagttatttttttgttttagttttttaggtagatgggattataggtgtgcgttattacgtttagttaatttttgtatttttagtagagatggggttttttttattatgttggttaggatggttttgatttcgtgattttgtgattcgttcgttttggttttttaaagtattgggattataggtgtgagttatcgcgtttggtttatttgattatttagaatataattttgtgattggtgtgaagtagtgatttaattttatttttttatagtattatttggtaaatagtttattttttttttattgattatattatttttgtcgtatattgttttaagtatgtatgagttatttttaggttcgttttttgtttcgttggatatttgtttatttttgtgtttttagtatattatgattgttattttatatattattattattattatttttttttttttttgtagagttggggttttattgtgttgtttagattggtttcgaatttttggttttaggtgattttttttttttagttttttagaatgtcgagatgataggtaataataataataataataataattattattattattattattattattattatttgagatggagttttgttttgtcgtttaggttggagtgtattggcgcgatttttatttattgtaagtttcgttttttggtttaaggtttaggtgttttttttgttttagttttttgagtagttgggattataggcgtgtattattatatttagttaatttttgtattttttagtagagacggtttttattatatttcggttaggttagtttcgaatttttgattttaggtgatttgtttttttaggttttttaaagtattgggattataggcgtgagttattatattcggtttatttttgaatttttttttgggttataataagttattttttaaggtttggtttttaggttttgttaggtgagagtagagatgttgttaatttttttttttaagtgatttttttgagttttttatttagtgttttgaatgttatgagttttatttttattgtggttggtgggaagataaattgtttttggtttgtgtgaattttgtgaattatttaggtttttttattaaatgtatgtattaattattatttatttgaagattttattaataataaaattttttataaatttttagtgttttatgtagtttttttttttttagttttttgttttgtgaatttttgttatttgggtttttttagatttttaattttgtttttttaatttagggagatttttgggttttaagtagattttttttttttgttttgtagtttgtaaattttttttaggaagtaaattggtttataaggtttattttgtttgtttgttttttttaggaataattgttttgaattgtttattgtttaatgtttaaaaatagttattatataaatttaatttgttaggtttttttattagttaaaggtaggagagtatttattatttattaatttttgtttttttattttggttggaagtagaattttaataattgatatattattgtagttttatgattttttgtcgaatatatttttataaatagaaatgattgaagatattaaagataatatttttttatttttatgtatagtataacgacggtattgtaatataattaaagaagaagatattatttagaaattttttatttggttttagttgttagaggtatttaaattagagtaattttatttttaataggggttaggttaaataaggttgagatttattgggtcgtatttttagaaggttaggtatttttaattataggatgagatagaagttcggtaggattggtagtataagatataggttataaagattttgttgataaaataggatgtagtaaagaagtttattaaaatttattaaagtttagatggtaatgaaagtgatttttggttatttttattgtttattatatgttaattaattataatgtattaggacgttgaaagatatttttattagtattattatagtttataaatgttatggtaatatttagacggtattttatatagtttaaaaaggggaggaatttttagttttgggaattgtttgttttttttttagaaaatttatgagtaatttattttttgtttagtatataattaagaaataattttaaaaatagttaattagtagtttttagggttgttttgtttgtggagtagttatttatttgtttgtttatttttttaataaaattgtttttattttattttatgaatttatttgaaatttttttttatgtaaggtttaagaacgtttttttggagtttggattaggatttttttttagtaatatagttacgtggaggatgaggtggtaggatggtttgagtttaggaggttaaggttttagtgagttgtgattatgttattgtattttagtttgggtgatagagtgagattttgttttaaaaaaagaaaatgtattttttttgtattacgtatggaattaattgagagatatagttgttaaatattttattatgtggttaaaaataataaaaagtatatgttttttgaaggtaaaaagggtttaaaagaaaagaagaagaaagtagttatatatgttttatttttttttttagatttattaattaaataatttattttttattttataaggaaataagaagttagaagaatggaagtttttttttttattcgttatttagtatttttttttagagaggaagaaagatatttttaattatataaggaatattgttgttttaaatgtatttagaatggaaaaggaaaagttttagttattaggaaataataaatttttaaaataatttttttattgtaaaaaaaaaaaaaattagaaaattgggtttagtacggtggtttatgtttgtaattttagtattttaggaggttaaggtaggcggattatgtggttaggagttcgagattagtttggttaatatagtgaaattttatttttattaaaaataaaaaataaaaataaaaaaattagtcgggtgtggtggtaggtatttgtaattttagttatttgggaggttgaggtaaggagaatcgtttgaatttagggggtagaggttgtagtgagtcgggattatgttattgtattttagtttggtaataaaatgagattttttttttaaaaaaaaaaaaaaaaaaaattttagaaaattgaaggaaatgtgaaaaataataatgtttagatattggataataggtagcgtaggattgtaatttttgtgagaagggaaatagattatttaaggtttattattaggttgatgtaaaagtaattgtggtttttgttattatttttaattgtaaaatttgtaattatttttgtattaatttttattatttaggttttttttttgggagtaatttttggattgtagtgtggagatgtggaatttaaatagagttagtaattttattgagttgaggagaataaaagagaagtttaggatggttaaggtagttagattttttaggagaggagagagttatgtaaataaatttgtagaatataaaaagtatttttataatttaataaaaagaagttaaatattttaatttaaatataggtaaaaaaaaattatatatacgttttattacggtagatatatgaatagttaataagtatatgaaaaaatgtttaatattattagttattaggaaaatgtaagttagattataatgagatgtttttttatatttatataaatggttaaaatgaaaagattggatatattaagatgtcggtaagaatgtggaataattggaatttttatttattgttggtagaaatgtaaaatttggaaatattttggaaaataatttgatagtttttgataaagttaaatatatgatttagtaattttatttttaggtatttatttaagagatatgaaagtatatgtttttttattatatataaatgtttatggtagttttttttataatagttaaaaattggaaataatataaatgtttattaataggtgaatgaataagtaaattgtggttatatatataatggaatattatttagtattaaaaaggaatggggttaggcgcggtggtttacgattgtaattttagtattttgggaggtcgagatgggcggattatgaggttaagagattgagattattttggttaatatggtgaaatttcgtttttattaaaaatataaaaattagttgggtttggtggcgtatatttgtagttttagttattcgggaggttgaggtaggagaattttttgaattcgggaggtggaggttgtagtgagtggagattacgttattatattttagtttggttatagagtgagattgtattttaataataaaaaaaggaatgaattattggtatattataaggtggatgaattttaaaaatattttgttgagtaaaagaagttagatataaaagaggatatattgtatgatattatttatttgaaattttagaaaagataaatttattgtttagggtagaagatgagatttggttaggatatagtattagggaattgttggggtgggagaggtaggagatgaaaatgttttatatagtggttatatggtataaaaatttattagagttgtttgtaattatagtattttgggaggtcgaggtaggtgaattatttgaggttaggagtttgagattagtttggttaatatggtgaaatttcgtttttattaaaaatataaaaattagtcgggcgtcgtagtttatatttgtagtattagttatttaggaggttgaagtatgagtattttttgaatttaggaggcggacgttgtagtgagttgagatggtattaatgtattttagtttgggtaatataacgagattttgtttttaaaaaaaaaaaaaattgttagagtttgtaaaaatgtatttttaaaattgatgtattttattgtatatattaaattttaataaagttttatttaggtgtatgaattatgtttaattaattagtatttttatttagggttttgatttttgcgatagaatataaagttgtaggaatatttgggaaatgatatataatagtaatcgttttttgtttttttgggggtttttttgaaaatttcgggtttttttaatacggggggggatatataaaaaaaaaaaaaaaaaaaataattatagtatgataagaaagagaaaatgtgttttttttttttgtagtagtagaaataaaaagtagatttttttttgtatcgtaaaattatttttgtaaatgttatttttaataagggagtttcgttagatagttaattttatgagatttgttttgttttgcgaaagtaatttttaatttttaaaaagtttgtgattttgattgtttgttttttttaatagtgtgttgttttggtaataatatttaaatttatatttgtgttttttagaaggtataaatatttgtgagttttttttgttaagttagagggggagtattgatatatttttttttttttacgcgtatgaagtagaataaatttagtgattgtaagattttttaattaaataaagaatttgagaatattgttttatttaaattaatatggagattaggggtggtggtttacgtttataattttagtattttgggaggttgaggtaggaggattgtttgagtttaggagtttgagacgagtttgggtaatatagtgatattttttgtttttataaaataaaaaaaattagttgggtgtggtggtgtgtttttgtagttttatttatttgggaggttgaggtgggaggattttttgagtttagtaatgtgaggtcgtagtgagttattttagtttgggtgatagagtgagattttttagtttttttttttttttttttttttttttttttttttttgagacggagttttgttttgttatttaggttggagtgtaatggtgttatttcggtttattgtattttttgttttttgggtttaaataatttttttgttttagtttttcgagtatttgggattatagttgttcgttattatggttggttaatttttgtatttttagtagagacgggtttttattatgttagttaggttgattttgaatttttgattttaggttatttacgtgttttggttttttaaagtgttgtagttataggtgtgagttattatattcggttttttaatttttaaaaaaaaaattatgtaggtagtaagttagaggtagcggttatgaagagaggtggaagttgagaataagtatttttgggaataaggtaagtgagttgattaaggataagtataaagatgtgaggtggagttatgaggtttttgagtagaggttaggaattttatatttgttttggtgttaatttgttagagagtgggagttttttttagtagtgtttgattgtttatgtgtcgggttagagaagatggatggtagtattgatttagggtggtgaatttgtggtagaagtaaggggtcgggggattatgagtattggtggtgttgaggaaagattgtagggtttaggttgtttagggaaagaaagtatttgttgaggatgggtaaggatagggtttggaggaagatgagaggttgagggggtgggagagtgagagtggaagatattggggttttagtttttgaagcgggagtagttgagggttttggatttggttgatatagggtagagggtaaggtttttggggttgaagatattatgatattggtattattgagttgaatgggttatttagttaggatggtggttagatttaagaggaggaggttgggcgtagtgatttatgtttgtaattttaggagtgagattttgggaggtcgaggtgggaggattataaggttaggagtttgagattagtttggttaatatggtgaatttcgtttttattaaaaaaaaaaaaattagttgggcgtggtggcgtgtgtttgtagttttagttatttgggaggttgaggtaggagaattgtttgaattttggaggcggaggttgtaggttgtaataagtcgagattgcgttattgtattttagtttggtgatagatcgagatttcgttttaaaaaaaaaagaaagaaaagttttgaattttttttttggatgttttgatttagaaggtttgggatgggatattagaatttatgtaataagtttagttaagaataagagaaagaataaaaaaagaataagaggtcgggcgcggtggtttacgtttgtaattttagtattttgggcggtcgaggtgggaggattatgaggttaggagatcgagattattttggttaatatggtgaaattttatttttattaaaaatataaaaattagttggtatgatggtgtatatttgtaatcgtagttatttagaagattgaggtaggagaatcgtttgaattcgggaggtagaggttgtagtgagttgagatcgtgttattgaattttagtttgggtgatagagtagggtttttttttttaaaaaaaaaaaaaaaaaaaaaagtttaaaaaaacggggggggttttgggaaaaagggggttggttgggaaaattggtttaaaaaaaaaattttcgggttttgtatcgacgattgttttttttttttttatttttttttcggtatattgttttttttttttttttttgaagaaagtcgattcgttttttatttcgttacgagggtgggtgatttagcgtttttttttttcgcggcgttagaagttagttgtaatcggtttttgaagtaatgtgtaggattttttatattagtttttttgagtttcgtgatttagttttgtttttttttttttttttttgtttttttttcgtttatttttaggcgttgggagaagggagggtggggaggttaggggttttttagaggggttttatttgttaatttagtttttattttagg

SEQ ID NO: 1216 - DNA, 15825 bp, Artificial Sequence
  chemically treated genomic DNA (Homo sapiens)
tttgaaatgggggttgggttaataagtgaggtttttttgagaggtttttgatttttttattttttttttttttagcgtttaagggtggacggggagggggtaaagggggagagagggaggtaaggttgaattacgagatttagaggagttgatgtaaggagttttgtatattattttagaaatcggttgtaattggtttttggcgtcgcggggaaggaggacgttgagttatttattttcgtgacggagtgaggggcgggtcggttttttttaaagaaaggagggaaggataatgtgtcggggagggggtgggggaagggggaatagtcgtcggtataaaattcgggggttttttttttgaattaatttttttaattaatttttttttttttaaaatttttttcgtttttttgaatttttttttttttttttttttttgagagagagagttttgttttgttatttaggttggagtttagtgatacgattttagtttattgtaatttttgtttttcgggtttaagcgatttttttgttttagttttttgagtagttgcgattataggtgtgtattattatgttagttaatttttgtatttttagtagagatggggttttattatgttagttaggatggtttcgattttttgattttatgatttttttatttcggtcgtttaaagtgttgggattataggcgtgagttatcgcgttcggttttttgttttttttttgtttttttttttgtttttagttgagtttgttatatgggttttagtgttttattttagattttttgaattaaaatatttaggagaaaaatttaaggttttttttttttttttttttgagacggagtttcgatttgttattaggttggagtgtagtggcgtaatttcggtttattataatttgtaattttcgtttttagggtttaagtaatttttttgttttaattttttaagtagttgagattataggtatacgttattacgtttagttaatttttttttttttagtagagacggggtttattatattggttaggttggttttaaatttttgattttgtgatttttttatttcggttttttaaaattttatttttgggattataggtataagttattgcgtttagttttttttttttaaatttggttattattttggttgggtgatttatttaatttaatagtgttagtgttatgatgtttttagttttaaggattttattttttattttgtgttagttaaatttagagtttttaattgttttcgttttaagagttaaaattttaatgttttttatttttatttttttatttttttagttttttatttttttttaggttttgtttttgtttatttttagtaagtgttttttttttttgagtagtttggattttgtagtttttttttagtattattaatatttatgatttttcgattttttgtttttattataaatttattattttgggttaatgttattatttattttttttgattcgatatatgggtagttaggtattgttggaaaaagtttttattttttggtagattggtattagaataaatgtagggtttttgatttttgtttaggagttttatggttttattttatatttttgtgtttgtttttagttaatttatttgttttatttttaaaagtgtttgtttttaatttttatttttttttatggtcgttatttttgatttgttgtttgtatgattttttttttaagagttggggggtcgggtgtggtggtttatatttgtaattgtaatattttgggaggttaaggtacgtggataatttgaggttaggagtttaagattagtttggttaatatggtgaaaattcgtttttattaaaaatataaaaattagttagttatggtggcgggtagttgtagttttaggtattcgggaggttgaggtaggagaattgtttgaatttaggaggtagagggtgtagtgagtcgagatggtattattgtattttagtttgggtgatagagtaagatttcgttttaaaaaaaaaaaaaaaaaaaaaaaaaaaaaaaaaagagttggggggttttattttgttatttaggttggagtggtttattgcgattttatattattgggtttaagggatttttttattttagttttttaagtagataggattataggagtatattattatatttagttaattttttttattttgtagagataaagagtgttattgtgttgtttaagttcgttttaagtttttgggtttaaataatttttttattttagttttttaaaatgttgggattataggcgtgagttattatttttggtttttatgttgatttaaatgagataatatttttaaattttttgtttgattaagaaattttgtagttattgggtttattttattttatgcgcgtgggagaagaggaatgtgttaatgttttttttttggtttaataaagaaaatttataggtatttatattttttagaaaatatagatgtgaatttaaatattattgttagggtaatatattattaaggaagataagtaattagaattataagttttttaaaagttaaaggttattttcgtaggataaagtaagttttataaagttaattgtttgacgagatttttttgttagaaataatatttgtaaagatggttttacgatgtaaaaaagaatttgttttttatttttgttgttgtagaaggagagggtatatttttttttttttattatattgtggttattttttttttttttttttttgtgtgttttttttcgtgttaaaagggttcgggatttttaagggggtttttaaaaaaataaagggcggttgttattgtgtgttattttttaaatgtttttgtagttttgtgttttatcgtaagagttaaggttttaggtgggagtattgattagttgaatatggtttatgtatttgaataaaattttattagggtttagtatatgtaataaaatgtattaattttgggggtatatttttataagttttgataattttttttttttttaaagatagagtttcgttgtgttgtttaggttggagtgtattggtgttattttagtttattgtaacgttcgttttttgggtttaagagatatttatgttttagttttttgagtagttggtattataggtgtgaattacgacgttcggttaatttttgtatttttagtagagacggggttttattatgttggttaggttggttttaagtttttgattttaggtgatttatttgtttcggttttttaaagtgttgtgattataggtagttttgataaatttttatattatgtaattattatatagaatatttttattttttgttttttttattttagtaattttttagtattgtattttagttaagttttattttttattttaggtaatggatttgttttttttggagttttaaatgaatgatattatatagtatatttttttttgtgtttggttttttttgtttagtaaaatgtttttgagatttatttattttgtagtgtgttagtagtttatttttttttttattattgagatgtagttttattttgtggttaggttggagtgtagtggcgtgatttttatttattgtaatttttatttttcgggtttaagagatttttttgttttagtttttcgagtagttgagattataggtgtgcgttattaagtttagttaatttttgtatttttagtagagacggggttttattatgttggttaggatggttttaattttttgattttatgattcgtttatttcggttttttaaagtgttgggattatagtcgtgagttatcgcgtttggttttatttttttttaatattgaatagtattttattatgtgtataattatagtttgtttatttatttatttgttgatgaatatttgtgttgtttttagtttttggttattataaagaaagttgttatgaatatttgtgtatagtgaggggatatgtatttttatattttttgggtaaatatttagaagtggaattattaggttatatatttaattttattagaaattgttaaattgttttttaaagtgtttttaaattttatatttttattagtaatggatgagagttttagttattttatatttttgtcgatattttgatatgtttagtttttttattttagttatttatatgaatatgaagggatattttattgtggtttaatttgtatttttttgatgattaatgatgttgagtatttttttatgtgtttattggttatttatatatttatcgtggtgaagcgtatgtgtaatttttttttgtttatgtttgaattggggtgtttgatttttttttattgagttgtaggagtattttttatattttgtagatttgtttgtatagttttttttttttttgagaaatttagttgttttggttattttgaattttttttttattttttttagtttagtgaggttgttggttttgtttggattttatatttttatattgtagtttagaagttgtttttaggaagaaggtttgggtgataaaagttggtgtaaaagtaattgtaggttttgtaattaaaggtaatgataaaaattataattatttttgtattaatttaatagtaggttttaaataatttgtttttttttttatagaaattatagttttgcgttgtttgttgtttaatgtttgaatattgttattttttatattttttttagttttttaggattttttttttttttttttttggaaagggagttttattttgttgttaggttggagtgtagtggtatgatttcggtttattgtaatttttgttttttgggtttaagcgattttttttgttttagttttttaagtagttgggattataggtgtttgttattatattcggttaatttttttatttttattttttatttttagtagagatggggttttattatgttggttaggttggtttcgaatttttgattatatgattcgtttgttttggttttttaaagtgttgggattataggtatgagttatcgtgttgggtttagttttttagttttttttttttttataatgggagagttgttttggaagtttattattttttgatgattggaatttttttttttttattttgaatgtatttaaaataatagtgttttttgtataattgaaagtgtttttttttttttttaaagggggatgttgggtagcgagtagagggagaaatttttatttttttggttttttgtttttttatggaataaggagtgggttatttgattggtgaatttgggagaaggaatagagtatgtatagttattttttttttttttttttttgggttttttttatttttagagagtatgtgttttttattgtttttggttatatggtaaggtatttgatagttgtgttttttaattggttttatacgtggtgtagaagagatgtattttttttttttgagatagggttttattttattatttaggttggagtgtagtggtatgattataatttattgaagttttgattttttgagtttaagttattttgttattttattttttacgtagttgtgttattggaaaggggttttgatttagattttaaaagagcgtttttggattttatataagaaagaattttaggtgagtttataggataaagtgaaagtaattttattagagaaataagtaaataaatgaatggttattttataggtagagtagttttgagggttattggttggttatttttagggttattttttgattatatgttaaataaggggtggattatttatgagttttttaggaaaggggtaggtaatttttagaattgagggttttttttttttttggattatatagggtatcgtttggatgttgttatggtatttgtaaattgtgatggtgttggtgggagtgttttttagcgttttaatgtattatagttagttagtatataatggatagtgaggatgattagaggttatttttattgttatttgggttttggtgggttttggtgggtttttttattgtattttattttattagtagggtttttatgatttgtattttgtgttattaattttgtcgaatttttattttattttgtgattaagaatgtttaattttttgggaatgcgatttagtaggttttagttttatttgatttagtttttattaaagatggagttgttttggtttgaatgtttttgatagttggaattaagtgaaggatttttgagtgatgtttttttttttagttatgttgtaatgtcgtcgttatgttatgtatagaaataagaaaatattgtttttaatgtttttaattatttttgtttatggaaatgtattcggtaagaagttatgagattataataatatattagttgttaggattttgtttttaattaagatggaggaatagggattagtaaatagtaaatgtttttttgtttttaattaataaaaaaatttgataaattaggtttgtatgataattgtttttagatattggataataagtagtttagaatagttgtttttgagagaggtaagtaaatagaatgagttttatgaattagtttattttttggagaaaatttgtaggttgtagaatagggagaggggatttatttagagtttagaagtttttttgggttgaggaaataaagttgggagtttggggagatttaggtggtaagagtttatagggtagaggattggagaggagagagttgtatagaatattggagatttgtagggggttttgttattaatagaatttttaggtgagtagtggttgatgtatatatttggtgaaagaatttagatgatttatagagtttatataggttaggaatagtttatttttttattagttatagtgaagataaaatttatagtatttagggtattgggtagagaatttagaaagattatttgagaggaaaaattagtagtatttttgtttttatttaataaaatttaaaagttaagttttgaaaagtaatttattgtgatttagaaaaaagtttaaaaataggtcgggtgtgatggtttacgtttgtaattttagtattttgggaggtttaggagggtagattatttgaggttaggagttcgagattagtttggtcgaaatatagtgaaagtcgtttttattgaaaaatataaaaattagttgggtgtggtggtgtacgtttgtagttttagttatttaggaagttgaggtaggagaaatatttgaattttgaattaggaggcggagtttgtagtaagtggagatcgcgttagtgtattttagtttgggcgatagagtaagattttattttaaataataataataataataataataataataattattattattattattattattatttattatttcggtattttgggaagttgagggaagaggattatttgaggttaagagttcgagattagtttgggtaatatagtgagattttaattttataaaaaaaaaaaaaaataataataataatagtgtataaagtaataattatagtatgttaaagatatagggatgggtaagtgtttaacggaatagaaaacgagtttaaaaataatttatgtatatttgaaataatatacgatagagataatataattagtggggaaagaatgaattatttattaaatggtattataaaaaaataaaattagattattattttatattaattataaaattatattttaagtaattaaataggttaggcgcggtggtttatatttgtaattttagtattttgggaagttaaggcgggcggattataaggttacgagattaagattattttggttaatatggtaaaaaaaattttatttttattaaaaatataaaaattagttgggcgtggtgacgtatatttgtagttttatttatttgggaggttgaggtaggagaatagtttgaatttgggaggtagaggttgtagtgagtcgagattacgttattgtattttaggttggtaataaagtgagattttgttttaaaaaaaaataaataaataagtaaataaataaaattttagaaaaaaataagaatatttttttgattttaggataagaaaagagttttaaagaagaaataaaagaggttaggtgcggtggtttacgtttgtaattttagtattttgggagattagggcgggtagattataaggttaggagttcgagataagtttggttagagagtagtttagttaatatgggaaatttcgtttttattaaaaatataaaaattagcggggcgtggtggtgtaagtttgtcgttttagttattcgggaggttgaggtgggagaattatttgaatacgggaggtagaagttgtagtgaattgaaattatattattgtattttagtttgggcgatagaatgagatcgttttaaaaataaaaaagttaatttataaaattagatatataaaagaatggtaaagattataaaattttattagtaatttggaaagtgtaaattaaaatggtaagaaaatagaattttatgttcgttagattggtaatatgaaaatatttgattaaattaagtgattaggaggatataaattgtataagtggtaatattagttggtatattcgttttaggagagtaatttgtaatcgtttatagaatgaaaatatttttggtcgggtacggtggtttacgtttgtaattttagtattttgggaggtcgaggtaggcggattataaggttaggagatttagattattttggttaatatggtgaaattttatttttattaaaaatataaaaaattagttgggcgtggtggcgggcgtttgtagttttagttattcgggaggttgaggtaggagaatggcgtgaatttaggaggcggagattgtagtgagtcgagattacgttattgtattttagtttgggtaatagagtaagatttcgttttaaaaaaaaaaagaaataaagaataaatttgaataatggttttggaggttttgtatgtattgtttatttttgtaatattttttattttttattttttatttttttgtgttttgtatttttatttgtgttttttttttagttttttaaatatatttattttaggatttttgaatattgttttttttatttggaatttttttttttttgttttttatttttaatttttttgtttagtgaattgttatttatttttttagattttattttaaatgttatttgtttagggatgtttttttagattttttaatgtttttgtattttgtttttaaattagttgtaagaatttgtagttgggtttagtggtttacgtttttaattttattattttttggagttaaggcgggcgaattatttgaagttaggagtttaagaattagtttgattaatatagaaaaatttttatttttattataaatataaaattagttaggtatggtggtatatgtttgtaattttagttattcgtaaggttgaggtaggagaatcgtttgaattcgtgagatagaggttgtagtgagttaagatcgtattagtgtattttattttgggtaataaggggaaaatttcgttttaaaaaaaaaaaaaaaattgtaggtcgggcgtagtggtttatttgtaattttagtattttgggaagttaaggcgggtggattataaggttaggagttttagattagtttggataatatggtgaaatttcgtttttattaaaaatataaaaattagttaggtatggtggttcgcgtttgtagttttagttatttcggaggttgaggtaggagaattgtttgaattcgggaggtggaggttgtagtgagttaagatcgtattattgtattttagtttgggcgatagagtaagattttattttaaaaaaaaaaaaatttgtaattataggttaggtatggtggtttacgtttgtaattttagtattttgggaggtcgaagttggtggattacgaggttaggagatgaagattattttggttaatacggtgaaattttgtttttattaaaaatataaaaaattatttaggaggttgaggtaggagaattatttgaatttaggaggtagaggttgtagtgagtcgagattgtattattgtattttagtttggatgatagagttaaatttagttttaaaaaaaatataaaataaaaaataaaaataaataaaaaaaaagattttttaaaagaaagaaagaagaattattttttttttttttttggggataggggagggggtcggtgtaagttattagatttaatcggaggtattcgggacgggggcgcgttgtatttattcgttaggttgttcgcgtcgtggttttggaaggtttgaaggtcgtcgatgcggtagagggcgttcgtgtgttattatttttgcgtcggtagttcgcgataacgcggcgttcgtacgattatgattacggtattagtaagtatgtcgagttagtcgagttagaagagtagtagtagtgtttagcgggtgcgtatttagtcggggttgtttgttatttttagtagtttttttttggataggttcgtgaatttagtcgcggttgtcgttttcgtttcgtttttcgttattttgatttttattagattatttttttcggttttcgttagggatatggtcgttttagacgtcgcgtttatcggttgtttttcgggttttaatttatttagttttattttttttatatttatttcggtgttttggtttatggtgtttgtagaatcggcgatacgacgtagtttgcggttagatggtggtttaatttttatttggattttcggatttagaacgtttttttcggtttttgtgttttcgcgtagtttcggttattgtatttgtttagtagtaggcgcggtttttgggaaggggtagcggagtttcgtttcggttcgttttttaaggtggaatttcggggattgttttagtcgtgggcggtttagggtagtaaagttaggaatacgttttcgatagtattttttgtatggtttaattttttatttttaatttgtttaattttaaagttttttttaatttgattttgggaaggtttggtacggagttatttttaagtggattaggtttgtgattttgttttaaatttcgaggtttttttagtgttttttaggttttatcgtttttaaacgtttttttttttttatttcggtaggttagtgattattttaatattattttttatttgtttttggtttacggtttcggtcgtcgtttggtttttttaattttgtatggttatttgtatttttagaggtagttagttataatttttgtttttttttttattaaggtttgtttttttaggtttttgggatttggcgttagatttttgttagatttttgttttcgtgtacggtttatttttattcgttttttaagatttattttgaatttattttaagaaattttttatgtagtaattatttattgtgtatttattataatattttgttttgttaattttattgaatttaatattaatttagttttttttatagtattttaaaatgaatggtttgggtaggaaggttgaggtagatatttttttttttattttattttatttttagttgttagtatttggatgtttggtagttaggaattagatatttagaagagattgatagggttgtaatgaatataatagagttaggttttagaggtatttattttttttgtggaatagattagaagatgttatggttagatttttatttattttgtaggaatttttatagttatttttaaatttttttaaggttttgtttttttattattttattatgttaggttttggaggtagttggtattgtagaggttttgaagaagtttagaattttttttatagggtttttggattgaagtggggtagagatagggtttatagtagggaattatcggatattaatatcgtggggtgttaatatttttaggaattttttgtttttaaatagtgttagttgggttatttttagagaggagttggaggaaatcggtttttttttttttttttatttaggttggaagttaagattgttgtgtatttggaagaaagtaaaagttaagatttgaagtaatagtatagagaaaagggttattttttgttagttttttttgtaattttaggtatttaattttatttttattttaggaataaggggtgtacggggtagtttttgggagaaggtaagtaagtgggtttagattagtgtttaaagataataagagatttaaggtgttttgtatgtgttagataagaagtgttaattagaggttttgaatggattatatttcgagtataaaagtttaaggttgggcgtagtgtgatttatgtttgttatttagttttttaggaggttaaggagggaggattttttgaggttaggagtttaagattagacggggtaatatagtgagattttatttttaaataaataaaaaaataaattttaaaattatttgggtttggttgggtgtggtggtttatatttgtaattttatttattaatttttgtaattttattttttatgttgtggtatgagaatcgtttgaatttaggaggtagaggttgtagtgagttaagaatgggttattgtattttagtttgggtgatagagtaagattttgttttaaaaaaattaataggttaggtgtggtggttgatatttgtaattttagtattttgggaggttgagggtggcggataatttgaggttaggagttcgtgattagtttggttaatatggtgaaattttatttttattaaaaatataaaaattaattggatatagtagtatacgtttgtagttttagatttggaggggtgaggtatgagaatcgtttgaattcgagaggtagaggttgtaggttgtaataagttaagattgcgcggttgtattttagtttgggtgatagagtgagatttcgttttaaaaaaaaaagaaagaaaagttttgaattttttttttggatgttttgatttagaaggtttgggatgggatattagaatttatgtaataagtttagttaagaataagagaaagaataaaaaaagaataagaggtcgggcgcggtggtttacgtttgtaattttagtattttgggcggtcgaggtgggaggattatgaggttaggagatcgagattattttggttaatatggtgaaattttatttttattaaaaatataaaaattagttggtatgatggtgtatatttgtaatcgtagttatttagaagattgaggtaggagaatcgtttgaattcgggaggtagaggttgtagtgagttgagatcgtgttattgaattttagtttgggtgatagagtaggtttttttttttaaaaaaaaaaaaaaaaaaaaaatttattatttcggtatattgggaagttgagggaagaggattatttgaggttaagagttcgagattagtttgggtaatatagtgagattttaattttataaaaaaaaaaaaaaataataataataataatgtataaagtaataattatagtatgttaaagatatagggatgggtaagtgtttaacggaatagaaaacgagtttaaaaataatttatgtatatttgaaataatatacgatagagataatataattagtggggaaagaatgaattatttattaaatggtattataaaaaaataaaattagattattattttatattaattataaaattatattttaagtaattaaataggttaggcgcggtggtttatatttgtaattttagtattttgggaatttaaggcgggcggattataaggttacgagattaagattattttggttaatatggtaaaaaaaattttatttttattaaaaatataaaaattagttgggcgtggtgacgtatatttgtagttttagttatttaggaggttgaggtaggagaatggcgtgaatttaggaggtagaggttgtagtgagttatgatcgtgttattgtattttagtatgggtaagagagtgagattttgttttaggaaaaaataattaaaaagttaaaaaaaaggaaaaataattgtatatttagaattttatatttagagaaaatattttttaaaaatgaaggtgaggtcgggtatagtggtttatatttgtaattttagtagtttgggaggttgagataggcggattatttgaggttaggagtttaagattagtttgattaatatggagaaattttgtttttattaaaaatataaaattaatcgggtatggtggtatgtgtttgtaattttagatattcgggaggttgaggtaggagaatcgtttgaattcgggaggtagaggttgtggtaagttgagatcgtattattgtattttagtttgggtaacgagagaaattttattttaaaaataaaaaaagaaatgagattgggataatatggagaaatggaggagaaggttagaatgattgaggtttggttttttatattttttttgtatattaatgatttagattataaggtttttagtaagaattttttttttaagttttagaggagtttgtagtgagtcgagattatattattgtattttagttggttgatagagcgagattttattttaaaaaataaaaaaagaaaaagaaaaaaaaaaagaaaattatttggttatagtgttttagtttttttttttgtaaaagggaatattaaaagtatttatttattttttaaggttgttaatatatataaagtatttgtaatggtgtttggtattattgattagtaggttagagattttgagttagttattattagagaatagagggaaggaaagttagggttttatatgggatattttagtagagtgtgaatagagggagaaaatgtaaatatttggttaggtatggtagtttatggttgtaattttagtattttgagtggtgaaggtaggagggttgtttgaggttaggagtttaagatttgtttgggtaatatagtaagattttatttttataaaaaattaaaattagttaggtatagtggtgtatgtttgtagttttaggtatttgggaggttaaggtatttgagagggtggtttgagttcgggaggttaaagttaatttttagagaattagggagtagataaaattagtaagggtaaggttgatggttaataggtaagttagtgttttttttgtatttttatttatttatttatttatttattttttggagattaagttttgttttgtcgttagggttggagtgtagtggtacggttttggtttattataatttttattttttagttgtaagcgagttttttgttttagttttttgagtagttgggattataggtgtgtgttattatgttggttaatttttgtatttttagtagagaggggattttattatgttggttaggttggtttcgaattgttgattttacgtgatttattcgttttagtttattaaagtgttgggattataggcgtgagttatcgtgtttagttattagtgttttttttttaggatttgtttaattttaagttagagttattagtgatagagtacgagtattgttattttggataagtattgttattttaagtttattttgattaaaaattgtttaaatttaaagggtattaatttaatggttaaagttattatgattataaattataaatgatatttttatttagaaatattttatattttttttcgattagagatatgttagtttcgagat
